United States Patent Application Publication US 2025/0130221 A1 - sequence listing, part 4

SEQ ID NO: 323 - DNA, 22919 bp, Homo sapiens
  source 1..22919: mol_type = genomic DNA; note = NC_000020.11:c56392308-56369390 AURKA [organism=Homo sapiens] [GeneID=6790] [chromosome=20]
ttgtcaaccaatcacaaggcagcctcgctcgagcgcaggccaatcggctttctagctagagggtttaactcctatttaaaaagaagaacctttgaattctaacggctgagctcttggaagacttgggtccttgggtcgcaggtgggagccgacgggtgggtagaccgtgggggatatctcagtggcggacgaggacggcggggacaaggggcggctggtcggagtggcggagcgtcaagtcccctgtcggttcctccgtccctgagtgtccttggcgctgccttgtgcccgcccagcgcctttgcatccgctcctgggcaccgaggcgccctgtaggatactgcttgttacttattacagctagaggtacaaggggtttgttgagtggtgttgacatgcgcgggaggggtgggtgggcttcagattggattttgtcctccgagatcacctgggtaagaaaagcacagaaggtctctgctgtgttggagttcacgttctagtgggtggggagacagacggtaagcgtacggagaacttgcagctggggtgggtgttacagaggaaaagcaggagtgcggtttaacgggggccgctttagatagaatagcctaagaaggcccttgtcctggctggatgagtgggtgaattgatgaatgagaacctccttgcagaggccttcccggtccgtacttctcagaccgtagaccttggagcagttgtaccgggataacttgcagtgcttgttaaacatatagctccaccgagagcccggtaaatcagaatctctgaggggtaggacccaggtgtctagttattaacaaactctccagatgattcttaggtttcattgagaactagggatgcagaccggtgcatacaaatcgtctggggacgttaaaatgcagaatctgtttttttagacctggggttaggcctcagagtctccatttctaagaaccatccggctgaggtagacgtagccactgtccttaactctcgtaatgtctcttcctcttccgtaaccttccttgtcccttgaattaaacgtttttcagcaacctactcagttcgtccttcccttcatctctgcagacatgcacaggtctgagggaggaaggaataaaccgtataaacctcctgcgctattagcctaacagcttttctattcaaaatagtaggacttctggtttgaactgaatggatcctgtgaaagtcatctggttcttcaatctggttgcagattagagtcacctgaagggcagtctccttggcgttgtctccagaattctggattagaatcttattccattctgcttgttattcaatttccctagaaagaaaggtagaataaattggagcaaatgcctgtagcttctgtcagaagaatgttgaataaatgttgttaggcctatgtgatctcattagactgctacttagaattgtaagggaagtaaagcattagagcatgtgtgaaattaaatatttgattaacacaagtgtgcatttccttgttgctgtttatcaacttttacttacccactgtttttttataagggctgcagcctgtagtctgggcctggcttcatcatggaattatttgcttaattgtaaaatggtaatcttaatttttttttttgagacagggtctcactccattgcccaggccagagtgcggggatatttgataagaaacttcagtgaaggccgggcgcggtggctcatgcccgtaatcccagcattttcggaggccgaggtgggtggatcacctgaggtcgggagttccagaccagccctaccaacatagagaaaccctgtctctactaaaaatacaaaatcagctgggcgtggtggtgcatgtctgtaatcccagctactctggaggctgaggcaggagaattgcttgaacccaggaggtggaggttgcgggtgagccgagattgcgccattgcactccagcctgggcaacaagagcaaactctatctcaaaaaaaaaaaaaaagaaacctcagtgaaatgaaagactgaactacacacctgggggaaaagcgtaataaagggagcaagaagtgcaaatgcttatggcaggggacttatttgcagaaagaaagccttgtgtggctggtacacggttgacaagaagaggagatgaagtcagagaggtagttagggtccatgttctgtgagacttcaataggcctgtctatgcaggttaggagtttgcattgttttgattgagttgggagccatgggggtcttctgaactgaggatcaacacatctgatttgttaatgagattgccggcctcagtgttaagaatggaccatgacagggtaagggtggaagtggggaggccattgggaggctgttggaaaaaactcaagggagagagaataatggtttgaccaggtggtagtagtagaggtggtgagcagtgatcttgaaggcagagcctacagaatatgctggtggattaaatgaagggtttgcgagagagaacctcgtaaagggttattatgccaaggcttttggcctgagcaactgacaggatgggtttgccatgcactgagatgaggatgtctagagactagatttggggaggtgagagtggggagagattaggacttctgtttgggacatgttagaatggagatgccgctcagataatcaggtgcagatgttgcatagaaagtagaaaatgtagatcaagagttcaggggagaggtctgggctgaagaatgaatatttgggagtcctcagcctgtagatggtactgaaagcaaagagactggatgtactcggctagggagtaattggagatggagaagtcattctaggcctgagctcagggcacacccatgaacagggaggtgagaagtggagaagggaagaggttcagttttggatatgttaggattgaggtgcctggcagacatttttgggagatcctgggcaaatccttggatatccaagtctgacagtccaaggagagactagggcagaagacgcactttgagtggtcctcatgaaggcatttagagctgaggcactgggtgatatggatccctggtgaaggtgtagatggagaagtggagggtccagggactcgttcttgagtcaccccagacccttgatctggcaaaaatgagactgacccagcaaggagggaaagacaggacgactaggtggtagataaacctggaagtgaagtgaagaaaaaagtgtaagatgtgatcaaccttgtcagattctgctgaggatgcaagtacggggaaggtggaattgacccttgggtttggcagcagtaggtgtcagccatgagcctgacaatgtggtggagacaaaaaagccaggtggggatgggctcaggggaggggagaggagcagtagaggtggcaagtgtggacggttcttctggagctttgctgttggagaggagggggtcattgttagcaacgataatagaataaagaggacttttattttattttattgttttgagacgaagtctcgctcttttcccataggctggagtgcaatggtgtgatctcagctcactgcaacctctgcttcctgggtttaagtgattctcctgcctcagcctcccgagtagctgggattacaggtgactgccaccacgctcagctaagttttgtatttttagtagagacggggtttcaccatgttggccaggctggtctcgaactcttgacctcaggtgatccgcccacctcggcctcccaaaatgctgggattacaggtgtaagccaccatgcccggcctaaagaggacttttttaaggtagcaggtatgccagtaggctgcacagggatggaagtgatccattagaggagagatgatggagcagcaagaccatcaggagtgaagactccgtgacagaggatgggacgcagtgcccaaggggaggttggccttgcagggaaagcacatgcctgtccctccctcattagcttcatttggacaaaacatgtaaaatccggtgtgttgtggaggccttttgattggggaactgtaacgctgcctatcgagcaacagcactttaagcaggtggctttgttcaaattaaaggttcttctttttcttttcaggcatcatggaccgatctaaagaaaactgcatttcaggacctgttaaggtaaattgaataatctgtaatctcattcacatttataaacccacatggaggttggtcttgtcgggaattctttccgcctttactttggatttaaatttagatcccttactgtgatcctggatatgaattagtcacttttctcgtgttcagtaacattttgctgcttcttagagtagcttttttgttctgctttgtcttataatcggctgcttaagtttctatatccctccactgtatgcaggataatagtaataatgcatctggcaggagttcaaaacttttaaaattggccataaatataaaataattagaaaaaggctaccttgaattactgtatttgattctaagttcctatgataacggccatttaaaaaattgctctatatttaaaatgtttctttttatttgtctttgtctgaatgcctgctgcgttgtggacagtgtgctaatttcaggagtaactgactttgtatttggaagtcttaacaccctctctttgtagagcactcataccgttgagctggggatggactttgaggctttcatttctagcacttgtccctcacttacaatgagctgttgaagctgaaggaaatctcatccctcctaccccttttagtttgattagctgagggtgttagagttaacttaacaatttaaggttgtaatacagtacttacaggcgtataaataatacatttcaaggctgggcgcggtggctcacgcctgtaatcccagcactttgggagaccaaggagagtggatcacaaggtcaggagttcaagaccggcctggccaagatggtgaaaccctgtttctactaaaaatacaaaaaattagccaggcgtggtggcaggcgcctgtcgtcccagctgcttgggaggctgaggcagagaattgcttgaacctgggaggcagaggttgcagtgagccgagatcatgccactgcactccagtctgggtgacagagcaagactccatctcaaaaataataataataatacattttagtagtaactttgtgaagtgtctacatttgtttcctctttgtcagttttttgctcaattccattttgtcaatacttggaaaatgaaacattggttaatcaatagtacagtaataagcttattgtggaaaatcttcgatatatgaaaacttagactcttctaaaacttcatgaagataataccactgttgaacgttttgacgtatttttttttggtctttttcttaaacgtatattatcaaagaaatttcaatggaactgagattttggcataaagtttttgtatcatagctttttgccaaatagcaatgtagtgtctatttccaaattattgagaaattttagaaagtgtctccttcattaatggatatttgttaataaagcatgatttttaggggtgaggaattggaggggatagaaggtatcattcaggtattcttagccacatactaactatcctctggaggtactgattaaaataccttttcaccttccatctcttatcagtgacattcattattttgctatactagagaacaaactttgtgaaattctcaatatattcatcttttgctttcatgaatgccagaaagtttattttctcttccattctaggctacagctccagttggaggtccaaaacgtgttctcgtgactcagcaatttccttgtcagaatccattacctgtaaatagtggccaggctcagcgggtcttgtgtccttcaaattcttcccagcgcattcctttgcaagcacaaaagcttgtctccagtcacaagccggttcagaatcagaagcagaagcaattgcaggcaaccagtgtacctcatcctgtctccaggccactgaataacacccaaaagagcaagcagcccctgccatcggcacctggtaaactagcttttgagactcattggatagtccttctttgtcgtcgttgctaaaaaagccagtgtatatacttgcacttattgtttggagccttagcttttatatctgttgaggatggggagaaaatatggtgtctgggttgaagtaacagtgtctgcccatgggccagacctatgctaaaaatacagacctgattctcaccctcttggaagagttgggcacccagggaggacacagcataaattggtgtccttttgattgcttgttactgagtctggatgtagggtgcttgcagtaagtgacttgaagggactgagatctaaagtgtgggggaaatccagagaagtgggtgaactgaggcaggctgcggtgaggtcaccatgggcattgctggccatgttaaggaatggggcctcatctctagggcatttggaagctactgaagcttttttgaactcagaagggaactctgccttttagaaagtttactgtggaaggccaggcgcagtggctcacgcctgtaatcccagcgctttgggagaccgaggcaggtggatcacctgaggtcaggagttggagaccagtctgaccaacatggagaaaccctgtctctactaaaaatacaaaattagccaggcgtggtggtgcacgcctgtaatcccagctactcaggaggctgaggcaggagaatggcttgaacccaggaggtggaggttgtggtgagccgagattgtgccattgcattctagcctgggcaacaagagcaaaattctatctcaaaaaaaaaaaaaaaatttactgtggaagtactgaataaattggagtagaacgctggatttaggagtaccagacaggaaggaggttgaggtcagagatggcaataacctgctctgtgtggagcagagtggatgcaattatttaccaactgttgagtgctcattccctgcaggctctgagataagtgcgtgcttcatccacgtcatctctttcaatcttcgtaaccacttcatgaaggtagccagttattaactcagttttacagaggaggaagctaagactcagaagcagttaacttatccaaagacaagccaggatggagaggtgcacacaaatttgagagctcatttacgatgcagactcattagaactgggcaataaattgtacctgaaagatgaataaagaggagttagggatggtgattagattgatattaattgagtgagtgtcctgggggttgaggggtgcacatgtgacaggggcatctggaggaagagtttggaccagcatccagatatctgagcagagcattgtgtgctgttcgagtttgctatgttggagacagaccagtggaaatgtttcatatgtccttgtggctgatgaaatagttaccccagtcctctgctgcacaactgttcattgtgcattttgctgaattggtggcttttatttttatatttccccttggcagctaatataaatggagggtggctggcttatgttttgctacatgttggtgataattcgtatgtagggtatggactgttggctggcccacctagtaaggggaaaaaggtgacgagttggcagctcgtcatgcatgggaagattggtacttctgccacaaaagctcttctttggaaactgaggcttcagaagagcctgcatagtctgcctttaatttatcagagaagggcctgtctatatatacgtctgctcatctttagaaattctataaaggcttcacatgatggaagtcagggtgtagtagtcctttttttctataaggaaaactttaaaaaaaaaaaacagatttatcattcttgacataccattaatattttggtgaccaattctttgattcacctctattcacagcttagcttatcctatatagttattctaaaaacaggtttttaacttattccatatagaaaataatcctgaggaggaactggcatcaaaacagaaaaatgaagaatcaaaaaagtaagctttcttatttacaaagttctgtactgttctactagaatatattatttcgttgcaaatttcgttgtgggaactctggggaaaaaaatgaggcctttatttgcatttagaggatataaatgtttccagatttccaatcttaaaaaaaatggaattttgtgtaatgaggtattttactaggaactcaagtgctttaaaaaatggctttcaaatttagaaaaagcttgtatgaatcttttatagaaatgtgtggaagttcctctctgtccttagaaataaccactacatatggtttatgcgtctgtacttttttattgtacaaaagtgcaagtttttaaaaaatagaatatgttgcagaactatatactcatatatgactgagggttttgacagtattatagttttagttctttattgtaaaggttggctgtaatgtcttccccagggcttttctaaaagcctcctctcagtctctgaactatctggactctagaatgtaccgggaggagcgaggaatgaacccacagactcttttgcttttagcggtctaacagaggctaagagtctaaatccactggttctcatgccccagctagcctgtgggctccatcccgcttccattagtaacagtggctctgtctccaccaccagagtggttctccacccagagagaattagcacctctgggactggagggagcagctggggttagtttgaaacatgcccccagatggtctggaagcattcctccctctctggtcacttatcctttttgtggtcttcagcgttgtcatggccctgttcctctgagcatagtacgggcttgggacatttcccatagagtgcttcaggtctaaaacccgagactgctccttgtcactgactctcacacctgacggcagctagggacgtcagggtttcatgtcgtggcagctctttgatagtggttattgccttggttcttgctgaggatgcatattgagtgaagttggaatacgaaattatttgtagaatgtgtctgctactcattgaaaatttgttagaaaagctttgttttcttcacattctaaagtgttcaaattcctcctaggaggcagtgggctttggaagactttgaaattggtcgccctctgggtaaaggaaagtttggtaatgtttatttggcaagagaaaagcaaagcaagtttattctggctcttaaagtgttatttaaagctcagctggagaaagccggagtggagcatcagctcagaagagaagtagaaatacagtcccaccttcggtgagttttcaggttcatgttcaaaagaatgttcaccaatgctgcacccctccccctcctgtaatgtcagcctcccactgcccaggtcccttcactccctcttacgaggcactgccttcaaatgcatggccccgttcctcacctccccctcccctatgaaaaagattagataagcttctgtactgcactgggttataagcattctcctgtgattctcccatgctctgcatgttaaaataaaattgtattcctttttttttttttaagtataaatttattttttagagggcctgcttttcatagtaccacaaaaaatgattaaatttgtcatctttcaaagagcacttaagtgctctgatcctggaaaaatcacttgaggatttaatgttttgttaatagaatagtttatatgggcaagtctttctggtggacagtgaaggggaatggcaccccttattctgaggtatgcaggaattgcgagcagctacctgcaggttgactacggctggtgggtttttgtttttcctttttttctttcagtgtttttcaaatttgaatcagatgctaatacttcaagtctggccacatcaggcctggtgtgtctctgcctggcaacacctggctggggctgggaggggcaggcatctcacatgggctgtgcttcccattgcctgcttcccgctggccacagtctgcacctgcccagtctgctcagcacccatctactgccattactgatcactgcttttatctgtcacagtgtctgggtgtcaaactactgtggcaatgccatgtcctttttttttttcctttttttttttgagatggagtctcgctctgttgcccagactggagtgcagtggcgcaatctcagctcactgcaacctctgcctcccaggttaaagcgattctcctgcctcagcctcctgagtagctaggattgcaggcatgcaccaacaagcctagctaatttttgtatttttagtagagacgaggtttcaccatgttggccaggctggtcttgaactcctgacctcgcgatcctcccgcctcggcctcccaaagtgctgggattacaggcgtgagccactgtgcccggccatgtcctttttttaatatgtagataattaatattcagctgaattttcctcctaagaataaaggtgcctaaaggaaggaaatagtcttaactaaaccagaggtccattaatactgtgaagtgcttttaaaatgatatgtgggtgtatgtatttttcttggagtgggtttatagtttcagattctaaagtggggtttggagtgtggtttcatgtgaaacaccactggttttacatgaagagtttgtttgacattttgtacatagtcttctgtgagctccaaaccaagtgttagaatgtttatcctttgttgcaggcatcctaatattcttagactgtatggttatttccatgatgctaccagagtctacctaattctggaatatgcaccacttggaacagtttatagagaacttcagaaactttcaaagtttgatgagcagagaactgctactgtaagtgttcatttattgtccaggctaattgtgtttcctttatacctgtcctccatagcaatgtacctttcatcatagtagagtgggttttgtcttgacgtaaggatagcttaatatcaaatatttgaagtggaaaaatcaaaatagcttagttgtaccatatgtacagataaagtctagaaccaggtagaatgttgtatctgcttttgtgcctagtttgcacagctgttttctatggaaatgtatataatgtatatagatagtcaccctcattttctttaatagatgttttattttagaataatttttattttattttattttttttaaagggacagggtcttgttatgttgcccaggctggactcaagtgattctccacctcagcctcccgagtagctgggactacaggtgcacaccattgtacctggctaggatagttttagatttacagaaattgtgaaggcagtacagagagttcccatataccccacactgaatttcctactaattctcctactaacatcttgcattaatatggcacatttgtcacattcaatgaaccaatattgatatataactattaactcaagtccacattttattcagattttcttagtttttctcatgattaaattgggcttatgggtttttgagagggagatcagaggtaaagtgcattcttatcacataccagggatgtaaactcttatgacttttaactgtggatgtcagcttgatcttctgactcagagagtgtttgtctggtttctccactgtaaagttactattttttcccctttccgtgctgtatttcttcaaaggaagttactatgaatagcccacacttaaggagtagagagtggatggagtattgccataaattatctggaattctgtgccagagataaggctgttctcccttatttatttaatcatttatttatttaaagatgtagactcctgggtatttattttatctcttgagctataatgcaatactttattttgtggttcagatcattgcaactttggccactgggaactttttttctttctttttttttttttttctttttgagacggagtctcactctgtcgcccaggctggagtgcagtggcgctatcttggctcactgcaacctcagcctcccaggttgaagcgattcttctgcctcagcctcccaagtagctggaagtacaggcacccaccaccacacctggctaatttttgtatttttagtagagacggggtttcaccatattggccaggctggtcttgaactcctgaccttgtgatccacccacctcagcctcccaaagtgctgggattacaggcatgagccaccgtgcccggcctgctctttttgttttaccaggttcctgggaaaatcattgcagttttgtcttgcgtgtgtgtggtttttttttggtttgtttttacacttcctttttttttttttctttttttgagatggaatctcactctgtcgcccaggctggagtgcagtggcataatcttggctcactgcagccttcacctcctgggttcaagcgattctcctgcctcagcctcctgagtagctaggattaacaggcatgcaccaccacacccggctcatttttgtatttttagtagagatggggttttgccatgttggccaggctggtctctaacccctgacctcaggtaatctgcccgcctcagcctcccaaagtgctaggattacaggtgtgagccaccacgcctggccttgtacttccttactttctgatacaagatgctcaggcctcatcgtgtatatttcctgctccagtcctagaatcgaaccacttctccaaggagccctgtttccttttcttggagaatgttattagaaaccaagctctgggcacttggtgtactcattgctactatggtgtcactacttttaggctttcagctgacacagcaagggaatatatgtggatagtaatctgtgtatagatttatccatctatctcttcattaagcataccatgaattcatactgatgtcttcaacttgaatccattaccacgtttcattctaacttcctcctgtttacctgtaaactcccactccaaaagtgtgaaacctggatttcaccgcccaccatccttttacttattcaattccaatatacatgtataatggtatcagaattgttaaccagctgccacgtgggaaccaactttatcaattagagtgcttatgtgcacttcctttggcctttgtcttatagattccactcatttccaaagctgcttggatcaacactttaccctcatgccctttagtaaggtggtttcctacatttgtaatgcaatgagatttttttgtcacaatctgcatgcccaggatggaatcatttacattttcatatcctgagattgatttttgtgtgtttgctgtaaagttctatgaatttcgacaaatacacaatgccatgtatccaccattatgatatagagaatagtttcgctgctcttaagaaaaaaaaaatcctgtgtctcaactactcatcccttccaacccttccatctctggcaaccactgatctgtttactgtctctattgccttttccagaatatcatgtaattggaatcataacagtatgtagcttttttaggtgggcttcttccacttagcaatatgcattgaagattcatctgtgtatttttggaggcatgagagcttgttcatttctgtttatcacaaaatcatattccattatttcattatatggaagtacctcagtttattcgtctactgaagggtatcttggctgcttctggtttttggcagttatcatgttttggctgtcaacatttgcatgcaggtttttgcgaaacaagtcttcaaattagttgggcacatatataggagtgctattgccagctcatacggtaagactatattttgctttgtgaggaactgtcagtcttccaaagtgatttttacattatattttacattgcattacaaatgtaggaaatcaccttactaaagggcatgagggtaaagtgttgatccaagcagctttggagatgagtggagtctataagacaaaggccaaaggaagtgcacataagcactctaattgataaagttggtttccgtggggcagctggttaacaattctgataccattatacaacggtaatgtggtatcggaaccaatgaattgaggtcctcttgcttctcatagttgccaacatttgatgtcagtgttttggatttttgtttgtttgttttgagacaaggtctcactgtcgcccagactggagtgcaatggcatgatcacccacctcaaactccctggctcaagcaatcctcccatctcagcctcccaagtagctaggactacaggcatgtgctctcgtgcctggctaatttttgtatttttttgtagagacaaggttttgccttgttgcccaggtcggtttcgaaatcctggtctcaagtaattcatgcctcccaaaatattgggattacaggagtgagccactatacctggcctcttgttttgcattttagttattctaatcggcatgtggtggtatctcattgttttgatttctagtttcctaatgacatttgatgttgaacgtctctttttttttttgagacggagtctcgctctgtcaccaggctagagtgtagtggtgcgattttggctcactgcaacctccgcctcttgggttcaagcgattctcctgcctcagactcctgagtagctgggactacaggcacgtgccaccatgcccagctaatttttgtacttttagtagagatggggtttcgccatgttggccaggatggtcttgatctcttgaccttgtgatccacctgcctcggcctcccaaagtgctgggattataggcgtgagccactgcgcccggccttgaacatctttttatgtgtttatttgccatctgtgtatcgtctttgaggcacctgttgaaatcttttgctctttttttttttgagttttgagttttaagagttctttgtatattttggatgcaggtcatctgtcacacatgttttgcaaatattttctcccaatccgtgccttgtatttttgttctcttatctgtgtctttcacaaggctgttttttatttatttttttgagaaagggtttcactctgtcagccaggctggggtgcagtggtgcgatctctgctcactgcagcctctgcctgttgagctcaagtgatcctcctgagtaggtgagactacaggtgggtaccaccacgcccagctaatttttgtattttttgtatagacacggtctcatcatgttgcccaggttgttttttttgaggcattcttgctttgtcacccaggctggagggcagtgacgtgatcttggttctcagctcactgcaacttctacctcctgtgttcaagcagttctcctgcctcagcctcctgagtagctgggattacaggcatgagccaccacgcccagctaatttttgtatttttagtagagacagggtttcatcatgttggccagtctggtcttgaactcctgacctcaggtgatttgcccacctcggcctcccagagtgttgggattgcaggcatgagccactgtacccggcctcccaggctgtatttttaataaaagtccaaatgtgtcagttttttctttcatgattgtgcttttttgcttctccttttttatgtgattaaaattacttgttttaagaagttgaagagtcttagtttgggccgtttcttattggattggcagcttgataaagcatgttgaatggtggttactttgatttttttctgtttcttggtggagatctccgggtagtgtggacattagttctctttttggcattgatgtaaatggcatttaaattcaagtaattttactttcagtatctgatgaaatcatgctactatggacaaatggctctttggtcttgtctctgcaacaatgacatgctgttttaaagacttaatcttaaatgtttgtgcttctcctaagtagaaatagatctctaatttgcttttttaaatattagctaaacaaatcagcttcttatttaattggcaattaatatttctttgagttcatcttttgggccaactttctcttacagatcaataagtaaatctatgctcattaatggtagtgactctacctcaggtactcacattttacccttggtttttttcctggtaatcttgcttatggtgggttgtagtttgttgtttcaggtcagttaatctttttcttcagtttctgatattgatatcctactttaaaagattcaccttataccaacactacaaaattacacattatactacttctctgttttctctccttacacccaaggcttcaatctagatggagttttggtgtaagcagatagctgtttgaaagaaaatgaaagatcatttctgtctagattccttagcagttagaatgaatacacatgtacctgttttccttttcagatgaattcaaataaaactaattgtagtgacatgtcagtgacctatccatatctgcaatctaacaacatgtgaggtgtggaggaagtggcagtgccagagggctatcatgaaactaatagcttcttgtctggaagtgatttgaggagtgaaatccattgccctctcaaactttaatgtgtgcaattaaagcatcagcaactcaaagttggtggtcagaagagcagctttctttgtatttgccttcagtttattgtggtctgaattttgatctccggttttgggctgaaagaatgaaaagtgtttattctgacagtgacatttggtttttactcatctgtttagtaaacctttttgatgtaaaataatgttcaatcctgtctagaaattgctgtagaaagcaaactcttctcaaactttaggcagagctaaatatattttttcaatattcaaacagttatctgtatgttaaaataaattctgggccaggcatggtagctcacgcttgtaatctcagcacttggagaggccaaggtgggaggatcacttgaggtcaggaattagcgaccagcgtaggcaacatggggagactgtctctacaaaaaaaaaaaaaaaaaaaagaaagattaaaaattagctgggcatggtggcacacacctgtagtcccagctactcggaaggaggctgaggtgggaggattgcttacggccaggagttcaaggctgcagtgaggtatgatcatgccatagcaatccaggctgggtgacagagtgagaccctgtctcttaaaaataaataagtaaatacatacatactggacttgtttgctaaatcttagcgatagggactgtaaaacttttctttttcttgcttttttttgagacggaattttactcttgttgcccaggctggagtgcaatggcatgatctcggctcactgcaacctctacctcctgggttcaaccaattctcctgcctcagcctcccgagtagctgcgattataggcatgcaccactacacttggctaatttttgtatttttagtaaagacagggtttcaccatgttggtcaggccggtctcgaactcctgacttcaggtgatccacctgtcttggcctcccaaagtgctgggattacaggtatgaaccactgcacctggccaggaaaacttttcttacaagatggtaattcggtcgggtgcagtggctcatgtctgtaatcctagcacgttgtgaggctgagatgggaggatcacttgaggccaggagtttgagaccagcctggtcaacatagtgagacccccatctctattaaaaaaaaaaaagatagtaacttaaggaaataaaattaacaaaaggactgatttcttatgtacttctatgctgacttagtgtaacccaaaatttaacatgctatttaatatgtcagtgcaactgctttttagtttctgtttattgttcaggataattttttctcctgatattcttgaagtaaatttttagctttaaacaaattcttctgtcacagaatgaccttggttttaaaaaagggaattgactatacttgcaaagttcattttttttttctaaaaaagaaaaaggcagtatttacacatctgaatccttaatttgtaccagttcttcagcactgtcttacttcctggctgcagggccatttgttgccgtatggtgttgtaactttaggttggtgcaaaagtaactgtgttttgcattgacatggcaccagcctaagagctagctctaactggctgaatgtcttttctgactttcaacatcacaccagctgtattagcagagatgactaagcattgggtaatttcacttcatgctaaccactataaattggttcagttgatgtgtgtgtgtgtgtgtgtgtgtgtgtgtgtgtgtagactcctatataatttctacaatccttgctttaaaacctgcaaaatgtattttttgttttgtcttttcctttttgagacagggtctccttctgtcacccaggctgaagtgtgatcatggctcactgcagctttgacctcctggtctcaagcaatcctcctgcctcagcctcccaagtagctgggactacaggcatgcaccatcacgctcagctaatttttaaatttttgtagagatggagtcttgctatgtttcccaggctggtcttgaacccctgggctcaagtgatcctcccacctcagtcccccaaagtgttgggattataggtgtgagccactgtgcctggccaaaacctgcaaaccatgttaaatctatgttgtgttcctttcggaagagatgtctaatattaacttgtgttatataaaatctaaaacataggctttcaatattgttttaacagtatataacagaattggcaaatgccctgtcttactgtcattcgaagagagttattcatagagacattaagccagagaacttacttcttggatcagctggagagcttaaaattgcagattttgggtggtcagtacatgctccatcttccaggtatgtaactttagaggtggaagttgtttggtttaccaaagccctgggagctaaccgtgagctaaatgtaaaatatttcagtgtagattttgtgctgtaagaggggtaggtggctaacccagaagtactttggagtaatttaggcttaataataaactagggtttgcaagaaagtgttattctgtggagatttggggctattagcagtgttctaggcctagggttgaagatgcttaatgtccttagaggctaatgaagggatgaatgagtcaacagataggacacgtatatgacagaggtgaagtgcccacatgttgagtgggaggaactcttcacctctgctgcttcctggatgaggagatggggagatggttcagaggacagcactgacaaagatctagagctcagagtgcaggccatatcagggaacttgaaacactaaattagtttggtggtgctttgagggcagtggtgagagattctcttcagtctgcctctgtcaatagtagggatagtcctttcttatcccctgtcacagctgaagcagagatgtcagtctcaaaacaattcaaatcttagctttccaagtgaactacaatatctttactgttttaaatttgagtttaaataagctttgaaacttcacatgaagtggggcattttaaaacatatatctaccgatgaagttttgtcaactttggaggaggactcaaattatagccaaatgacttaaaaatcaagctagttaaaaaaaaagtatagcctaaaatagaatatgagggagaaaacctttgcttttgttacagagcacttctaattgttccagcaatgcactgaatctgctattgcagtctttttttttttttttttttttaaactggttgtcattagtgggagctgttatctggtgagacaaaccagaataaagacttacaggcttcatggaatcgcagagttaaactgtatcttaaccggttgaattgtgatagaaaagatggcttcttgctttttgaaaagattacttacataaccgatagtcacttcactccaaatcccagatgttaatcatcatcatttcctggttattgcctcagtttgagaacccccgattcagtccgtcggtgctgatggaggggttagatgaccagagtggtagcttcttaatcctacgtcacaattcagtggtgagtgactgtttgtgtgctcagtgggtgccaggcctggctgaacacagcaccagggctgtgaccacgtaagcctccatggtgaagagcagctgataacaaagcaacacgaacccacacagactgttctggcttgctgtctgctgttcccagcttttttccaaccttcgttaaaaaaacctaaaccgataaaaatgcggaattggtagttgatggcatacctgtctatacagtgcctacgttcagcagtttttcccatttagtcagaagggctgcatctgcttttttagtgaacacttgaaaatacgttgcaaacatcatgatgcttcaaccttaagcactataatagaatgcatttcctaaataaggatattctcctatataactagaaccatgatcactcctaagaaaattaacagcattgtcagtatctaatatttagtccacattcagatttctcctattgtccatgacatcttatagctggtttgtaaaatcagaactcaaccaaagcccatgctttgtattggactgtctatgtggttggattgtctctgtggttggactgtctctgtggttggactgtctctgtggttggattgtctctgtggtctaaagccagaccagtctcccactttaaagaggacttttctgattgtgttgccacttaacttggacctttattccccgtatttgctgaaaactggaatgtaggtctcaggtcctgaagagattcaggttaagaaaatttttttttttttttgagacagagtctcgctctgtcacccaggctggagtgcagtggtgcgatcttggctcactacaagctcgcctcccgggttcacgccattcttctgcctcagcctcctgagtagctaggactacaggcgcacaccaccacacccggctaattttttgtatttttagtagatacggcgtttcaccatgttagccaggatggtctcgatctcctgacctcgtgatccgcctccctcggcctcccaaagtgctggcattacaggcatgagccactgcacccagccaggttaaatatttttggcaagagtacttcataggccaccctcaaaatttcagcatcactcgtaccaagtatctatcacaaggcagcatgtgtctacatctccaccccagtgctgttacagtgggacagtttctagtgtattgtcattgcgaccaggcttttaagattcttagcatatctgtaatatccacatgcagatgtagaatccaaatcgtatttacagagaactttgcatggcagcttttatatggtagtgatacattcagtttcttacattctagattattcagggaggttctggagttggacagatttggggttaagcctgatggctagctgtgtgaccttacacacctcgcttcatctgtttcctatgggaatttataatagtagctacttcctagggcacaggatctggcccaggggaagacctcagtgttagtggactctttaatgattgttagcagctgttgtgatcataaaacgagaagcacatcaacctgagcctccctccgttttcaggaggaccactctctgtggcaccctggactacctgccccctgaaatgattgaaggtcggatgcatgatgagaaggtggatctctggagccttggagttctttgctatgaatttttagttgggaagcctccttttgaggcaaacacataccaagagacctacaaaagaatatcacgggtaagacgcaactgaaaaggacccagcacatctgctggaattctttccttatcagcctgaactgcaggccaagatccgaacatctatactatttgatctctctaacctgtgttttgtgatattttatcatttgttgtactccaggttgaattcacattccctgactttgtaacagagggagccagggacctcatttcaagactgttgaagcataatcccagccagaggccaatgctcagagaagtacttgaacacccctggatcacagcaaattcatcaaaaccatcaaattgccaaaacaaagaatcagctagcaaacagtcttaggaatcgtgcagggggagaaatccttgagccagggctgccatataacctgacaggaacatgctactgaagtttattttaccattgactgctgccctcaatctagaacgctacacaagaaatatttgttttactcagcaggtgtgccttaacctccctattcagaaagctccacatcaataaacatgacactctgaagtgaaagtagccacgagaattgtgctacttatactggttcataatctggaggcaaggttcgactgcagccgccccgtcagcctgtgctaggcatggtgtcttcacaggaggcaaatccagagcctggctgtggggaaagtgaccactctgccctgaccccgatcagttaaggagctgtgcaataaccttcctagtacctgagtgagtgtgtaacttattgggttggcgaagcctggtaaagctgttggaatgagtatgtgattctttttaagtatgaaaataaagatatatgtacagacttgtattttttctctggtggcattcctttaggaatgctgtgtgtctgtccggcaccccggtaggcctgattgggtttctagtcctccttaaccacttatctcccatatgagagtgtgaaaaataggaacacgtgctctacctccatttagggatttgcttgggatacagaagaggccatgtgtctcagagctgttaagggcttatttttttaaaacattggagtcatagcatgtgtgtaaactttaaatatgcaaataaataagtatctatgtc

SEQ ID NO: 324 - DNA, 462379 bp, Homo sapiens
  source 1..462379: mol_type = genomic DNA; note = NC_000006.12:c16761490-16299112 ATXN1 [organism=Homo sapiens] [GeneID=6310] [chromosome=6]
gaggagagagcagagtataccgcagacatcatttctactacagtggcggagccgtacaggacctgtttcactgcagggggatccaaaacaagccccgtggagcagcagccagagcaacagcagccgcaagacattgtttctctccctctgcccccccttccccacgcaaccccagatccatttacactttacagtaagtgactatttttttttcctcctccgattctttcccccctcccccattcccttctccccttatttagattaaaatccctcctcccccgatctcccgagaggggcaaaagcaacaaccagcaaacaaacccaaaaccccaatcggctgcacggaaaacagctggaagaggagcgaaggaaatcgacgcgtcgtgttctgtgtgtgtgcgtgtgtgtgtgtgtgtgtgtgtatgtgtgtacatacaaccgtccccggctccaggctcccgggccgacacccccactctgggcgcaggggcggccggcgggggggctgtcaggggctgggtgggcgcccgccgggctagggggcgcgcccgggcggggggcgcgggcggggagagcggcggcggcgccccgctcccccggctgctggtccggtcgcaagtgcggagagccatgtcctcctccctccgggtggcgcaggggggaggcggcggctggggttggggggtggtccctttcccggccgccctcttcccattcctcctccccggagagggcggtgagagagagggggtctcacggagggctggacttctccgcgggtggtcgcccggcctcggcgccctggggcgggggtctcccctcggagggccggcctcgccgggtgtgcggctgcgggcggggaagggactgctcctgcagccgggacgggactttgcgcgcggccgggtgccgggcggggggcgcagaggggtggcctcggggaccgcgcgggggtagcgggtgtgcgggtgcctggagcgcggctggagtggcggtgacggccctggccgccgccgccaccgccgccctgttggtgcggccgcttcctgatcatgtgcagcggcagccgccgcccggagccgggagcccgcgagcgccccagtccgggccggcgcccccgccagcacccgcggcaggagacgaggagccgcggcaggcgctgccctgagccgggagtgaacggctgcgcggctgctgggagggtgaatgaagccaggaggaggggaaggaggaggaggcggcggccgccgcggaggaggcgctgcggggattgggatgcgccctggagccccactgctcgttcactctgggccgggccggagactctgccactcccgggggcgccgccgcctcctcctacgtggttccagtgctgcgcgcaggccggtcccgcagggggcagggaagggggccggacgggcggagcgagaggtgaggcggtgtcggagcgcggcgtgagtgtgagtgagtgtgtgagtgactgtgtgtgtgtatttgtgcgcgcgcgcgccgggcggggggcgagggccgtcgcgacgcggagggggcccttccttggctacttggctgactctgcagcgccccgacccctcttcagccccccgccttcaggctgccttcttaaactccgtggcttgtgctttcattttgtttcagaccacgtagggggctgactgaaagggatgaaacaattcaggttttctagggagattgagcaagaaccttagtgggggtggaagtagggtggtgatcgagactctgccagaaaacaaaacaaaacaaaaaaaaatccgtttctaaggacggcggggattcggttcgagcccgtggctgctctgttttgttttgctttcttggtatataatcctacagataaaagggtaatataaatatttgagaagagggaaattgctgaagagtagtaagggcaaaaaaaaaaaaaaaaaaaaaaaaaaaacagtcggaagaagctggttatataatgcgcgatgtggctaacaagaaaggcaagctatttttattttgtttaccgtatgctgtgcagtagggactcctccaaactggttctgtccccgaagagattcttagcttccctgcgagatccacaggatacaattagcaaaattagaagaccctattacacccacagaataaaaactaatgccttacagtggctttctccctgcacatcctgtcgtgcatgcacgggaatgtgtgtatgcaaataagttctcctttggcaatctagtagtcacatctcaatgacatttgtgttttataatgcaggctgtttttaatatttaaacatcattgttatatattgcacacagcagtgggtagttacttggttatttttaggcacagctagttactttttcaacagtgttagctgagacatttctgtttgggttttttaggaggctgcagttcctagaagccccccttaagcccacccttcggtttatttgatgggtaaaggtagtttgatacttgagctttttttggagtgaagcttatgtctgaggaaaccaccagagagaagagaaaatcctgcacaggaactcttggaaagggattgcaccataacggctagcgctgtggcatttaatctcctctgattgccctctcactgtgcatgcatcagtcaatattttagcagctccgcaaataaatggacttgaatgccatcttctacataaagcagaggttgaagggctcccctgaacctcctggctgcctgtcagtggtgtaggttttcggtgcacttactccagtcctgatcactcatgtaattagatcaggctgccatggcaacagacagtgttcctcgtccattcaggtgggtttgtcttgtgcctgaactactccaagtgttttatgcacagcatttatgctgcccaagccagacgagagactccactatttcaattgcatcttctttcagtcatttggatgggagacactgaatgaggcttctagctactcaacttttataaaggagaccaacaagctgttcttcctaggtgcagtatgtaaatgcatctccccagacagtgaaaggagcctgacaatcctgctggtgtttattgtgaacagatcaacaagtatttggtacttgttagaaacctttcagagctcactaaagcaacatttcttttgcagtctggtgcctttggccttgcagtcagtcacttaaccctttcaagtgtgaagagcgttcatcatttggaacctccattgcccatagcgatggctggatttctaaagggtttactcaggggaataacttattcggaaaatatattcccattgtcacattttaaaacttgacagccatcataacaaaaactggtactgacagtaggcagacattctgaatgtattcattcttaatttggatctattggctgtgatttgaatgatctttggtagtaagttaaaaggatttttttttccttagctaagcgagaaacgatagaggcctatagctagaggactgatagtgcatggtgcttttggacaataaacatgtactttattttaggatgtaatttagtgagcagttagaaagcagtattctagtctttgcattagggcaccactgataaagctggctaagcaaagagaaataatattatggcaaaaaggaaaaaaggaaaagttgctttagttgctgaagctctgtgctgctcaggcaatccaactaagtggggcagggggcgggcgggggggagtattttcataaccctggtatttgaaagaaaagataattgagaattatgtcttgatttagttgtgactgccagtcagtttacaattttatggccaacaaagctaaactggtaaattttttcccccagggctaggattgagagagctactcaactctattcccagggggtttatgagtttttaccgttttgtgagtttatgtggttggtaaattcattgtggcctggtcagatgaagcactgctgtagttaaaatgagctattatttcttctagctactcaacttttataaggtggtaaatagatgggaagcaaggatgtcaatattacacaatgccttggaggtcctggattctattttgcaacatatagaaaaatgctttacttgcagtaaaatgtgaacatatatttttcagtgcacaaataaattcatgtgaaaataagtataaaaaaatgtacctggtgggaaccgccaaaggcaatatttttccttgcggatttcgttttaagagggtttggtaaacagaagtgacactttgtcaaaaatgttacgactagacttcaggacttctgaattgtcttttacacttagaggaagattaaacagaaactctttagccacaagattacatgtcaaatgcctgtaagtttcaacatacctaagtcagttgcctaggagtcctgggaaaggccagtgctgagattattgaaatattagtaaacattactatgactcctgtttttgttgtcattatggagtccaaggacgcacatttctttgaataatgttgtgcctttattgtttttcattctgaaatgtcaagtggattttacttttttgcacataccttgagtgacagtttctgatgactaacactaacactcattttgtttcctattaaaagttaagcaataaacatattttactaaaattctgaaactcacgtaagtaggtaaatgtgggagtgaatgttaattctttaaactgtagttatctgaaaataacacatagattaggatctgaacagcttaaatacttgcatcggtaaagtgacaatagtgaagtaagacaggctattatttttaggggagagatagattatttgactttccttgctctgtattttcagagtaattcaatagttcgaatgattagtttctgtgagagatttagatctgtgcagcttaattgcttcaaataacagatttagttctggtcatacttccaaggttatcagaagcaggccctccttattttgataaaagcattgaaagcaatacattgtagaaatggtaatagaaataataatttctgttttaggaccttacatatagaacttccttttctaagataagaattttaagtcatcaattatgttcacattttattttcatgtaatttagtttaataaaataaatgtactcattcaaaatttttttaagaagtgatatacagtgtcagttttacagaattttttaaatgttggctgaaagaacggtaattacattgagatttttaaaaatatataaatgcttaaaattacagaagtaataaaaagaatggttttagacaaatcttatggaaagttttttattttattcttttataattatatttatggatatttgtctttattagtgtagtaatatattttataacgctcataatttgaactttcaggctaatgtactataaatatttgtattacgcattactaccatcccaaatgtaccaaaacacgtttagagagaacaattatggacaaaaaagcaacaagcattatattttgtttgacatatttcatgttagcagaaatgtttcattgatttttctgtaacttttaatgcatcccatttgtggagtaatgaaaatgtaatgataattgccacaatgtaagcaaaaattgtatcctacctgaaaattactttccagaaaattcatggtagtgtactcagaatttgagactcaagagggcagaggtttccccgattgtgatgttttgatttgggctaagaggaactctttttttttttttttacacttaggtgccctttaacatgacaagttttgaatgagttaggtagcagaagtttttcgtgacagttattgtagctactaacctatagcatctatccttctaacgttcaaagaaaatatatttttctgtcactgtgtatggcaaactttattttcttgtgcccttaattttgttcccctttctcacattatctcctggtacttactgaccattacctcagttttgtttaggccgtctttcttgttaatcttccaatattaatagtattgtattatgttgctctgctgggttttaaaaatattgagtattccatttttggtgtatattattgtataaaatgtcctataaattattttctggtatattattttgtaagtttttgcagtgaatacgtgctgccttgcttgtattcttgccttcttccctctgatggaatacaagttatgtaaactctctgtattatcctaactagtgcagcaacacaaatacttttgaaataagaaagcatactcatgcaagagtaaagtaatcttctatggcatttacatcatgtttgaccctcctctgcacttcagcaaactaggaggaggttgtaacttggactctataaaaccttatctgccaggtgatatgtaaacaggattgtgtgcacacacattgtcatataggcaaacactctcccaactggtgagctcataaaaagcactgtctgtaaatttatggtacctgcacctcatttgagaatcaagtattttgatgcttaatttgagatgacatcatgatcctccctccctgcttcctcatccttaaagaagtactaagattaaatagaattttgtcaacttctacttaacttggccattatttatatttgtaactcaacaggcttcttggtggagggactgtgccttctaaagatctgaaagaccttatagtgtataacagcttaccttccttctctgtacgcacagatcacatgtggggaaaccaaggactacaagaattccttcttttgcatatcagtcctcggcaggcaatcaatgcttaaataaatgcttggtgaatggattagttagaagtaagaacattttggctactgttcattactttgaaaagtgctggaaagaagtggaagttattttcctttccagctgggctgtgctcttaaaaatagtgagtgtgtatggatgaaaataatcatgagtaccgagatgtgttgccatgtacccaaggataattggctcacttacctgtttacggattattcacattggagatcatattcatagctccagaatagtttctttctgacatccaatataaacctgggcctccttcttcctactgttacctggcgtgagcttaggaaacccaaactaagtttaaaatcagcctaagcaaatgtgcagatcagctccagtaatcaaagactgaaaatcagtccagcattcactagtttggggatgattttatagtaaccctgctactgattttaaaaaaatttttttttctgtttaatgtggataattggtaattaccggtatttaagaatataattttaatggatagggctaaaaaaatacgttagcagatcgagtcctcaacttcttccgtttctatgcataggttttacctcacaaaaactactacaagcaccaagctccctgatggaaaggtatatggaagattcattcattctttctttcattcatccattcacacattcactcattcatcatacaatggaaaatttttacttaaccatgtgcaaggaattgtggcaaaatgaaaatgagatgtacattcagtatttaaataaagtttagtggaaagtttagtgaatataaatgcacactttacactttttttctgcattttttcctttcttctattccattggactggtatgctaatagctgtgcactttcatcattgtgtttcaagttgcatgttgatagataatatatgccacattaaaattaggctttggctcaattactattcaatccatgcccattttcacctgatactccttgtagttaccagcatgtgtttatcagatgattggctagaatcattggagaaaagaatgacagcggctggctcaaatggggagaccatcctcttaatttgatggaagggatgacctttttgtatgttggcctccctctgagccttgttgagtaaaaccagacctgccttttgagctggctgggatctgtgtaattctcatacaacagaatgccgaatgtgatgttcttaaaatttgtatttcggtgcatagacacttaaggtggacttattttttaaagcagtctattctgtttttcattttggatttcctctcctgcactccctcgaccattgcaggagcatcgtgcatcaagtcaccagggtggtccattcaagctgcagatttgtttgtcatccttgtacagcaatctcctcctccactgccactacagggaagtgcatcacatgtcaggtgagagttttgcgatgctctctgttttccatctgaggataaagtcctgacctggaaaattgcctcctagccatgctcccttactttgttggctgttgaatatcattttctttgcaaactctgtttgggcatagtgtgggaagttgagaaattgccaagattgttttttaaaacttcgattaaagtatctatctatttggtttaatctatatgttcatgaagactttcatttgactttgcgatgattgataattgccaattggggcttgaacctcatcattttaattgtcagttttccttaatacaattaagaatgctatgctaccagatatcttaagtcacagtttttgcattttagattactgttgtagtataatatgtgcgtagcaaaacagagacctatttgtttaggggaaccagtatttgttgaatcttgaatttctttgtgtctgtttggattttacaacttcctgattttcccacgtacagtaagtttttctggcctggagagtcatgcagacatagggtgtatgcaatggtgatgactcatggttctctattgaagaaagggccagaggatattgcctcaaattaaatcaggaaggaaaaagaggtttgctagaacttggggcagtaagggcttgggaacacaagggtttgagtgtatgtaaccaagggagattgtgaaatagaaaataggggatcaatttctatttgccttggaaatggacctgcttgaaactgtgaagacagactagattagaggttcccaagcctggctaggcaacagaatcacctggagagcttaaaaaaatagaatttggagctccaccctagacttgatgaatcagaatgtttcctgctggaatcattgatctgtctaggcactgatgctccacaggtttgggaacccctgggtcggccggtcttccagcaactcttcctaagttatgttctgtagacttagttggtgagaagctcattctacttttagcaaatctcccatttgaaaatttgaattttcaaaactcatttttcaagaggtagatggatatttgctttataacaggttcatttaaacaataattgaccagatttctttgaagaaagagctgcctctttaccgtaagagccaatttttaagttacatataaattctctggcatcttagataagagcatggagctccgtaatcaacccatctggacttaagatctggagctgccactatgaccttgagtagtcctatgtcctttcaatgcctcagtttattcatgtataagatggaggtaatattagaactttcttatagggctgctgtgaggatggactggagtaaaatagtagatatactgtgggtagaatagtacctggtgtatggtttgtatcttttaacagatgctatcaagtaacttatccctcaacaggttgattgttatggtcatgttttatgatggttgctcctgaaccatacatgactagaaatatgtaaatatacctggaccttggtctttggacccaccctgtagacatctacggctctgcaaagccaaggagccttttatttgtttttgctgaattttaaattctgaatttatcacaactctctgactgatgggatgcatgtgtggtttttttttttttagattgttgtaaaatgaactgatgaattgcatgcataaatgtggttatttgtggtctgagtaaaaataaacaaaaacctgagtgactgaagtattatgcctcaggaaaaacagccaaaaaagtcccagtgggggacaaggtggaggagggaagagtcatcacagacacgatactcttgtaaaatatggaactggattccttacattttattggctgtggattagagaggtgttctttaagtggaaatgtaacctaaagttacatgcaaaggtaagcctcttaagatctacaagtgtcagctgaatgaaaaaggtagggtgggccaggcacagtggctcatgcctttaatcccagcactttgggaggctgaggtgggtgaatcacttgaggtcaggagtttgagaccagcctggccaacatgatgaaatcctgtctctactaaaaatataaaaattagccaggcattgtggcaggttcctgtaatcccagctacttgggacactgaggcaggagaatcgcttgaatcctggaggcagaggttgcagtgagcccaggtctcgccactgcactccagcctgggcgacagagtgagactccatctcaaaaaaaaaaaaaaaaaagagaggaaagaaaagaaaaaggtagagtgtcttactgctactttatctcttagggatgatactcattttaacggttatgtgctaggctgaaaatcctcacatttagatctttggggaaatagtttaattgcaaatgggttgagtacacgtgcattttttttaacctgtggtgttgaaagggagtcatttgtgataacagaaatatctcaagaattttattgtgaaaaaacaggcagcaaaaagtcatatctcttggtcaatatgggcagcttattgagaagagacctaggtttttataatatgttaggcaagtttaagtgtcttatgaatactaaaatactgacgaagtagcgcaaagtcaccttgaattttaagcgctgacattttctatgattgcatttaaagaaagcttataagcattatctaaacattttgcatcaataatggcctcattacagtcctcacgattgacggctcaacgtaggcagaaaaatagtatcattcatgttgtactcttttatattcattcagtttttttcttaaacctacattatagttctttctggttctagttattttataaatatgatacagctatagcaagttatgacctaacttgttcacagtcactatttatgtaaagaaatgattcattcatttattcattgtgaatttttttaaaactactgcatggtgctgtgggaatggaagtgaataagagctaccggaaggcagttattttcttcctggtcaggcaggggaaagaagaaactctctgaaataatgaatacgaatagaatggggttctaacagtgttctaacagtgaaggaattcagaagagtgacgctgagtaggagtgatcaggaaagactttgaggaggagggatcacttgagttgagctctgctgactagattgcatttctgtgggaagagatggatggagcatgaggaaggccatgtgtgtgtctgggacataacaagccaatgcacggtatgtaactgaccaggacattttgactgaagcctaggtgctggtggacatctgaatttctggattcgagcagacagtagagagtatgggaataaaactgccgagaggtcaagtctgaagataaatttggaggagtccttggcataaaagtgatctttgaaattgggttcttgggcctggcaaaaagtttgacacccaggagggggatgactgaattcagggatgacgtcagctggtgtagaatgtgtagagagaaggtaagaggcagcggagagtagcttcaacattgatgtggcatggccttcgtctgccttcttttcatgatctggggtgaaggaggctgggtggctggaggagttgggtgatgtatgcgtgggccataaggactcttctgcagctcaggcaccttggaaactcagtgctgaactacagttcaatgaaatcttgtcaaaacctctcttcctttaagacctttaaaaaaataggaacttgagctaattttagctaaatctaatgtgtgtgtgtataaaaatgaatgctgcgtttgaaattcagcgtatgcggtatctcgttaaacaaatgatccttctattttcctctaaacagttttattaagattttcagtgaagccctgtacgttttaacaacaattccagcatttctttgatcttttctaccgttgatttattcatctcacatgatatgcgtaaatcacaatgtgccatctacttgactctgtagcaattgttcatttgtggcaattcatttactgtactttgataaaccacattaatttgggtgtgttttgtaactttagaggattccctggaggctttctgcagactctttaaaatgtgagatgtgtgtgtttttgtgcgtgcgtgtatactgtatatacctagctactagacacagctctttgaacaatttggcttcccatttatactttatagaaaataaagagatatagaattggtgaatcttgggtctggggagaaagttagtctaagacttcctgatgtaaagtgaaagagaaggctggagatgatgttacgatgatgttagtgagcagtctgatttaatgtaatgagagaaaatttgaggattaagttgtggtttttttttttggtgctgagttagttaggatgggctctctgtgtagcccaaaagggctcagaataaaagcagtgacttatttaactttcatcaaagacaagaaggttaagacaggaacaagagggatggagcaaacaactccaggggcagatcgttcttgtctgcaattatttaatgagcatctaatgtatgagacgcattatgccaacaaggccctctagggaatatggagatgatcaatagttcacatttactattctgcatattaacttattgaatcctcattacagtcctttgaggtaggcatcattattttctccattgcacaggcgaggaaactgtggcacagagagggtgaataatttccccaaggtttcccagctgttaagtgatagaatcgtgcttggatcccagtctacactctcagccctgttccttaagccctgtccttaagaagcttacagtcgagtgcataaggcaaggcatggcttggagtaatatttaaagagccatgacacaggtaacacagtctaggaagtcaggatcaaggaagggtccttccttggagccttctcttttgatgcctgcctgtctgttcagtcacatatgagctttctgacacaggctgtcccatgcaggctttgtggtgttttctccctttctttcactcttactcatatctccttgagattcctatgcactttcaataattattaattgaagaaaatgatgacagtggcaatttgcttatccgtttcaggggattggcttaagttggatccaaatgttattcagcatcaagagtctcagcgagatgatgaacttttgactcttaaaagaacttcactgggtcattgctcagcttgcaagatttggcagatatgaactatttgtctctccagtgtgataggtggtggtgtggcgctgaacgcaagctctaagaataaaacgtgcagcaaaaggaggtcacgctttagtcagggtggccataaggaagcttagaactcacatcccctctgcccctgcctcgcccagtctcattttctctccttcactagaacagtgaatgaatctgagctcattcatgtcaagatgatagagaagaaagatcactttctcttagctggcttagggaaggccagattgtctttcttacactgagtgaaaaattactgaggacttttgttttttttttttttggtcttcaaggcaacatctcttgcttttacagacccacggaaatcgagaagaggatgcaagatttactattcgtgccctagcctggcagcttcagcctacatcacagctgtaatcatatgtgatgcatttttatttacagattagtaggctctgactctgacatatgactaaccgggaagctcctccctgtaacagttgtatgtcgtctgcttcagagaactaattgcttggcaattcccctttggtaattccctctttattttctgatgagttacttaacagcgatgggcttgttgagcagagcgtggagtttaatgtgtgctccagaaactccactgtaggcctgggggatatgtttttcgagttctgtttagctttactgaaggaacagtgaaaccattatatggcctgttaatatttcactcaataccagattaaacaccgagcagcgtgcagttttccaaaagaaatcaaaaccaggcttctttttaaaatgtgcccctgtgcattagaaaattattaaaaaggaatttaatatgtatagaatgtttaatgatcttttgaaaatatggtttcaaatggagtagtcttccaggaccctacagagtgagtatggtgtgctgttggactggtagtttggaggctcagtttctgttgcctgccctgcaacaggatgacttgtgctactcactgtaccttgctgggtctcagttttcctgtctccaaaacacaaggaggttgaaagaaatgatctctcgggactcttctatctctgacattgtacagttccatgaatagattttattgtaattcttgctcccggctcccccaagacctttgcttctgtcaaacatcatttgctgttgtttgactttgttagattttgtatttaattagaatttatattttagctattattatgtcattatttatagagtaagtcataagcggtgcctaaattcatttatcaccccatctatattagtttcatacctgaatacttcctccgctcctttttactgttcttgctaccatgtcccaaacaacatccatttctggaggtggaatgcagtataactggaaagaatctttcagctgattgtgggattattttttgcaagaggagtgcagaagctctgcttttctaagcagtaatatcaagggccatattctgcttttaatttgcaagtagaaatcgttttgatgtcatttggttttacctgcaggtgcaggttttagtctctaggtaattccttttctcttctgcgtcaactttcccaattagtgtgtgcagcattgccttgtctttttggttaattcataagcagttcatacagatgcctcttgattcattgcaattattaatagtttctttaggcagctagtgcaaatagaaaaggtgacatttgagagggtttgttgttttaatttatttgtttcatagacagagagggagggtgaaaatgaaggctttaaagtcagggagattgaggcttgaatccttctggctctggctcctggctttgtggtccaggtcacattccttaaatctgtgatcctcaatttcctcatctgttgaatggggatgataatatcacctaactcacagaatcactggaaagattaaatgtgcactcactctctagatgttgcttatggtagtatctcaataactaataaaaacagacacacacacacacacacacacacacacacacacacacacggaaggcatagcatttaagagctgaataaaaaaagcaagaacaaaggaaagtgctgcatttgaggtatagtcagggtaggaggagcttctcagagcagccagttttagtaggcagagtttgaatctcaaaaggacctttgaaatttgggaaggactaagcaccctccactaacctgtcagtgacgttttctgcaggtagctcttgggaaggactaagcaccctccactaacctggcagtgacgttttccgcaggtagctctgctctacagaaaagagtgtttactacacatgactgataaaaataccatgtttttaaacatgtattgcccaaaccttacaataataaaggaaagccaataaaagcaaaagttccctttgattccaccattccagtccataaatcaagttcatttttatgtgttgttttttagttcttgatgatgtaacttatatctttttttcagttttgtgtttcccatttagcataaacattcttagtaacttcagctatacagttctcatttgcaaggatcacataacattctatcaggttgttttatcttaatttttaagtttcctatcatttttggacattcgagttgtttctaattgtttactgttgtaaagccgcagcgaatgtctttgcacacaagtatttaccgaggacacactcacatcagaaggctcaatactaagttagagggagcttgctctgaattgctttctaaaaggctgtaccaatttacattgttactaatgatataagaatgtctctagcttcaatcttaataattgtgggacttactattttttggctaatttaataggctctttggttttaaagttttcattcctttgatccctctcagagatggaacatttccatctgtgtttatttactaattgttctttttacaattagcaaatggaagtcttgatgttttctaatctatgtatatgagctctttatatgttctagatattaatccatttaaaaagtcctatttgctacagctacttccctagtccagtgtcctttcatttcagtgatgatgctttttgttgtacaacggttcaagtttttatatgatcagcctctcttttcttctacttgtacccagggccaacctggcaggaataaatgagattaccgcagctcaaattctgcaccaggctggcgagtggtccactggatggctttgctgggaatagctctttctttcttctgctcacttttccccttgggaactgtttcctgttgaagtcccagtctttctatttccaagggcccctttccccttctcccacctgcccctcactccttgattctcacccaccctgtgccggtttcctggctgtggcatcctctctgcccagttctcaaccctccgttgctgacctgtgtgtttctcagggagccctgtcctgggagcagtgggtagaaacatgtctggcagcctccctgactagggcctagagagatcagtcaggaatctcaggcctggccaaagtctaaccattatccaagtctctggggtcggggtctttacaacttctgtcttacatttctgctacgtagcaggctgccctgctaaggaatgggctccttggcgctggttttcatccatgtaggaaccagagaggcacgatgctaccctgattcctttcctgttgtagctcttctccggggatagctcttccagtggaaggttgggaacaacttcctagggattgaattttttgaggaaggctggtctcaaagtgtgagttttagctgagtggctctgctgagctggggtggtttggcatatgatatacctcctaaatggcctgtctagatgtattgttgttctggtccaacatgtttttcctctttgaagccaaaatgaacatttgttagtatttgaaatctgctgacatctctgtttttcttaactccctccctgggttctcatggtcctcaggataaagtctagaatccttagcctggctccataggttttgaggaccttccttatctctccagcctcatcactcacatgttgccctgtattcgtcccacgtcggtcccatcgcacttcctccttcaagtgccatactctgttttttgctccagcctttagacatgttgttcttcctccttagaacccagctcctctctctgcactgtctggctacctttccctcattcttgaaatctcagcttagagtctcttcctcacgaagcccttggactagggactatgttatttgctaccttttctgggttcccatagcaccccattcttccccttgtataatacttcacaacccctttcctggcccagcgataggagggactgccctctttccagtatgtggcatctagtgaatgggcaatacatacgggcattccccctgtgatgcttatgttacaaattggatgtgattccatctattaatatggactgtgatgtatataattgtggtgtgtataattgtggtcaggaaccagcatggggtcctgtgaaccacagtggtggaaaaagctatggcacctgtttgttccactggctttgtgctttgtccatcacacagtgagtgaaaaggtgacaaaaatgtgtaagaagcctgtgctaaggagaaagaaaggtccaatgatgaattttctggaaagaaagctgtacgtaatagagtgctgaattcgctcaatcatatttaagttttatagtactgcacttataaccacacaaaacactattattattgaaattcaatacaggaaaaatgcttttgtttttgaacgtctaagactgtcttcctcctcattgaaaaaattcctactgaatttcgattatatgaagatttttagaaatgcagctattgcatcgaatgaataaatgaatttgaggttcacgttcttaacatctgttttctgactttgatcagtctcctttaagtgctctcgtggtcatactctgcaactcaggtgaaagtttctagtgagatagttatcccaaggagatacttttatctggaagagagtagttctgaagttctaagtgaggttggttggttagatttaggttaaggtaccacatggaaaggagaactgcttaaaggggtagggtgaccatgaaaccttcttctgcaaaccctgctcgtcaagtatgaaaccggtggggtaggaggtccatctaatcttatctgtgcccttttgagttggccggccgggtgaccatccatctcctctgggttgtaaatgacttcatctcgaagttgcactgttggtggtaggtgaggacgccttctccaggtggagggagtgcatttgtggttgatggtgtgagcgaccatatgttggaccatatgtcagaacctgttaagagattctgacaggtatggaaatgcctcccattggaaactgaagccctgggtcctttgaccgctgcagcacccccagaggagagtaccctaaggcccttttaaccttgccctgccctggcaggttccaaggggaggcagaaatgactctggatgaattttgttttgattattcttccccttttccaggctctgtgtccagttcacctctggagctgcctgggtcactgcaacccagactagagagaagtatgaccccaagttgtggcttttattgggagacagccttcatctaaggaagtgggaaagaatgtgttccccagctgctgcctttctggtgtctgatctgatacttttcaaaagatagcagttttgtttggtttgatttggattttttttttcttttgtaagtggtcatagacccataagacaagtttattattgtattgacagaagaaaaaaatgccatggttatttatttaaaaatctctttccatacaactttgctttctattgagtttgaaggaaatatggtgatggcatctaagcccaaatttcggtgttttattttggctttcctgttctgtttaagcctctgtaaccccttgaacctttctctactcttcagaaggaacaagttatattttttttccatctcaacatcgtccaaatgaaccgtactattttaacaatctgtgtaaacagatataaaaggaggaagactactttctttaattttcctcccagcgagctgcaaagctgtttcagtcatcctagtgattagcagaatgtgagtaataaacaacattaaaatgaagaaacgtctttctgagtaggaccttgaaatgtgggtctcaccagtagtatatgagccttcctcagactaaactccatgacacagttcatatcatctttaagtcctggagggagggttttttaatatgtgtaaatgaccaaacacagctgttggctgtcctgctgtacagagaacattcggtgacctgaaatcgcaaagtttctgtctctgaagggtgcacttaatttaactttttgccctgaagtctcaagaaatgagacttcctttaaaaaaagtgttcttaaaactttctcattttaaatgtccagggtcttcaaagagtatactgggaggaaagtcctgtgtttcctgtttctcttgtaggactagtcaaaagtaccctttctcttgatggtattctgcagtctgagcctctgatttagtaactacagcctttaaaaccacagttatccagaccatgtgcagtggttaatgtgtcatgagtctgcctcagctgataatagcacatcacagaattcagagtgccttagataaattgtttcagtggatagtcataatgactgcttgagtagaaaagtaccctcattttctaggggagaaaacagaacctacgaggttgactgatttactagattccagtggttagaaatacatgtagcctgtgctgtaaacctgattttctgacttgtagttcagctctcttctccatctccttgtacagccaagataccccagaaattatttgcgtttccgaagttgtaggatgaaaagacatgtctttgcttaactgagttagccccctagaacaatattgagatggagctggaatggtgaagaaatgcaagagtccaatcccttgggtatgtgcaattcccagttaccccttgaaacagtgcttcattataaatttagatgttagaggctgggcatggtggctcatgcctcgaatcccagtgctttgggaggccaaggcggtgggatcgcctgaggctaggagttcaagaccagcctgggccacagagtgagaccctgtctctaaaaaaaataaataaataaataaaaaattatatgttagatgtttttatagtgccggagcctaaacttgatggataaacagagaatgattttcattttgcagccactgcacctttaaagttgagctttttgaggtgtatttcctttaatgcacccatgacagcaaggttgaaaacatcaggaaatcaaattgatctcatatatggaatcttgaaatttaatgtcatctgctctgagaagtccttgtggatgggaagattgtacaatcagatcatttctctgtgtaggtatctgctgtctttctactagatgttacagaagagattagaagaagctcttccagccacctgtgaatcagctttattctgctaggcaagaaggagctggtgctggacatttgtatctgcaaaaaccatgagttacttccccaataattaagtatctactgttacaacatctagtggctaatcttttagtaaaatacactgtccatctcttggtgccagaagcaataactattatgaagccttttctttctttgcagaagtagtttgctggtgaccatattgttagttgcagaaatactcagaatctgattcacatttagacttgacagaagccagattttatatctggaaacctcattagtgaaactgcaaacaagacaaaggccatctatctctctcttaggtgccctcctcaatctctttacagcttttcccccaggagtcaaggagatacagcctggcagggacttttgcttggtgatggagtagctaagaatgtttctctctaacaggtcacagaacagaaagtgctggtggacatctcttcttgccccaagatcttcgttggaagtccccgggacttggtgtctttgccgttcaaagtgtttatgaactcgccaggaggcataatgtgtcaccattttattctgggccaccctaaaggatgacacccagcttcagagacctcctcttggacgacatccctgagaatcaatgttttagctgtcccatagtctgacgtctgtttccgaccgcttttgagctggcgcaggcttagtcattaatggccaggacgatgttaaatgttctgcctgattggcttgcagctacacaccttttgtcatttgcagagcagcaactccctcttgagctcttggggagtctttacacaaatacactagaaaaaaggcacccatccattttttttccatcttggcattagctcacaggcatagtcctgggatgacctggagtagaggcagtggaggataaattcatcttgcacagacttgtttgtgctagttctagcctgtctctcgccacagatctagcttttaaatactcaagtgattggttttgtgtaggaatgtgtggattgttggattggaagaattttctccctggatttctagtgtttacataagcagatacaaaaaaaatttgatcactgatttaaatagcagggcttattttaaaaagttatgggtgcttcaaggtggtacagaataaaaatgtcagggttttttttttttttttttttaacaagtcgtaacacaaccaaaatgtatatattaatgttttgtcaggaaagggtcaaaatggaaaatttgcaacaaagacaaactacaatagaacaagtgcaaacagaagctgacaaatatatgcccctcgttgggagttcagcccatggaatgttatgtaggacaaaaggaatggaagagatatttcagtaacattttgttctctgtcaaaaaccttctgaaatataaatctgctgtgtattggagaatggatacagcaattgattcaagttgaatagctttcatttaactagaatatcccacagaaagcagttcttgttctgacaaccatatttttgctttctttcacttaaagaaaattgaattcatgtttacatatcttatagggttgttttatggacaaagacacgggtcaaaccccatcacagtggctagtgttacaacaaatagaaacatttctaaatgaaataacatttctaagccagggccagtgcctgcagtaataatactaggttggtattatgaagccatttgcaactataaataattcagtcatagatgtgctttttttaaaatcctggttttttaaaattctagtcttttgccaatacacacacccatacacatacttcacctatttgcataatagaggaggaatatgaatatgtatataataaagtcactttattttggactttctgaaacagattaccttttttcttctcctcatgatggctccctgagttgcttccaattgttgaaattccataattacccacaaatatggatgtgcccttctaagggtcttgccatgtcaaccagcccagctgaaagctaatagccagtgttagcggtttaaggaactgagcttcagaattgagagcccccagcaaaggaagttctgtttttattctccatttctactctcctcaaggagaaattaggtgtttattgttttgttttgttttttaaattcccagatcattctggcattggtcctggattcgctgcaaatgtaatttttagcaacatctattactcctgaaatattttggctcttcgtggcctgtatgattcagtagactctgaggttttccaagtacattaaggacttaaatacagaatgtcttaaaattttagggctattgatcaagagaaagcttctcgaggaataaagttctgttaggttttagccctattctgctttcaaaattcttaactggatgccgtctattttgttttctttctgtgtttataactaatttgctacttgggtttattgttttcttacttagaaactacttttttttttgttttgtaaatgcacagcacttaaaaatataaaacagttccaaacagttccaacctgttcattgtttataccttgaccatcttttctgtcttattgctgaaccatcgcttctctttctacttctcttctgggatttcatcttgctcagctaaaattctagtgtgttattctgaatattatggctggagtttcctgaccaacttcttgcatctgagtccatttcctgtgcttaaggctgctggcattccattcactgctcctagtcaaaactgaaacttctcctgctaatgagattaggccttacaacactattaatttcttcctctctatttcttgctccattgttatttctcagagatgaaaatctatttgtcattatgagattcattttggcatcacttactaaagttcccttggatttttctgttcttcatacaccctacagcttcaaactgcaacagtcatcaactggtctttgacaaattagttgtctctacacatggtttacaatattacactagctgtttaaaaataattaagcttctttctgtgttctttgctgtgggtcaggaactttacttcctttgccatgcaacacagaagttaatcacaaatgggtcctctgaaccaaataattaaaaatagagcaaagtttctgaaccaggcggttggcagaaacgtctgtacttccatctgtgcatggttaggaaaatatttcacgatatttaaatagcatcagctttgctctcttttgtgtgagagtgtgtctgtgtgtctatgcgtaattcattgctttgaaggtttgtttgactgttagataatcatataaaaaaagttactggcaaggaaacaggaaagcaaatccaggtgttttgtgcatacattctttatttaccagtctctgtgaaggagcaatgatcttgcttttgcttttctctctgactgaaagtttttgccttgttatgtgctgcagaaaactaaataacattgcattttgactttgaaatctttatgtctcttgattttccacttacaaataacctttgctaatggctttggggagctgttcgtatgtacccgaaatgctgatgaatctatttcagtttgaagtgtggcagattaggaatttctgctctctggaaaggggatttatacctggaatatgcatcaaattcacaaacactttgcgatatacgtgcagacacatgagtgactggttttgacaggaatttaatccttcaattggatttccctttgttcttgtgagtaatcagtatctcataaaatatattcagttttggctaattgtacagctatgatacaactttaagtttctaagatgtaaattactatgtgatataaagataattcccctctagcatttttcttttgtaacagcctctttttactcctgaaaagctctttattttaaggttgatttcattctactaggagaactgttgtgttagataacaactaatgcccaataaatacactgaagggagattaggaactgttaaagaaagaacacaaagcaaatgccttaatttcgttctttcagaacgtatatatttcccaaagttgtcagttcctttatgtttctaaaaacttaccaggtaggcatattcttaatactttgataataaaattaaacactgaaatcaaagctgtagattgaacatgctcacattaagtgaaattaaggagagaggaatacatttcattattaatgtatcagtgaattctggagtttagccatgaatatcagctataatcaataacagtttgagtatttaggcagtttgtaattcatgaaatttaaatcagaagggtctttaaacatctttttgtctaatctcattttgcattcaatttaattctattttttctcagcctactatatgcagagtactatgctagcagggaaaaataatgcggaataagttgtggcccatggtttcaaacagattaatctttgattactctttgatgctttttttgtattatttgagggacagtttttttttcttttttgagatggagtctcgcactgttgcctgggctggagtgcaatggcacgatctcagctcactgcaaccttttaaaaagagttaagtggatcttcctaatgattattctttgtcaatgtaagatattaggacttaatgtattttgtgaactctgagtacacctacaggtgagtggtagatatcttcatactttaaattactgctggattttgtctgtaccccgagacagaattttggtcttctcttatatatagcagttaatattaatgaggcttccctgaaagggttcctggatattcagattcttcacacttttcttataaaccattagatttgtttcctccattcatttgggcatcttctagtgacacacggagtggctcttaaaaaagtggaacttgattgctgatagttttattcaataaatcattgttaataaatatttatttgcgatcagaaacacaaggagggagtgtacacactcagaaaagcccacaatgcagggagcctgttcttctaacaataataatggctggctggcatattgaggatttaggatgtgtcagtcactgtactaatcacttaatcctcacagtaaacctacataggtcattattatctccaccttacagatgaggtaaccgggttagtagcttgcccaaggtcacagagctagtaagtggtgggactgggcttcatgcatgccattttaaccttagaccctgtgcttttaactaattatactctattgcctaccacctgtgtcattgtagaacttgcaaaattatgttcaaaaattgtttttactaaatataaaataaaatacagtaaaatagaaatacaaaagtatattcacaaaataaatgtaaattataaaaaataagggttcagtgaacactcctttaactctacacccatattttaaaattaccatcaactggatgtcctctatgtggacctccccaatcttgtcacattcttcccacctcagaaggaaccactatagaaacatgacgttttaaaatatttttaagactaggcacggtggctcacgtctgtaatcccagcactttgagaggccaaggcaggtggattatttgaggtccatagttcgagaccagcctgaccaacatggtaaaatcctgtctttactaaaatacaaaaattagcacacgcctgtggtccccgctactcaggaggctgaggcaggagaattgcttgaacctgggaggtcgaggctgcagtgagctgagattgcaccactacactccagcctgagcgacagagtgagactccatctcaaaaaagtatacatatatttttcacgaaagtacacaaaaatgcacaccagccagatcactgtttgttttctctcctttttctcttcttttttccctactttttcatctctcatccttcttccttcttttctcgcaccatcatggagaacaaagaagaactgggtcagaacaaacctttaaaaagtgaaggcgagcgttccttgcggggatgcccagtgtcatgactagtgttgggaattcttggtgagatgacaatatttttgcctcactcaaatgaggcatgcccttccaagtaaagcatgctatgttttgtagcaaacagaacacctgagaaggatgatttcatatgactgtgccaacagatctctcacaagcttgtcaggttataattcacaaatcttaactctatagtctatagacattttttttttatatggggtctcactctgtcggttgcctaggctggagtgcagtggtgagatcttggctcactgcaatctccgcctcttgggttcaagcgattctcctgcgtcagcctccggagtggctggggtttcaccatgttggccaggctggttttgaactcctgaccacaagaaatccacctaccttggcctcccaaagtgctgagattacaggcatgagccactccacccagccagtggttctttttcatttgagatggagttttgctcttgttgcccaggctggagtgcaatggcacgatcttggctcactgtaacctctccctcccggattcaagtgattctcctgcctcagcctcccaagtagctgggattacaggcatatgccaccacacccagctaattttgtatttttagtcaagatggggtttctccatgttggtcaagctggtcttgaactcccgacctcggcctcccaaagtaccgggattataggtgtgaaccaccatgcctggcctgtttcttttttttttccaagaggtcagttctcagtctgttgtccgaactggagtgcagtggcatgatcacagctttactgcagccttgaacccttgggctcaagtgatcctcctacctcagcctcccgattagctgggactgccgctgtgcaccaccacacccaactaatttttaaaatttttttgtagagacagggtcttgctatgttgccaaagcttgtctcgaactcttggcctcaagccatcctcccgcctcggcctcccaaagtgttgggattacagacatgagctgccgtgcctggctgacttgtggttcttaatagtgtggctcttaaaatagcaaacatttttgggaaccaatgtgagggcacttcataacacaatcaaaaaccattaagtggaatatgttaagataatgtaaccttgttgttgtcccttaatgctttaatgcaggctttcagcaagtagtaatacctggtatggtgggtgtaaaactcagaatgggtcccggcatggcaggaataagagaattctttcatcggttggaaaatatgtttgaataattcactacatttaaaaaataggtaaagaggcttttggttttggttgcaaattgcactcatccatggaagtttttcaagggccatacaattctgtagatggaggtggcaatttaatgcagtcttagctgtttaggatttagaactatgttacttttaatttacttccatgaaattacaaaaacatgtaatgaagctaaaaagatttcaaaagaagcacatctagtcaaacataaaagtacttaataagggcatacatgtagaagtatattagtctttgcacatatttacatatgtatgttttggttgcttaatatttttcaagtgctgcatgcatttgtatgtgtaaatacagtgtgcaccctttatagaactagtgttgggggactcttttatcagctattatgatttggagctttatcaaatggagtgatttttttttgtgtgtgtgtgagatggagtctcactctgttacccagacttgagtggagtggtgccatctcggcttattgcaacctctgcctcctgagttcaagcaattctcctgcctcagcctccaaagtagctggaattacaggcacccattagcacgcctggttaatttttgtattttcagtagagacggggtttcaccatgttggccaggctggtctcaaactcctgacctcaagtgatccacctgcctcggcctcctaaagtgctgggattacaggcgtgagccaccacacccggccggagtgatattttccaatggtcatgattctggcctgtaacaccaagcagtataacgatgagattgaagtgtgaccatgtgcgtctgcctatttttatgttctatctcatctttttgcttggagaaaaattatgttgaaagactacagtgtgcctataaagcttcaaatatgaaaaaagagctacatatgacactttgttgcagttagtccattgtctcaaaaacatgctataaaaatatgacaactagaaaagtcttggcaaatgtagcatgagtgttgccggtttaaaagccgtgtttgagtactctaaagtacttttctgtgacagctattactataggaattggcaccagctaagaaaatttacagtttaatactttagagcaaataattgcttagggtgctttaaatagcacaggaaatgtgtagagtgtttacttgacatttgctatattgaacactaatactgaaacagattctttgaccacagagaatgccagtgtaggaggggtgggggtaggtgggagaaagaggcggagaaggaaacggcaatacaattagataaaaattaaatgacaaatgtactttttcatgatacagagatatcatggggaaaaatgcccatttgtttgatcaagtaatcttctagtgtggtagcagaaagcaaagtacagacaacttcctgggattaggttcctcctgctaaaggctgtcttcaccagaaggtcaaagccttgcagcccttggtcgctctggtttatttttcaagctcctgaaagcaagaggaatgacctccgtttttattaaaaaaaaaaaaaaaaaaaaaaaaaaaaagaaaagaaaaaaaaagcctctctcgttatctgtctaatctgcacatgcttgtgatttttttttatgacgactctgatgccctcatttctcattgcagctcagtgcttgtgatgtttttttcccctgaatgcatcttgcactcccagaatcttcttttcattcttccctggctctgttaatacgggtcttatcttagaacggggtctagtgcagtttagtgtagctcttacatgcagagcattttttttttgcacaaactgcttctcgtggattgtgattcagttgcacttaaagggaaaaatagagtatattttaggctactaaacctccttccatttgtaggcatttgagccagttatacagtgtctttcagggagttttacatgcatatgttaataaccagtggcacctgtgataggtccaggaatgtgaaattgtgcaacgttaatgacatttgtccaagcttcttccttctatcttgtcaatatgagctacttttaaatacacaaaggaattttgaaaacaccaatcaaaagtcaaaatttcaccctgcagcatggcccggcacccagaacactcagcaagaggaaggtctgtatttatggcttttccactgacttgaaatttgacctggaataaatcatgtttaacttctttatgcttcaattagcttttgaaagatatgtgtggttgtgtttagccagtggaaaggcaataactgaagttcacaacgaaaggagaacttgaagggaaattttgttaggaaagaacagtgggcaagaatacaatcttcaggcagggtgctattcctaaaaagtcttggtacacatggttcctaaggaaggtgggacattttcttataatattctttctgtattttgtagaattaagaaatatattattgtacataaatattttatattacattatatatgtataaatacatttatatatatatatatatatacatactgttttaccctttaactccagaaagctttgcgttcacacatctttttccctaacttctacctataaagggatttttagtgataatcttgaatttaaattgtaatcaagcagtaacaaacttcatttaatatgcagacatctaattttataaaggaaattccaagttattgttcatttccatttattaatttatttattttgggacggagcctcactcactctgttgcccaggctggggtgcaatggcacaatctcacgtcactgtaatgtccatctcccgggttcaggtgattctcctgccccagcctcctgagtagctgtacaggcgtgcaccaccatgcccgactaatttttgtatttttagtagagattgggtttcaccgtgttggtcaggctggtcttgaactcctgacctcaagtgatctgcctgcctcagcctcccaaattgctgggattacaggcgtgcgccatcgcgcttggccaatttttgaagtttctttttttaatctgttgccatctctgagatgagaggtttttcattcatttggggaaaaaggaagaaaggtaatcaacatttattgagcacctactgtgtgccaaacagactgctaagcacttagtccttaagtaccctacgtgactgatgttcagagggccattttctctgtgtcaggaatcaggtgggagggccagaatccatagaacaaaaatataaccgttgcaatagataattaaaaagagggaccttttagttagtggcacccaaagcatcatagtgtgggctgtgagatctcagtaaaccagttgttggtaggttcccccaactcagagacctccatgagggttggatggctggattgcaacatggtgctaaaccacatctccctggttaagccatttcagttattgcctcatttaagttgcattgctgtaaaagacataggtatgacaagttgcaatgcctaaaattcgaacgaaagaatacaggctttgaatgttattcagagcttgactccggagtcccagatgcagtttcagggtgagtaaatacaaagccagcagctcccaagtttagatgagaaaacatttcaaagaaagccagcgaacgcttatatatttaacacaatatccatgactcattttctctttgctctctcagtccagccgttattcatttaccgctcaccccacaggaaagctccttttgaagtctgcctttggctactttgcaaaacatataaatatacaccttgggagaataagggtgagagagaaaaaaggcagaggtcataatttttaatcctggttctgccaataacaaactttgtgaccagatactttgtacagtaaaggaggatgtttttaaaacccattctcagttgccagagaggcaggcagtcatcattctgtaggaagacttgtttcaggatttctcagatgtctgctgtgtttggattgctgaggtccctaaagaaccttccctttgagtcagctcgactaggcttttggaagtagccctggaggtgtgatagcaccttaaaaattcttagtaactaggaataaatagaaggagaatgggaaggaatagaagctgggtgacggggaagggaatgccaagctgtcctgcagctgggatccacacttggtgaaggttgtgcctgcgtccctcatctgtggttgggtataccagaattttgatatctctctagttcgaataccagccttgacatttaccaccttggccaagtccctgaacctatctgtgcctcagtttcttcatctgaagagtggggattatagtcaatgtaaggactaagaaaatcaatatacgtaatacccctagtattcacacttcacctgctatgatgatattaccattctcctttggagttttctaacttatttgtgtagcatttagggcaaaataccaggcatatgggtgatggcgtgtagtggagttggtgagagggagaccttgagttgtagaaagggtgggcagaacctggtttctgtcctacatcccagatgttgcccatacatatcctgtttgtttctgaccaccctgctttgctgtgagggttcccagcccctctgcctttacctgtcctcattctgccccactgtccatgcccagcatgaatctccacttctccgggacggaaagttttccccagctgcttcagcccaaaccaacttccctccccactgccctgtgcgcacagcttatttgatcatgtcatttattgcttcattttgtggcttagatgtcttgcgtcccagtcagactccatgtgactggaggcctttgcctcctttcagctccagggtagtgtggcagaaagagcaaggagcagggagggaagggacctgctctcttctccagccctttctctgtgataaactcagcatgctccaggcgtttaatctctgtaatcctcacagcctcctcatgcaaaatgagggtctagaccaagtgacctctacagctgcccttgcagcttccccattttagagtagtagatggtgaataagtatggcccgaatgaatgaacaaatgtgcagtctcaagttggtcagttgtggcttaaattatttttgtgcccactggcatctcggcttggtaaatggaggaaacggtctctgacgaattttcactttcagtagacagaaattttgttaattttgatcattttatagtccgaatttgtggacacattgaattaatatttatattagtaatatgtctaagaagaaaagattttttatgctaacaaataatataaataatgtcacagactaataacagctaagagtcagtaataaaggaaatttgtttttaagcactttggaagttcctgtttgcatgcattatatgattatatatacataatttgtattacattattatataagctctcttagtctattcattaagtaatttgatgatcattttgaaatttttttataagtacttaagagagttaaaactatatttcttcttgaaacattgtaatttggacttgttttcttattcatattagatgtcttctctgagcccagttactgagtatgtagtaacttttttgtgtgttacaataattgacagagacggtggttcaaattttcagcatcaaacctcactttggaattatttatttccattttttctcttacctactagtatatatggatccaaaattaattgcttttttattatatttaatacatctatttgctttgtggttttactgatacttgaaaattgtaaacaattatgaaagattttgaactttaatcatcttaatttgcttaattaacataatttactagaggagagaaagagaaaacagacttggttacttatttatgtttgtaaccacctttgtatatgtagtaacaccagagcaggcacttcataattgaaaaggctttagggtaataagtcactgtctgtttcaaactgtgatgactttctggaaaaaatagcttttgtaatatttgtcatactggcccagatccagaaagtagtatgttcagtgtctaattgtactccatatggcctgaactcttgagcaatccatctgaagtaggaccctgttaagaaattattctttgtttttttttgagatgaagtttcgctcttgtcgcccaggctggagtgcaatggcatgatcttggctcactgcaacctccacctcccggcttcaagcgattcttctgcctcagcctcctgagtagagtagctgggattacaggcacccagctgttttttgtctttttagtagagatggagtttcaccgtgttggccaggctagtcttgaactcctgacctcaagtgatccacccgcctcggcctcccaaagtgctgggactataggtgtgagctaccgggcccggccaagaaattattctatgtcatacataattgggtgcaagaggtcttagtaatttgcattttaaaatgataattggtatcatctacgaagagaagttctaccttagtgttttagtttagcagtgacactaagatattatacatatgaaaatctcttaatgttagtgggcagaactgggaacccttccctttttttttttttttttgagacagagtcttgctctgccacccagactggagtgcagtgatgcaatcttgactcactgcagcctctgctcccccgggttccagcgattctcttgcctcagccacctgtgtagctgggattacaggcacacgccaccacgcccagctaatttttgtattttagtagagatggggttttgccatgttggccaggctggtcttgaactcctgacctcaggtgatccgcctgccttggcctcccaaagtgctgggattacaggcatgagccactgtgcccggctggaacccctccctcttacagttcacagggtataagaagctactttctagggcttcatcttaatatggtgattgagttctatattatggccaaaaggaaaattatgtgggtattgtggggaggaggagtcagagggctaggggcaaagcgggcagagaaatatcagctgcctttatttagcaaatatttaccagtcgttcctgcccatatgcacttgttccttgtgtacttggatctgaattgattaaaaaggtctgtatgtattgagtcttttcccttaggagcgcttaagctttcttttgatgctttttttctcttcctttaaaatggtgcaggaaaatgttggaataaacatagtcagcttgtgaaaggatgattctctcccttatctgggcataaatattgttgaatgtgagaatgtgggagtagctactgggccaaatatgcacaatgagtgcaagtgattattgaccttactgatgagaggaaggaagagaaatactttaaaactattttcacagggcatttcaaccaagatgtttttctaaattcggtttctgattcaaaaactggatttagctctttttcttgtttgtttcatctgaacaaatttaccctgaattgaatgggagagtgtttcttaatcccccatgtctttagcagtgagtcatttccatgttgttgagacattttctagcctttattgctgtgtgtagttcatgcttttctctggatgttttgactccttaaggaactcgcaataacaaattaacaatcacactcctctggaatgaaaacacgcagtatcggagtaataaatagcagttctcgaaacctaaataaacacagaaaactcagctctcgtacttaagaaggctctagaggagtccagtgtccaacattacaagcaagacacaccatttaaagccataggaagttaacatactttcattttaattttccaagggatcatgttataaaaccatatagccacttccattcttcaaaacttaataaacggttagttttagtcatctgacctgccttctctcaaatggatcataatttagtttaacaggtttgacattaaaataagttgtgtttctctgggaaactcatgttagcctggacttctccacttcctgtctttctctggtgaagctggtaatagtgactgagctcaggccatggcgggatcctcacagccctaagactaggtgccacctgtgtgctgcaacccagtaccaaaataacaggaaaaatctaaagttatccagataaaatatgtcaaattataaagcctctgagtcatgacagtaatcaaacctgattctatatcagcaatcaaacctgactctatatcagctttaccaaacactattaatatatcctataataaaaattaaggcgtcattcctcaggttctttagcaagtaagtcagtgcatctatctaatttgctaaggctgaaacctattgtacatagaactcgggtctgaatggttgtcccgtagaaagttttagagcagagcaaggttgtaaatagccagctccagtggctgtttttcaccctgttcatgggttgcttgccctggttgtatatttagttgcctgtgatggatggagtgaagtgcacaggtcgtctctcaggggtgaacactgggtttgattagaggccattgtcatgaaagatactccagctcttccatgaccatacatgcttagaagaaaactttgatgcacaaagaactgaaagccctaggcactggaattcctgctcatcaaaaagacacctaaaaaattcttttggagacttcatgaattttctctcgattcatactgaaggactggtgccagtaatatttttcctctttgcctgtttcagtttctcatgaagtttttccatatttagacacactgcccagttaaagggaatgccagtcactcggggtttaagacaatgaagtatgtacttccctcaccaatcagttgggagagctgattgggctgaacttccagtctgaggcatgtgagtcacacacaggcagagatttaaatgttattaacatgagaaagatcttttgaacgtgaagtcatcatgcttgaggttactttgaactttcctcatagtctcttttatgatttgtgtaagaatcaacatgctttagtcttatgttaaaaaaacacagtcgagtgaaaatggacatgaatttaaaattgcatgatagccagaaacttttcatactgtggaaatgttacactgtgataaacatttagtgaagctgcttggctcatgggctatttttttaatggcttttgggttcagaaatttcaaaatgtcagattctttgtaatttaaatttccttctaagtaaggaagtgcactatgttattaattttaaaaatatatatacttagaagttgaaattgtgtaattatcttaatgctccagagtctcttttctgactaaacattggaacttattctgttgaatgcagggaatttgtccagaaaagcttaaggaaatttagcctacgaggggaaatgcgctagattcataaataaaaggtttatccaaaggggtgatatagaacatgattttatctataaaagattgtacttgagttttgtctcttcctcctccttttaggattaagtaatgattgtagcttagtttttatagttgatttatagtaataagttatgtgtaagctgactgtgggtagttgaactcatttcaactgcagaaggatagattgttgtttaaaggatcatacaaaaattattattttttaataaaatgaaaatgtccccagagatgttacacctggaaacttaaaagtaggaaaaatgataatatagtatgttactctatctctggaaggaatgatctctcccactgaaaagtaaatagtccaaagtttacaatgtttagttgaaatagcttataaatcacggcagtgacttttaatccttagtagaattctcctttatttctgagaagtctgtataaatgtttatggaaacacagtctgaaatattttaaatgtagcataccaatagtacttaaagagaactttacgcatgatcacacacattcagagttgttgggtaaaaacaccttgtaccttctttggtagaaaatacttctgtatttgcgtgtgtgtgagagagagtgtgtgtgtgttttaaattcttaaacataacagatcttttgaagcagagcagaaaactcgcatgttactgacactgcattctcagccatggggaaagcaacagtgtgtttcagctttagcaaattacatgtgttgactcactaaagaacctgagtaactacacctcagtttttattacaggaaatattaatagtgttttgtaaagccaatagagactcaggtttgattactatcatgactcagagactttataatttgacatattttctctggataattgtagatgtttcctgttattttggattttttattatcgttatttactgtgagttttgcgctcatatacatgtagcccagaaaagcgatagtgagatggttcagtgtatggaatcagttttattgaacaaacagtggggcaggtggggggagatacttttttgtaattagactattattagtgagcacttcctttggcttttgttcatttaaatgtatcttttctttataacttcacaggacgtggaacatgtaaatgcattttgagttgaaagcagaaaatcacatttcagtaaaattaaaagctcaagatttcattttcttgtaaaatttctaatcatccccatttgctgaactttgggccctttcttggcattgggaggtcatggctaatgaatgcatctcctgttgcctggcttacagccgccccctgctgcagtgccatttgggagaagtgtgtaatgtgcgtgcttggactcgttatctcctttcatttcctcaacatcagttaatgctgcatagtttgcaacatgatattgctttgagttggtgcctaattgtgtaggctggctagaagaacgaatctttgcagtggtcaggtgaggccactgagtgtgcccctttgcggccactgcaataaggtggttgggaattcttcatttctgatcactgaacttttccagaacgtcccaaggctcccccaggaactgtattacagcatgacattctgtgtatgtgggtttttctgggagaggattgtagctttcaatcagatcctccaagaattctgtttctcaaaaggttcataggaaccatttatttagaattgaaagataggcacatcttctgaggaaaacaaatgaaaggcttaacaaaatgttaaggctgagttacagaaaacaagccataagctacctattttattcaattaaaaataaccatgacatggccattttgtaaattattacattaaatctgcattgcagacatacctggtacgtatttatttatttattttttaagaggcagggtctccctctatcaccctggctggagtgcagtggcatgatcatagctcactgcagcctcaaatacccgggctcaagcagtcctcttgttccagcctcccgaatatctagaactacaaggacgtgccaccatagctggctcattttcaaattttttgtagagacgaggtctcactatgttgcccaggctggtctcgaactccctggcctcaagcagtcctcccacctcagcctcccaaagtgctgggattataggcatgaacaaccacccccagccacttggtacatatttcaaatgtggtttgtttcttttgaaataatgaaaaggaataatgtttcagggtttgtggcatccacattttgggatggctacatgccgtaaccttgttcgtagtagctcctgatttttatctgtattagaaattgctcggcatgagacaaatgaggaacatttggggaaatgtgtgagtaattgagtaaaaactaatagctgtcttaagggaaccatcttctggtttgcatttgtattaataggtatgcagagcaggaataatttggaacgggggagctggttatcctctgggtgtgtcaagcacaaatctcagattccattacatctgcacaagtcttgacagtttgcaaaatgtgcctagaggtatgcttgataaggacagacatttcttgcctgggttctaactgtgtcactgctagcacagtatctggcctgaacagcatctaaagaaatattttgctggatgggttacctcaatgggttctcatagcagccctgtggatatagacacagcatgttttatcattcttttctacaggctcaaagagggtaattacttactcaggctcacatagctggtaggaaaaggatttaggcctctcctttataccatgctttagctcgacccaaataataaaagcaaaaaagccatgtttggatcaactgagttttaatagaagagcattggagagaggttgtaaaccctcagatattttcaaaaataatagtaagcattcttgacttgcaatgcagagaatgtcttaagctcatatgtcttgatggtgctaatcaagtcaggcttttataattgagtgaaagcacagaaaaataatttattcattcttatacaaccaagtatttattgaatgtcttttctgcaccagacatggttgtatgcactgaggacgtaacagagaacaaacaaggttgtctaagtccctgccctcagagagcttatgttctcatagtggagacaaccacaagtaaattgcataagtagactctatttgcagaccccccaaaatagagtaggatatgttaggagaaagagtgatggcaggggcgaaggggattcttttgtttggtggagtcagggaaagtcttaggggatgggcttttgtacagagactgcagtaaggtataggagccagccctggaagatgggagtggtgaagggtgagatgagaatctgaggatgagcactgtaaaggaagagaatggccaggtgaaggctctgaggccagaaggagcctttgaattgatctagaggctgcaggagcttggattttacgctaaatgtgatgggaaactctgttagttttccagggctgctctaataaattaccagaaacttggtgggttaaaacaacaggaatttgttctctcaaagttctggagggcagacgtctgaaatcaggtgtcagccgggccacactccctcccgaagctctgttgggagaacctttccttgccgctgtcatcctctggtggttccaggcgttccttggcttgtggcagcgtcactccagtctctgcctctgttttcacatggccttctcctctgtgtctgtaccaggtcctctcctgtctcttagaagaacagtggtcattggatttaggacccacccgggaaatccatgacatttatgtcaggggctggaaaaggaaggacaggtgggatgtgaccatccggagagcctatctcagctgtcatgggttgtcacaaaggccattgtgtggttaatttttatcttcttattcttgtttcctctttaatctttcattctaagccctatagccctgactggcagattcgctgtcgggtttttctagttgtagatgacatgctttttcttaaagccatcttcatttattaatctacattcgtttttaattttaatgcaccaatcaataattatttcacttgacagtttttgacagcatgctgcttgcgacatttagctgtttagcatgaattcaaaaggtgatctatcaatttgcacaaatgaaataaagttgctctttcttcctgtgctttgggggaatgtataaaaaaatgtatgtttatccttccctggagaatttttgatgtagaaatactgaatagttttctatataagaagacagaggactaaagagctttaaaatttgttgtgcttattttgcttgtatcataaattcacgtgaaaggccagatttctcttaattgcgttgatattgtggagatgaatcattcaacaaatgtttattaagtgctcattgtgtgcatggcactctgcaaatgttatgggaaataaagacagagtccccgggaaataaagacagagtccccaggaagtctagtagtcagagaaacaaagccacttcccaaattatggtgggtagaaaaacttaggaaatgacagttttatcatgctacataccttcacttaatgaatcctatgtgaaaattcccagtaaaaacctatgaacaaaagtgtgtggttgtcttcatgtatacattgtgtgcacacatctgtgcgtacaatgcacagctttgtatgaagctagctgaaaactaaacagctaggctgaacttagctgaaaactaaacagcaggggaaatgttctttctcactaaaatcacagtgttaaaactcttggcagttcagatggtctccactgtagctgttggtttacattttgataatttaccaaagagcataatatatttaattcctagttggatggtgtaactcaacacagcatttccagcgaaacgctttgcaaatgggaagtaagcattttctttggaaaccagcagcttccttactcccttggttcttctgtgggtataagcatgacctataggttagaagttctggaacagaaggagaaaaatgaattatgtcacagttaacaggaaaggaggtgctttgcattcttgctccgttgcagttagttttgttttccttccttggtttgggggcatttggccttgcatatcctggcaagatttaggcaaaacaggcactgaccttctttctggaatgctctttcattttgccccatgcatattattaagaggcataattcactgtcatatttttgtggctaaaagttttctaacttctatacactgagcctttgttttctgcttaatagggcaaaagagctggcattttctgggcatcattgacccttcactatgatttagattttttaaagaaacacataaactgttcattgcaccttgttgtgtggcaactctgccagtcactaattggtactgtggatatttggctgttgctcttatttactttcctctggtttttacatcacttaattaaatcttgtgccagtttccattctatacatgtatagggaagcaaacagaaactttgtcctgaagcaccaggttctttggcttcatcatcctaaacagctctgtgaaaatcagttgaaagtgagtagagccagaagtggcgtgtaagccatgctgtcagcgagggctggctggatctgcatacgatcgccgccttctgcccctgcttttggagactagagatggcttctggtctgtgtccagggcttgccatgctgattcagagagctatgccacagatgagcctgagttgagaccatgatgccagcatatcctcagacccacgagatcgttatgccagaatgttaatccgcagtggaaaccattactaacatactctcaaggcccacatgatgagcacattctctctctgtgttaagctgcatgggaatgtaaatcctaactggaagctactttattgatgtgccttgagaaattgctgctctctggctgcaggtatcagcagcagtcacagtgcacatgctctctaaggaagatccatatggagtcaggtgtttgcttggtgagcagggaatcggaacaagggagtgggatgagttgactgttaagtggcaccaagcaaacatagcctgcctctctgttcatctcaggagaagggtggcttttctagtgggaccaggaacatgtcagtcattgcctgctactccctacagtcatctcactagggtggccttgcctgtgaagacactgtattctccccaacaaccttggcattgcctacatagactttagtgactctgtactttcctggctaagccagccctggcgcccttttgaggacacagtcttttcttaaattcatgactatatttcatcaggtgctggctggggcaggggtagtggtgatggtagtaattatctttcttcagttggctttgtatgtccatgttctcatccactaaattttgttcttactataaaccgctaactaggcaatctcttccccgttgtcaagttcttggttggggaatggtaatctttattgtccttcttataagtccctttggaatggatagaggctttgggatggacatctcgtgaactgtatcttcatatcaagctctgtgaactgaatggcaacaaggaggcattcatccagaccaggagtaggcaaactatggtccatgggccaaatccagcctgttcttgtaaataaagttttattagcacatagctacatccaataatttgtctaatgtctatagcagtttttgcactacactggcagaatttgatttgagtcatggtgaaagagaccatagtccaagaaagcctgaaatatctactatctgatcctcatcagaaaatgtttgccaactgtagtctatacctttgcacgtcagagaattgcatcagggaagaactagaagccctccttttgcacccccacaaccctgccacaattcagtgaacaaacagaagatcagagagggaatgtgacttgaccaaagtcacacagctggttcataggaaagccaggacctgagctcagatcttccagttcctagtgtatttgtcttctacttttggaggacgttgtgagttttctggtttacagatgattaaccattacaacatactgaaagaaagcttctttagtggtcagagctattttccaaactgacttccccaggcaaaatcactagccagcttggcattgatactcatttattaatcttacaaacagtacctaccatatttcagggatggggctggggctaagacactgatgaagaagcacaatccctgcccttgggaagtttggatgagaagagtggtcagatagctagatacagagatgcatgtcattttatctgtagtgtgttacttatcatcataggactgtgatcatatggacgaaggatgcgttaatttagccttgagtgggtgggggtgttgtcaggaatggctccatagggttggagatgtttgagctctgtctcaaaggagattgagttcttcaggtagagaattgcagcagaaatggctgtggtcctctaggcttgagtgtgcatggtatccagtaatttgggaatgcttgtctaacacaactagaggtagggcttaggggacgtggtatggggttacaggaaatctagttggaaaagtaagttggagccaaactgggaaacttacggcatttcaaatgctaaggagtatggactttggcttatattctaggggttttctaatctgtagattccaaaacatatgggagaccacatttcttgtaaaagaggacctgcacattcataccaacacaaagcatggtctgtagatttggtcatcagaatcactaacagaaataggagctttcttccaaatatatgtagctggctgatattgtaagtcattagccagaattcattcacagcgttactaagttcatagtatctttttgaccattgtacatcttcttgatcaacagatattaagagttaaacatctagtgcctgaagtctgcaacatttttgattgaagaaaatgttgggaaccactgccgttgatggcagtagtcatgaaattttttgaattaacacatgttataggttccagagtcagctgccctaaattttactagctttgtgactttgagcaagttatttaacatacctcagctgtaagagtctttatctctaacgttaaaataatagcctctgtctcttaagattgttataaagatatgataatgtctgaacgcatgtagcatggggccaggctgatgggatatactcatgtttaaatagaagctattgtaatgatttttagcggatgtggcatatgcagatgtattttagatttgacccagtgtggacgatgagttcaaaagggagagttgtacgaccttcctgttatccaagtgagaaataatggggccagggtgggcaggggataggttagggaaggagaggggagagggagtatgggaaggtgtatgtccactttaggtaatgaagtgagaaatgaaagaagccacattctgtttcatgcccaaagcaacagacaaggcacaaattagagtgtagggaagccagtttctgtgacttgatggcatagaatggtgtggcttatctggcaaattccacgccccgtaactcctggaattgatctggataagaattcaccttgagtaaattttaaaaattaatttaataaattaatagccccccctttgaaacacagaaaaattagaattacagcatgagtatctttttttgctctaaaacagtacagcccagcagttcagcctacacccatcacagagctttcaaaggaatgtatacaagaaaatacatatacaattacaaattttaaaaattaagtaacatgtatatactgttaaatatttatatattgatgcttagaaaaagatgggacaaatgttaagtgtcagctgggaggtttttactttcttctttgccatttctgtatttttcaaaatgaatatgtatataattttaaaatgtgttaacactatttcaaaaggaaaacaatcacaaaaaggaatagattggaaaagcttcaggggacttgctatccttgtctttttgggtagctgttctacaaaggcgggtggtggtgggtgcctcccagctgtgtctcatttcagtcagcggatgctctgctaaatctagtgatgggcggcctacctccgaaaggtgggtgggagtgagggatgagtgtagcagtagtacatgcaaatggggccaggttttggtgtgtgtgtgtgtgtgtgtgtgtgtgtgtgtgtgtgtgtgtgtggtgtgtggttttttttttctttctttttttctacagtcttactctgtcgcccaggctggcatggagtggtgtgatcttggctcactgcaacctccgcctcctgggttcaagtgattctctgcctcaacctcccaagtagctgggactagaggtgcacaccaccacgcctggctaatttttgtatttttataaagacgagatttcacatgttggccaggctggtctcaaacttctggcctcatgtgatccacccgctttggcctcccaaagtactgggattataggcatgagttactacgcgcggccagggaccagttaagatttgacgattacattttattgaatgtttgcatcagaggcacctggaaggcttgtttagaccacagatttctgggcgccaggcccaggggttctgatttaatagttctagggtggagcctgagaatatgtatttctgacaaatccctccgtgaaactgatgctgctggccccaggaccacactttaagtgaggggtagtaagcgggtggagaactgcatggaggatgaaaagcatccagttggattttatatttgctcccccttcttcatatacacacactgaaatcactccactctatgttttctcagattctttccctgtctggaatatttggttctctcttcatgttcagtcagtagaaacaagaagtaactcttggattgagcagttttcacacaagtagcccaaatgatattgacacatcatttctacacagcatcagcttgttcacacacatacgcccccagaggccaatggcgtcctttggctttgttctcctttttaaaaattcagtgagtaagctaattttataggaatgtctcagaaagctattcctgtaaacccagcgtttgtaaattgaaatagaggaagcggtgctgattaccgcaattgtattgaaacttattcatggagcggtccctctagattcagatagtttggacagaaaccctccaactcttcccttaccactccattgtttggtaaagtttaatgtgctcacatggcatctactttttcagccagggttaatactcctagcgattctttcactggaagggatgactcagagaggaagagttggcattaattgcttcatcaactatgcttattatgagtcatctcttgcttgtcttagtaattcagctggaaaaaggagaaatgttatctctggttcctgaggccagcttgggcttcagtgaactaggatactccctcgtagccatttgtgagtttcattcagttactaagggaatgaacagattgtgaatctcattatcctagcaggtacatataaatctataaatggcgaatggcagttacttcctgatgtttatcagtgatgagatgccacaggcaggacgttagccctagaaaggcactgttttgaaggtggctgattaaggggcaaaagaaaaaaaaaaaaagcaaaaacggagggatatgttcaggtccctgcctttactcagttccctcccctagcttccaatttgattaacagaggtgtcgagggaggaagagaacaatttccaaataaaactgcctttggttctttttttgagtgtaatgtggtaactggattatttggaaacacgaatttaggtctcttactttctacttcttgcgttcagttcactcgtgtcttcctgtttggtgtataccttccccttctgactcagtcttctctatttctcttctcactgtagcagaccaccgttcttcccctgccttaggcgtttctcacttgctgtctgccttgcgtggctgttttcactcaagcatgttcactgttcctttgtacggaataggggttatccccacagaccctccaggtagaaagtacatctttcttttcactaataaattagtttattattaatagtgaaaagaaagtacatctttcttttcactaataaattagtttctatttagggagaacatacagtgaaatcaacacatcttaagcgtacagcgcaatgagttttgatgaatgcatacatccacataatcagcatcctaatcaagatatgggacatttccatcaccccagagcccctctgcccccttcctgtcaactttccacctccccgtcatcaaccactgctttgatttctgtcactgtaattgaattttgtttgttcttgagcttcatacaaatggaatcagtcagtactttttcgtatctgctttcttttgttcagcatatcatttttgagatcatctgtattgttgcaggtagcaacagttaatttaaaaaatgctagccagaggccaaggcaggcatattgcttgagtctagaagttcgagatcagcctgggcaacatggtgaaaccctgtctctattaaaaatacaaaaactaggcggcagcagtggcacgcacctgtaatcccagatactcaggaggctgaggtgggaggatcacttgagcctgggaggggtcaagcctgcagtgagtcatgatggtgccactgcacttccagcctgggcaacagaatgatgtgtcgcaaaacaaacaatctatatctatatagatatagatggtttttttttttattttgtgaacttacatatatgtgtgtatatatatatgtgtatatatatgtgtatatatatgagttctttatatagtctggatttaagtcatttatcagaaatatgaattttttctcagtgtttggcttacctttttcattttttaaactgtgtttgatgagcccctttaaattttaatgaagtctaatttatcattttttaagatatatgctttttgtgtctttataacatttttgcttaccctgtggttgctaagatgttatcctcctgttttctcctggaagatttctagtttagccttaacatttaagtatatgagccatttcaaattaagatatgaggtgtaggggtcaagattcagtttttattaaaatgtatgaaacaacaattattgaagtgattttttttccttatgaaattgccatcacacctttgtcaaaaatcatttggttttatatgtgttttaagactctctgttccactgatctgcagtctgtacttaggtcaatactatattgtcttgattaaaatactgtcatgggctgggctctatggctcttgcctgtaatcccagcaccttgggaggctgaggtgggaggatcgcttgggcccaggagtttgaggctacagtgactgcagcattgcattccatcctgggcagcagagtgagaccgtgtctctattaaaaataataataataggctgggtgtggtggctcatgcctgtaatcccagtactttgggaggccgaggcagaaagattgcttgagctcaggagtttgagaccagcctgggcagcatagcaaaaccccatctctactaaaaatacaaaaatcagctgggtgaggtggcatgtgcctgtagtcccatctactggtgaggctgaggtgggaggatcgcttgagcccaggaggttgaggctacagtgagctgtgatcatgccactgcactccggcctgggtgactgagctggaccctgtctcaaaaataataacaataaaattcaaaaataatgaataaatgttaaaattaaaaactaaatagctttatggtaaatcttgaaaacagatagcgtgagtcctctctgtcttgttttttccctcaagattattttggtggtgttctatctccttcagagttccatataaatccccctaccccccaaaaaagcctgttagaagttagttcagattgcactgaatcataagagagaaatttaaggaaaattcaccttaacaatattgaaacttcaattcaaaaacacggtatatctttctctgcctttttaatgaatttctgccaggaatgtttccctgtttttcctgcagagacattgcatatctttggtaaaatttaattgtactttatgcttttcgatataatacatgtaatttttaaatcatccttttcaaattatttatataaccaggactttttttctgatcgtacagggaaagtattaactatttcaccactatttcatcatgatgttagctgtaggtttttcatttgccttttattggattgacgaagtttccttctattctcttttttctaagaatttgtgtttgtttgtttttatcgggaatgtgtgttgaattttgtgcagttcatttttgcctctgttgagatgtcatatggttttccgctttatgtggtgaattatattgattggttttaagtgttaaaccaaacttgagttcctgggataagaaccagttataattatgtgttattttgacctattgctggatattttggctaacattttattaagtatttttgcgactatgtttattaagaacattggtctgtaattttgtttctttatataatatttactagggtttagtgttagtgttagtaatactgattatataaaatgtattcgtggagtcctcctgttttttactattttctgaaagaatttatgtaagattttctttcctcttaaaattgatgaaattccacagtgaaatctttgggcttggagttctctttgtgtgaaggttctaagtttttaaaatttaatttaaaaacattataaagtaaaatattcccttttttgatgtacaattctatgcattttaacatgtgtagagttgcataactaccaccacaatcaggatacagaacagttgtatcatcattgtgccaaggattttgatactgaattcaatttcttaacatatagccaactcttcagattttctgtttattcttgctattggtaagttatgctttctatttttcaagaagttttttatttcatccaagttgtgagatttattgacataaagtttttagtaatactttcttcttatctatttagtgtctgtaggatttatagtgatatccccttttccatttttaatgatgttttcatttacttatttttgtgattagttttgctagatgttaattaattttattaagctcttcaaagaatgaactactgtttgctttctgttcttctcattatttccttctttttccctactttggatttaattttccttcctccttcctttctctttttcttttcttttctttttttttttttgagacagagtttcgctctttcacccaggctggagttcagtggcacaatcttggctcactgcaaactctgttccctgggttcaagtgattctcctgcctcagcctcccaagtagctgggattacaggcatgcaccaccgtgcccagctaatttttgtatttttagtagagacagggtttcgccacgttggccaggctggtcttgaactcctgacctcaggtgttccacctgccttggcctcccaaagtgctaggattataggcatgagacaccgtgcctggcttgctttcctttctctatatcactgatttgaacgtcttctttttttttctgttcctaggtacacacacttttaagattgatgtatcttcctaataagtacaccctttaattattatgaaatgaccctttaactctggcaattctccttgtctagaaatctactgatctgaatatggctacaagagctgcaggctgttcagacttcagccgaggtcttgcaatgagcccttatgttttaattgcattgtacaaattttgatatatacttttattgtcacttaactcagtattttgtatttccattttatttcctctgggaattgtctagtagtaaacattttaattcacagacgtggggaatttttaagcttcccttttttccttaattgctaattacatttttatttatttatttctcttcatagttgttgctttaaatatctctgtgccattttgttagatgcatgtatgttgacgattataaaatcatctttattggttgttccttttgccagcctaggatgtccctcaccatcatttataatgcttttaaccttacattccattttgtctgatattcagagtgctatcctggtttttgtttttagttttgcttatattttcttttttaaaaatcttttagttttaatgtcattgtatatgttcattttacacgcatcattcttcccccccaccacatattgtgcatagctctgtacttgtctctgttatttgattagtgactttatacccagttatccttactgtaatcatttttattaagatttttagcttcatttaatgttttctacttggctttactttttgttttgttttgttttgctttcttcctttggatagatcggattttttttcccgaacacattttattttattcttgtagcatttatacctttatttaaacataaacttaggtataaacatagtttcctttatgtctaaaaattatcagtaatttttaagttccccaaatgactcccccactcataaccattggacctcttctctctcagtctgctattttccccagtgttccctctactgagacttaaccaccttctttcctgcaagaattccccatcacatggaaaataactctcagctgcatcaacctctagcctgtgcaacttccccaccttgcttggaaccggaaatgacttctacttttagaaagttcattctctgggcagagtagaagatagaattcattggggtgttattgagacagagagaccatctaggtactcttgaagaagtccaggagactttaggagggtccaggttagagtagtggcagtagagtgggaggactggtggaacaaccgggaggatttggtgttgtatttgaggagtttgagaaaaagagaagttgatggtgccaagtatgagtggcaaatatcagatttcttttattttttcctaccctattctcttccctcccaaattccatttgcatgacttcttaccaaggtttggttctgccattttaaatgaaataagacatgtaaaacacatggtatatgtcctagtatagaaatagtaattaaaaaaaatagatgctagcttccacatttctgtctcaagtgctgactgtatgaatggggaggaggagcctacagattcctgaggaggaacaacttctttttcttggtggcagggtggttagaaatgtaattatttcatttcttcatcttttgaatttgagctgccaatgagacatttaggtgacagaaaattgtatatctaagtctaggattgaaaagagatgatagagattcaatagctgttaggaaaactgtagaagctcgtctagcgggaggtgataaagtgaagagaagagaaatttgaaaagcatttatgggatggattggaagaaggaggatccatcagagaaagttaggaggcctgaattcttgtcccagtctggtttatttagccctgaataaagcacttaaccctctcagggtcctctttctttcttcctttttttttttttttttgagatggagtcttgctctgtcgcccaggctggagcgcaatggtgcaatctcggctccctgcaacttccgcctctgggttcaagcaattctcctgcctcagtctcctgagtagctaggattacaagtgtgcactaccacgcacggaccatttttttgtgtttttagtagagacagggtttcaccttgttggtcaggatggtcttgaactcctgacctcgtgatccacttgcctcggcctcccaaagtgctgggattacaggcataagccactgtgcccggccctctcttcctttaagatctctttctttctctctgcctctcgttctctttctccattcttcattaattcaacaaagatttcttgcatacgtattgggcgccaaattctgctctaggtattgaggctaaagcataagataggatgtggtctttgacctctagtactgggagcaggcaacagattaatcattgctctctgttaagcattatggtagggtatgtttcatacctgagtcaggttgactggaggaaagggtgctgagaaggcctgcagagcacgtccttcagtccaagcttttcagaatgaggagttgttcagacaagcttgggcaaagaaagacaaaagaagtgcaaaatagtattatatggatgggctgaaggagcaataagcagtttggtaggtccatagtgaggcaggcctgacaccgctagaggggctcagggtctcgatcaggaagggcccttgtgagccaagcagagatcttggattttatcttggatgcaatgtagacccattcaaggactgtagggatgtgaaaagtcaggtgtgtgtttcagtgatttcattctgttagtgctatgcatttggcatgataagggaccaggtggtgggcaaggagaccagagaggaagcagttgtagaaatccaggtgacagaggaatgttgaaaattccagaaccacagagcacctgcttcatgctaatcacaggtctgtgtgctgcggcttctgcagggaccaggacagacaggccccttgttctcatggagtttggagtggcaatggaagtgacagaatggaaagaatgagcagattggagagatgttaataagcaaggatttagaggacttgatgagcaattagatattggaagtgaatgagaggggggtagtgtctggtttgaggaagtgaatgggcaaatgacaccactcactgtgattggggaaccaagagaataactgagtgggaccttcagggaaaggtgcccagcctgcacttgtataaataggtctggatctcaggaacggcctccgtgacttactggatcagggaaagaattggactatgtggatgtttacgttacttgattttattctgctccatcattcagtttgggtctgtgactgttgagtcacctcacagaggacgaggtatccttatatctctttccctaaaacctagtgtggggtgagcaaaacagtagggctattgtttgaagtaggtctggaattctgtatcattaatttctttgctcaccctctgatccctgccttcactttagccctcccccaagtcccagcataggctcactacctggattttggcttctgtgtgaactgctgtgggcaatcgtgtcatattcctgtcacagagactctaggatgctccagcgggtagggattttaggatcactgggtccaatctctgcaattacagatgagagaggtgaggcctgaggaggcaagggggcctgcagagcactggtgtagggctacagtgtggtcgcttgattcactggtctgttttgcactgtgccccctccccctcgctgagtgcttagagagcagggcaggaaaagttctgcacattggtgcagacgtttggaaatgactaagcctgtgtgtgtaactttgagacttctcgtgaaggttgtcaagaagcatttgatcacttcagctctgaggtagggagacagtctccttgggcatcacacttgcattccagcagcccccttgtttggggtgctctccaaaggctccccgtaaggaattgtttcaccccgggtgtagaatcacattgcactgcggcttcaaaggaaaagtaaaaaagtgcagaaattaccgaccggagtgtgggaagtacttcttgttggtaagattttcaagtgctggggaagagatgtgttgaaaggacatttactttcatcagcttagagcatctgttttttatactttaaaaagaagcaacacctcaaattatggcagtccctgggcaagtaagcacttgagattttgatctgtacagattcttagagggagcgcctcgcaggagctgttagtagtgatttgtagcacttaactgattctgtagaccgacagtcaatcttggggggaaagggggttcagaggcaatgatagttaaggaactgctccgtaaaacagcaaataagccattgctcttgcacccgagtagaaatggaaactgtacttagcaggctctggagaccaaattagataggaaatgaaaataaattccatgttttttatttttaactcagtgcgcacctccaaaacattcgtacagtgtgggctccatgacgtgttttgcctgctctcttatacagatttaagtttttaaatggtagttagagacactcaacataaaagctgctgctttaaccgttgttgttattgctttgtttttttgagatggaatctcgctcttgttgcctgcactggagtgcagtggtgtgatctcagctcactgcaacctccaccccccaggttcaagcaattctcctggctcaggctcccgggtagctgggattacaggcgtgcgccatcacacccagctagttttgtatttttagtagagacggggtttcactatgttggccagattggtctcgaactcctgacctcaggtgatccacccgcctcggcctcccaaagtgccgggattacagtcgtgagccactgtgcccaacccactttaaccatttttaaatatgcatttcagtggcattaagtacattcaccatagatgtactatttattataggcacagtttcctaaactgagtaaagaaaggaaacatttacccccacagcccagtatagtcattgttaaaattaagatgttagtctccaagtcttttgtttacatgattttgttcaaacctagttgcaatacttttcatagaggttataaagagaaatatagagttataaaggaatttttttaaaattatactttaagttttagggtagatgtgcacaacttgcaggtttgttacatatgtatacatgtgccatgttgttgtactgcacccattaaatcgtcatttacattaggtatatctcctaatgctatccctcccccttccccccaccccacaacaggccctggggtgtggtgttccccttcctgtgcccaagtgttctcattgttcaattcccacctatgagtgagaacatgcggtgtttggttttttgtccttgcgatagtttgctgagaatgatggtttccagcttcatccatgtccctacaaaggacatgaactcatcattttttatggctgcatagtattccctggtgtgtatgtgccacattttcttaatgcagtttatcattgttggacatttgggttggttccaagtctttgctattgtgaatagtgccgcaataaacatacgtgtgcatgtgtctttatagcagcatgatttatactccttttggtatatacccagtaatgggatggctgggtcaaatggtatttctagttctagatccctgaggaatcgccacactgacttccacaatggttgaactagtttacagtcccacaaacagtgtaaaaatgttcctatgtctccacatcctctccagcacctgttgtttcctgactttttaatgattgccattctaactggtgtgagatggtatgtcattgtggttttgatttgcatttctctgatggccagtgatgatgagcattttttgtcttttggctgcataaatgtcttcttttgagaagtgtctattcatatccttcgcccactttttgatggggttgtttgtttttttcttgtaaatttgtttgagttctttgtagattctggatattagccctttgtccgatgagtagattgcaaaaattttctcccattctgtaggttgcctgttcactccgatggtagtttctttggctgtgcagaagctctttagtttaattagatcccatttgacaattttggcttttgttgccattgcttttggtgttttagacatgaagtcgttgcccatgcctatgtcctgaatggtattgcctaggttttcttctagggtttttatggttttaggtctaacatttaagtctttaatccatcttgaattaatttttgtataaggtgtaaggaaggggttcagtttcggctttctacatatggctagccagttttcccagcaccatttattaaatagggaatcctttccccatttcttgtttttgtcaggtttgtcaaagatcggatagttgtagatgtgtggcattatttctgagggctctgttctgttccattggtctatatctctgttttggtaccagtaccatgctgttttgattactgtagccttgtagtatagtttgaagtcaggtagtgtgatgcctccagctttgttcttttggcttaggattgacttggcaatgtgggctcttttttggttccatatgaactttaaagtagttttttccaattctgtgaagaaagtcattggtagcttgatggggatggcattgaatctataaattaccttgggcagtatggccattttgacgatattgcttcttcctttccatgagcatggaatgttcttccatttgtttgtatcctcttttatttcgttgagcagtggtttgtagttctccttgaaggggttcttcacatcccttgtaagttggattcctaggtattttattctctttgaagcagttgtgaataggaggtcactcatgatttggctctctgtttgtctgttagtggtgtataagaatgcttgtgatttttgcacattgattttgtatcctcagactttgctgacgttgcttatcagcttaaggagatttgggctgagacaatggggttttctagatatatgatcatgtcatctgcaaacagggacaatttgacttcctcttttcctaattgaatactctttatttccttctcctgcctgattgccctggccagaacttccaacactatgttgaataggagtggtgagagagggcatccctgtcttgtgtgtaaaggaatttaaagacagcctactccttctccccttctctgccccgtttatagatgaagaagtgaatggccaaaagggttaatggcttgcttagctggacagtggccatgcttgtcccagagcataggtgctccatcgcctgagcgccattccctgggctagtctgttgttagtttcaacatgtgtcataaaaaattcattggtggtttatttttagggtaatcttcttttttcctctgtctctttctttgtgtagtttctgtatctaaacttttttaatggcatcttcaaataggaacttgttttaaaccagaacgtcacaacacgtatgccattcctagggtttatcaccctgatgccaacatcccctcccaaacctcgcttctgttcagatattaccatacccaggaggtcgctgctttttgttttttttttttccatttgttttgctggttcacggttcattccagagtttaaaggtgctaaaaccaaagtttaaaggtgatagtaattgtcccatgttgggtttttagctggtttctttttcttcttaagatctgttttccacttagaaatgaggtgaaaactcacagaagcaaagcctagcagctaaaagcagcacgtctgcttaccacgttacaccctccgggctgatctgcagcccagatcccctttccatcctctacctagctcctcaattcccatcggtgagcagttttcacctcctcctgcccacgtttggaggtctgtgggtggcggttaggaagccaaaggaggctgaagctggggtatattgtttgggtcggccatggcaaccgcggcaggaaaaggaacaggactagttttgtgctgctctgtaaatggccaggattcagcagctatctcaggacttctgcttggccccagacaatctgatctcctggtaaggttattaaacttggctctcctcttccaccctcctttgatcatgttgtcaggcagcgagtaggaatggccgtaaggggtcggctggtgggggttgcagagcacagcaagatatgcaccagcagaaacataagaacaggggcagaggcaaatcagggactgtgttcttatcttttctgcaccccagatgcagagaagtacatccccaagtccttgccaatactattcttcaagagttgagcaccttgctccaaagagcctgtccagatcgccagtttgaccagcatggaggagaacaaggaagggccggtcctggaagaccccaggatttttttaattgggaaagcattatttgagttttctctgctgcaaagcacaaactgcctaccacatgtgtttcataaaaatgtcactgaaaaggagagtgagaatacagagtaagcttccatggcttaataatagtttattttgtgacttggaatagcttttcttttcattcagcggatcattttaggtgtcattcagtttattttaagtagtgtgtttcatcctgagcggattaagaattttattttttaaaactctgtactgtgttgcttcctactgggaaatttacattaaaaaaatgttcgtgagcaaaatctatttggtcaaaaagaatggcccacgattatcactgaatttgggatgtttttcttctaagggacacagttgattcttactcagaatcatgcgagtctgacatttcatttggggaagtctgaggaagttggtgaggtcttacgttaataaaaacaagtgcttctttttcttcttatcacctttcagtgtctgctctgctggctcatgcagtgtaggttggcttacctctccctggaagtcacattgtccttcagaactctttttactatgacccacaaacagttttcagacctcactctgatgagtcaaaggtaaagctgtgaataaacagatggtgaaacaacatttgcagttctctgacttcagtcctccctgaaacccacttggaatctagctctgaattcagccggacatgtttgttcttcccttttcccatcctcacctactcctaaccttcagtgttctctttaccttttatttttatttttgtcattttagtagtaaatgacagggacatagttactcaatttgtaaaacattgaatggtgaggtcaaagattctatgacgagcttgagatttctaacaggttcagatggatgacagcaacattttgctggcttaattttggagctgtttttgtaggttttgaaatgcagtttaatagtgagtaatagagaagtttctttctgccgtggagctactgaacccttgaaagtaacatgctggcacatacagatgaactgtagccccacatttattccttgcttagtggtaagctgtacactgaacaatagaaaacaaaaggctatttttctttggaagagcagatactgatttctggacaaagtttatgttgtacaagttaaacattttttattcttttctggttagattttctgccttttaaaaaattagcttagttgaaaaagcaggtattattaaatacagtttattttattgaattggacggacaatcgtagaattttaaagcttaaatggctttaattgaacctaatgttctaattttacagaggaaacatttgaggcttagtgcggttaaatgaccactcctacaacacacagcctgtttgtttgatggctgaggctgaaaaccagactccagactcctaatttaatgcttttccttcattggtcatgtctttttagcttcagtgaagatcttttttttttttttttttttaatttttgaggttatttaaaaaatactttgccttgaaaatttaacatttccacttaatcattctcatacttcaagaacagtttctctgttaactttctgtttaacttcttaaaccatacactgtggaaattatctgtctatatgctgaacagtctttaatgactgcatgtgtgccgtagctgttgagatgttttaatccactttagcaaaaggtttatttgtttaagaaaagtgcagtgttgtattaagtctaagcttagaacaatgaagcatcatctcccagctactgggagtgagaatgggaggggcagggagtggttggtactatgagctgctctaaagaaaattcatttcagcttcctcacatgttaatacaatcatatttcagtgaagcccttcttcagcaacagtcactaatgatagagtgatgtgtttagacttgaaggttctttaggtgctgtttaaatgaataatgagtgtagttaattcacaatacaggtgaaaagttaaccacagagtagtggcactgctctttctttccccgtcacctctgtgcatgatctcttgctgcgccattagaagggatgattagaatgggcaaatattccctcccggtgctcctggcaataggaaagcactgtgggtgagatatgtctgcagagcagtggtatagtttcaggaagggacctcattctgctctctggggcaaagcttccgggtgcctgagtgggcctcttcctagtcgatggggcagcttgatggggtggctatttattggtgaaaacagtatccatgtcccattggttattgggacttgattcctaatttgaacttaggtgctgtgaagagacttatgtaacgctgtttaatccatgtttggctttgttagaagagtttaaaatactcagaaggaagaaatgtttggttcctttgaaaaggcagactgttcatttagctagggagagcctcaccaaatgagtcaattaaaaacatttggggattaagcccagtgagagtgctgtttttatatgagacatgaagagggtgggggaggggcgggtggaactatggggaaacagcataggaaaaaaaagatctttagaaaaggaaaaagttagccttagctcttcagagagcactgggtgggaaaaaggatttaagtggaaagaagaaaagccctagagatttttgtaccaaaaaaaaaagagtgctgttaaaaagatgaatcaacagctatattctaaatggcgtctccttaactgggatttgaagggaagagaaggcctgagtagagtcttagacaagtccaagggtaaaaaagcaaacagatagttgaagaagtggaaattataagtttggtggcaaaaacttacttgtaattagaatttttgtgtccttaatacttgttgttatgctgatatgataatatgctaataatatgctaaggaattttcccaattcataatctaaagcaaaattaactaatatatgttctgttatggaaattcacctaaattgcaccagcaggtgtattcatcccgctaatactaacactctgttactagctccactgtggcgtttccactgtaacgtggtggtgttggtgctactcattgtgacagtgtggtgtcccaaagagtgagcaagcctcgccaacgcttccttaaaactcttactgatggaactaccatgtttatatagcaagaatattagagaaagaagagtcgagaaaggattccacaacacacatctagtcttttcctctcttagcttttagggtcaacactacctttctcttggaaatgagaaggggagaaaaccttttccactattctgaaaagagggttttaaaaattctctcaggtcgcctaagctggaggggctttatgacagcactaaccagtaggtcaaaaaggaaatttattttttcccatcataggttcctctctacacagagaatgcaaaaccgtaattcttaagagttcctcaatgattattcacttttgttcttacttccatatttctctagtaaagatttaaatatttaattttgtagactcctgaaataactgcttccagatagtatatttactcagaatattatttaaatgcattaatgctgacattgttagaaaggggagaaaactcaacattttccggcagaaatcattgtaaaatgtattataaaatttcctcccttcctaagtagagtgctactatatagtgaatataatttaactttttttcttggagacttattgtcatttctgtgaagttattacctcgacatagtagcgtcctgatgcctcaaaagctcataattcttctcgatgccacagcctctgtcctatctacttgtcttggttgtcatgtcttcaatctcctttcatatttgcctatatctgtaaacttaagagaaaccagataatcaatctgataaaatcactaagctgaatcatatacattaattctcattcctagctctctccacctagccagtgtggcctgaggcattcatagccatgttctgagtggtgaaggctaagagagcccaggagagctgtccagggttaaataagacattaatatataaagtaaggactgtcggtatacgtgatatttatatgttatcatattacattttatttatttatttattcatttatttatttgtatatatagagagagaaacagagtctcactctgttgcccaggccagagggtagtggtgccatcatagctcactgtagtgtcgaactcctgggctccagtgatcctcccgcctcagcctgctgagtagctaggactacagacttgtgcgaccacacttattttttgtttttaatttattttttgtaaagacagggtctcattccattgcccaggctgcatttttaagtttagtaactgcccaaatggacattgggtaaaataaaaataaatacagtcacttctcttcttaaatcattcacctctcaagatgaaggtactaataggacattttctagaacttcagtgttaaccacagcaaggaggaaagacaggcctgttagatgtagactaagaacttcagaagctgtctccgtcctaggctgggcccagggctctagaattgtcccacacacctggtgggcttgcttgggtacttgggtggtacctgggagatgatgacctgttcatcttcagcttctgttattccaggaaacagaggtagtcatctggatactacaggtttgccagctctgctacttctgcttctactgcaggaggaggagctatggaatttttatgcatgcatcaaaacactgacttggctcataagactgcttaaaagacagagtgataaattacgccttgtttctcatgaaacagatttttcccaaaagtagaaatactaatttataatgtatccttttcagaaagattgtaagtctaagtttctcagagaaacagtgtatgtgatggcaggaccccagtaaagtccaaaatatcccataatggccttaggaccatgcccatcatagtctccatagagccatggtccccaagagccatggtgcccaagagccaccacttcagtgggtggtaggtggttgtgaagaatggtcactgtggttcacagaataacagtgacaattgtgaatagaagccagtcattacctaactgataaaatgagtgaggctagcaaagggcctgacaggaagtgaaatcacttactgaagtggtggtagagtacgcaaccaagaactaagaacaggagggaagttaaccctagggagagttcgactccacttgaggaggaacattctggcaatcaggactgtctaaaaatggaacaagctgattgatttagcagtgaaacctctgtcactggagatgttcaaacagaggtagtaggaccctcttatcaggaattctccagagaggagatgtgagttggatagaaggttattgtagacgaccacttgtttctctctcagctctgaaatgtagtccttaaggctgacgtgtgtttcccagtttctaatcggaaaagataacataatctacagtgttgaaataatttaaacaaagtaaataactgtgcttttacaaccataatacggtttagcctttcattattttgttacgttcctcattaacatagacataatttcttttaaagaagggacaattgtgacgagcctgggcaacatggtgaaaccccacctccactaaaatacaaaaaattagctgggcgtggtggcacacacctgtaatcccagctacttgggaggctgaggcaggagagttgctagaaccaggaggcggcggagcttgcagtgagccaagatcacaccactgcactccagcctggcgacagagcgagactccgtctcttaaaaaaaaaaaaaaaagaaaaaaaaaaaagaagtgacaaaacttacccagtaaactaaatgttaatttcctcttctcaggagcataatactaacttactcctctgtttttatatttttgagtactgataatcggatagtgatatatttgtgttattttttgttcaaacaattgaattcattcttagcaagaacaaaagtctatttgaaacatgtaggcatcttaggtagattaaatttttcattgtttcaagttttgacttttgtatttctgcacattagtgatccttgaagattaggcaaggccaagttcttttgacttttataattagtgtgtcggaatcccagtttttcctaccctagggtggactgtattttttacaattaactctgtgaagggtgactgggggtggactggtgaggagaggcttccagttaccagagagcctgtgacttactctctgtgcttttcctaggtcaccaattttcaaagaatttgagtataattaaatacacttcataataaactaggctgaacataatttaatctttccctgaaggtacttcagagtcttggagtgctttagggccatgatgagcatcaattatgttctcacggtgggtgtgcagaaggaggtagttaatagagttctgtttgatcaagtcctgggtgactggacatgtgttctgttatgattagcagttcagtgtccaggttttggaactgatgcttagtattaaattctcaggcaggagagaatggaatagagattgacctctttggctttgagaggctgaaagttgatgacgataattcacatgtacatggtatatatagcactttttagcttccaaagccctttcacataccttgtcttccattgcttgtttcttgtgatgttctggaaaggaagcaaggccgctggtatcccatttttacagatgaggacagtggagctcaggaagcttgagggacttgcctaagctcatacagtagatcaatggcggagaccactggacttcaaattcagtgctctttttagtatttcaaaggatactaaacatttgctcacatctctgatgttctttgtgctgtatgtgtagtaactcatttaatcctcacagtggccctgttagtaggtagatatcagttcttctggtactattacgattctcatcttcagagctgaggccactgagaggcacagagaagttagggcatgcactagtgagtggcggagctgaaatctgaacttagagctttggctccagagcccatgcactccaccattatgctacatggctactcagtgtacagatacactgagcttaagtagaggagaaagcttatctatccatatcttcccatctgcaaagacctctgcctgtatgggaggtctgggctcgttctgactaaggttttgaacccagatctgccaatttgagatcttgggcccattacttagcctgagcttcagtttccacatctctaaagtgaaaatatagaacatggaatgtacctgtaagaacacaatggaatacaggtaaagtgcccagcacactgcttattccttagccttcatgttttagaaagtggttgctattgtttttgttgttggtggtggcggtagtggtcttcttcttattattatttatatatttacaatggccaaaattatatgaaatgttttccaaaaattaggtatttgtacccttcatatgaatgtgtgtgttaattgggtataattgtctttcttgagtctttaaaatagacaaatcttttgattacatttgttaatattattgtacctacctatatctgacttgacttacaattttacttcattaaatacatagcaagtcatctgagaacccaaagtaatcatacagattacttgccatatagttaatttgtgactgtgatatggctgctaaggtagaggtttgaatttaaaagcacaaagaaaaatgtttacttcaatggttacaaatagattaatcatataaagtacatatttgcagagtctcgctcagtcgcccaggctggagtgcagtggcatgatctcggctcactgcaacctccgcctcccaggttcaagcaattctactgtctcagcctcctgagtagctgggactacaggtgcgtgccaccacgcccggtgtatttttagtagagatgaggtttcaccatattggccaggctggtctcgaactcctgatgtcaggtgatctgcccgcctcggcctcccaaagtgctgggattacaggcttgagccaccacacccggcctattctaaggcttgttctaaggctcacagatggcaccttctctgtgtatcctcacatggtggaagaggcaaagcagttcctgggggagttctttgataaaggtgctaattccattcaagagggcacctcccaagggctccactccctaatactatcacgtggggagttaggattcgacatgtgaattttggaggcacacagacattcaggccaaggcataaacagtgaccacttttgttctgtctgtccacacactgcctagagcttccatttatttcaactacatttgcttttttcttatttatctgttcagagtatcttctcagtggctatttatttaccaccctttaacatgttttcttgacattgtacttcagcctgtatatgctttgcaactcaggaactatgctggcttaactaatagtacctacttaacaggtgaaactgacagtaacagcttaataggtgctttccatttttaacatacctcagctttttataaatacaaaaaactctcaatcttttaatgtggttttaaattttaaacaggtcttctttcattttcctttacagaaaactgtaatactgcatatgcattttcaaactatgcatatttcttcttcattccatgtggaagtttttattcagcctttcagtaaattttacttagcttgtcccatggatgccgtaggtgtaaggaatatgatagtgaacaagacagacagagctcctcccctcagggagctttgccatgatacacgatgatgacaatgataaaaggagcaaataatgatttgggacctgattccaaagggatatttctgcgacacttacaatgaaattccaacctggcaccatctttttcactgcagaatgcatgaaggtggttgcatcatgtcatttcgacatgcatttaaatgtaatgaaaggcacaagtagtgattgcaaacactacaataagttgcttgttgactctcttactgtcttccttcttatctccctttcttcctttgtctcattctcagttttcagagcttagtcattatttcgtaatcctctcctaaaatgaaatctggggctctaaggacaggaggcacaggttgtgtttgaacagcatcatcgtgctttatgaaggggattggaggggagattctgccccacagtatggtcaggtctcgctccaggcagcactgactacattggtgctggttgggtaactgtggctcggcaggtcactctccctctttccacctccgttttctcattattagtagaagtcgaaatagcatggttttctaaggcctctgccaatctacaattctgtgattcatatgttcctaaacacttgagttactttttctcaataaatggaaatatattttccaatgaggctggaaatacattttccaattatcctctcccctggtttataacatatcatcaatgtgttgggacttctaacactgcttctgctgtaagcccatcaagaggttaattacctttgaagaatgaggaactgctggaaaagaactgtaaaaccttcaagagaactttggagttaatccctctggtaataggaatcaatgtcactcacacatctagttgccagtggaggaggaataacagcactgggccaagtagacttgaaggaaggcaggttgctgatagagtggagagctgaagattctgaatcaagctcatcatgactctcttcctcctctttgaggctacccaatcagagcaaaaacagtattttaaaaaacctcaactggatgagcctgatgcagtggtgtgctcatgcagtcccagccaaagggtcacttgagcagaggagttcaaggccaacttgggcaacatagtgagaccccgtctctaagacaaataataaacatcaaaattaaaattaaaaaaaacccaacccagtgttcccttcagaatcctgagtggtttgtttcatcttcctctattctggcttgtgtcatcttcctctcttgtaatggataaaaactccaaatgaagacaaaaatgaggaatttgtcaaaaaaattgaattgccaacaaaagccatctttggttgatcaaacggtacagacgtttcagttagacaagagggctaagtttctgagacccattgtacaggattattaatattattcatttttagccctcataataaggtattataaatgtcaagattgctaaaagaatacgtttttaaatgtcttcattataaaaaataagtatgtgaggtgatggacatattaatcagcttaatataatcattttatagtatatgtagctatatcaaaacatcacattataacccataactacatgcaattattatttgtcaattaaaaatacaaatctaggccaaggtgggaggatcccttgagcccaggagtttgacagcagcttgggcaacatagggagactccatctctacaaaaaaaaaaaaaagaaaaaaaaaagaaaaaaaaaggaaggaaaaaaaagaaaaaattgactgggtgtggtggctcttgcctgtagtctcagctgctcgggagctgaggtgggaggatcccatgggcccaggagtttgtggctgtagtgagctatgatcatgccactgcgctctagcctgagcaagagagtgataccctgtctcaaaagtaaaaacttacaacaatataaaaaataaaaatttaaattataaaaagccatcttctttcccactccttcccattttgatacaacagtcccagaccccagacttgctttcctcatgagtcatgcagactcaagtattgcagttccaaaacactgcctgactcaccagctccatccaaaagagtatgtattgtcttcatatgccagataggaaattcctgctgcatataggaaaagcagtgtgtttaaatacatggacacacacacacatacacacacacagagtacacatatacacatctgcatatacacgtacacatatgcgcacatattcatactatatatgtacatacacatgcaatacacatgtatacacaccacacacacacatacacacacatgcatctccaagtctatttccatgctttttttcagtaaagcacctagacaaaggagagagatgtctaatcaggttttggtggttgtcagggatatcataaatgagaatctcaagttactaaacttgatttcacaaaatagtttattggtagttttagaatggcattgcattttaggcagccccaattgtaaataagtgagccgggtaaaagcagattggatgtcacccagaatattttctggaaaggggacatacacaaaattctctctttgcacaattaccctgttttgggtttgcaatattatgttgagcaaggctggctattttccaccaacaggatgttacagcttgtcaaaagttattcaacctatagtgttaagcaggtacttcatcattactgaatttggttgatgctctatggagaaagccaaagttaggagttttgtctgtcattgaggtagagaccctcaactagggaagctttgaactgttcatccagctggtattctgtaccaccttgcctctggagttgagcttagaaccctacttccattttttctgtcacttcagggctgtttcaactattgtttcttcatttacttatatcaagtgtgttttctcaattcataagcatgggagaccccaagagacagatatcgcattagtccttttttgtttgtttagcaggaaggtttttaagtaaagctcctaaatgatatgtctcattctcatggaaattcatcaatattgttttactgtctcctatctggttactttttattttaggtaaccactgtgatacaatatacacaagtccctggatcatgaaaataaattgaagagctaatgttaatagtaagttctcaaccaggggttatgctggaacccaggatacataacccacaggagggccctccgtgaactcagttttcatggaattgtcccataccttcacaggtagaagcatggctatgttaaaagtggccaatgaaagtatagtttctttatgccttatactttgtttggtgaggatttctgccagaggtgtttgtttcctttagttttctggttgctatgattttatacagctttggtgacctctatgagtaccagataaagttaggtatgataaaggcacaaaaagaccgtagaagccatttgtattctaaatataaatatacagactaaatttgtatgcatttgtgtcttcattcttcacggtgctgtatcctccgtgtgtgtgtgtgtgtgtgtgtgtgtgtgtgtgtgtgtatttcttctttgattccaggctgcttatacgaaaatgctgattcatagtgtcactgtcttttctttttcctgcgaaattctaaatccgtttctaaactttttctacaactctgagtttaatctctctaaagtttttttttttccctcttgcggacacaaggcactttgctttgtttatgctaataaatgtcagactagcccccaaaaattagaagaaatgccagtaatttcaaagggctcttgagcatgattttttttcctgtttcttaatacattgtacttttcagagtttaagtttaggtgcatgtaggtggtattagaagattcttagattttattggtagcatccagacaatcttgtcatcacccgatatatatcacctctatgtggtagacccttgtggaaattttctcatcacgaaagtcgaaagtttaattttggagaggaagaggtttttcagatacattaaataggttttgctacaataaggtgagatggtactttcaattgagcatttctcatatactagcaagcagacagcttggcctcctggttgtaattacatgccaatggcttggtgctttttattttagaagttgagttcatcctgaattctctgagcatatggagtagtgcactctgattgttcccattaagattgtaattccatccaaggcttatagtgtcattgtaaacactagatggaattacagccccatgcacattttggaagactgcattattcattgaaatactttataaagttaaataattttgtaaatatgctccaagttcatgggacttagatagaaacataatcctggccacaaaggaggttctcagtaaatatttcttgtttatttgatggactttccttatatctttaaataaactgtatttttaaaaagtgtagagaggttatacttaaatatttgtaggactttaaaagatcttgccttgaaatgctcttacggtttcttgcttttcattgatggaaaaattgacttcccatatgaatatgttatttaatcttttctgtttctagcctagagagaaatactgagtagctcgagtggtcaagaatctttattttagggacatccgcatgtcctaagtaattcccttctatataaatatctcttttcggcataatgtgttgcatgccttcaaggtggaccactatgaggtgaataattacacaacgggaagcctggctgtctcgtggaatattggatggatggctttcttattggtcttaattaggacagtgttgttaagataattcactaattcacagtgcgttatcagatttgaaatgacctcttttttttatactacttcggaagtgtatgtataccttttaggaaagacctggaaggataagttgtatattttagtatctgatatggttttaaaatttaagactctgtgttatgtatgttttgggatgactataaataatctgtgtaacaaggtattaccaaaaaccttattgcctttgccaccatgcactgcaaaatatagtatcaggaagcgaaaagacaatgcattttgagtaatttttagaatttgcatttttgtgaattgacatgtatgtatggaggacttttcaaaaaaaacagaacttttcattaagaatattcggtattaagatattgttttaaatgtcagatatttttaaaatatatgaaaccatattaatcacgtattacttatactttttgtccctggaaatattccatttttaagaacagagataacaaataaatataccagtaaagctaaagtcagtgctttctgctcttaaaataatttattgaacgataaaatgaatgtctttgctttgtgaaattatatttttgtttaggacttgataatgcttagagaacattttagtttttacagtttaaagaatgaataatgactggttcctctgctccctgatttgtttccatgtagatagtacttcatttttattacctgtaaacatgtgttagctttatcaattaggctcaattgaatgaagcataaccccctgaaaggccttgccagtaaaataataatagtaataataatattcttttcttcagattctagcagggagtactgctggcttttatgtaagaagtcaactttaaaagtgtttttgtgtgcgtgtggtgtgggtgcagcagcaatattgtgtattcctttcaaatcaagatgcctcatagtctgtgggcgggggaactccctaagatgccctcactagttactcattcatttgttcctccccagaaagggaaaacccaatgctccacactccacttattctgaataatgggggcggggaggtggtggcgtgaggatgtcagtgtcattgggcaaaagccttcatttttaaagtttagcaaaatgcagttttattgctttatgatcagtgtgtattacaagctaatatacaaatggcattagtgatcaaagtgggatactgatgtggcaaaaatttacaatacacttaacagattgacctgacataacagtgaaagcatttgaattccttcccacatagtaagtaacaagtaatttctggagccagaagtgggagggtgtgtgtgtatgtgtgtgtgcatgtacgtatgtgtgtgtgtgtgtgttgtctgtagaagttaacaaatatgttagttcattgaccatttctttcgttgtcctaaagaaaatttcactcacttgtgcttctgatttgtttcccgtgaagtctcttatcactcttagaacatgaaggcgaattaatgaagaatccttaattcttcaaaaaaaaaaaaccagccctaatttaagaaaggagacatttaacttgctaataagatcctaaaattttataggttatataatacattcaaggaaattgaattatatattcattaagaatacattatctctattagcagagagtaaatgattgaggttttactgaacgctaaatgctcagaaagtaaatgcaaagaccatcactggttgagcacgctgggaactgggtggaagtcttaggcctgtcattaactgttgtgcggcctttggcaaataaccgaagttctctgagccttaggaaaatgaggaagttgggttatataagtggttttcaaatgtggcttcagaaaaccctggagagccactgcactccagcctgggcgacagagtgagacaggcctctgtggaattagccaagggtttgggtaaggggtggggctgagacctgagaatctttatgttacaacagctattaggcaatgtcagttcacaggaccactaaatcaaacaatccttcagaccacttccgactctcaagtttcaataagtccctagaaaacatcatccttggtccacaggaagcaatccaataaggaacttggtctcccataaagaatccaataaagaaaactttaaaatgagaggagggttatggatttgatcatctccaaggacccctgtcaagcaagtctaagatctttccaaaggagatctgagaaatatgtctgtatcccaagaaggtttgacaatagtccctgaagtttgggggatgacttctagatatccctgtgccttcaagcgtgatcatgggctggatttgttggccccatggtctgcctctgagtcacagacaaatgatgaaaaaaagaacaattttctgtcagcatgccagaccaagggaggggccaggagaagaaccgtgaaccatgaactgtgccactgctggaggcactgacagctccttggcaccagatgtgtgacctcaacccctgcagcttgggcacagataatatctcagggcaggggatgaggaatagaggaagaagggaaagttgcagggatcctggagtgttaatacccatggtggcggcagagcaatttgccaggaagaaaactctctggttaaccctccggcactagttgccaagcatgtttgtactagaatggagttcaaagttacaaacagagcactgtctgtttttaaggactcatatgaaaggtttgcttgtcctaagcctgaatccaagagtctgtctgtcataaacactttcaggtagcccaaaaatcccttcaatgtgatctccagaataggggaagacaaaggactcaggtcttcagctgtctgatgaggagtgagaaatttttctaatgaacatctctggcttatggatattaaggagagttcagtgtcaaaagtttctgcagcgtagttaacagaggtggaaagttgaaataaccttaaaggcactgaagctgagaaactgccctctttatcctaacagccacagttagttttggaacactgtccatggagaagctcagggctgtcaatttagaaagcagctgtgtgctggcccattgggcaccatctttctctcataggttgttctagtccaaggtgaagaaagctacattttgctctaagctagactgacatatggacttctagatttgaaccctaaacacaggaggaagtgattgattgtattacaaaaagaatcttctttggtaaataactatttttttttttaatggccagatgggagaaagcaaaagatgccttttcgtggtgttttggaaacctagatctcatcaactccctggttggttttggcggtcaaggctttttatgccagagcaactgtgagccaggtttctgaggttcttcctgacccatgttggtagcctcttaaaaataactgtcattccaagttcagctaaaatatataactcaacaaataaatacatataaagcatatgaatagaagcgggaaagtgaggattaacagactggagagtaagagtcttgccatgtaaaatactataaaacactcttaggaagtctcttgcttatgttattacttgtacagtaaatgtggagacctggatctcttcctcatggtcccttatttcttgttttcctgctgggaggtttcaagtagctgatcccttgcacatgtactttaaaacttcaattatatttgtcactggcttatcatgggcaatgtatgtgaatgtgactaagggtcctgataaattaaatgccacttttacatgttcctttctttttcttctattagtgttctttaggactttgaatgggaaatcctcaaacatgtaagtctatgtggcttcagaaaaccccagagaggccaggcgcggtggctcacacctgtaatcccagcactttgggaggccgaggcggacagatcacctgaggtcaggagttcgagacaagcctggccatcatggtgaaactgcatctttactaaaaatacaaaaattagctgggtgtggtggtgcacacctgtaatcccagctacttgggaggctgaggcacgagaatcacttgaacctgggaggtggaggttgcagtgagctgagattgcatcactgcactccagcctgggtgacagagtgagactccatctcaaaaaaaaaaagttctccccagtggcctctactgaattatccaagtgcttgggtagggggtgatgctgaggcctgggaatctttaataagaaagaagaagggaaattccttatgttggacccaacattgagtgtgttcagatacagatgttggcaggtatgggggcattcggaaggagaacagcggctaaccaagctaactgagactgagttcaagattcgcttctggttcagggggactttcgttttcaggctctaatacattcagaagagcaaatattggtactttaatcatgcatcttttccccctcaagttctgtatctgccacgtgtatattttatttggcatttaaatgcacagttcttataattgctgataaatagtctccattgcacattttgctggcactgtggcctcactgtaaatgctctctgtatgttcttgggaagttgcataatggcagttactctagtttactgtgcaatatgctcagtgactaatggcctaatcatgacttgaaaaatatataaacagttcaacagaagcagttgattcactgagctctttcatccagacaagggtgagctaatgggaataaaaaagacggaggtgtgcagcagcgtctttgatgtattgaagttagagcattcccacaaatcccatgcattattgctcattgatggcggatcctttttcatatgcatgaggcaggagtgccaaattatcgtcctaattggctctgacttggtattccttaatgttcgtgttacacttgttacaacttttttcctttcctctaaatactactgacagtaacagctttggagaggcaggctgtcacgtggccccatggcgtcaccctacactgcaggcttaagtgtggctctggtcctgtgctctggtttcttgggatagaattacagctgagactgtgcagtgcggacctgcctggtttacttcaggggcattgttgattgacacagattcttgttcccttgtcctcagtggcaccttttcttccaagaggaacagagatagagtcttacaacagccattaaatagaagatcctggggtctactggagcactgtcccattggtggggagaaataacaatcatcatcatcatgtctcccttcctttggaattgattaggtagctcctatattccacattcctctcacctgttgaccacacacaatttttggtcttgtagcttggccactcattttagctcaatcactggtttaatttttttaatgaaatcactcaatcgatagaggctaacctctcgtagatgtaataattccaaccattctcaaagaaataatgaagggtggaatattatgctttctaaaataatggaatttattttttctttatgcccacagctgtttagtcctaaagagggggaagaaagaatctttcgatcttttggcatgttccatgtcccgtattgatggtcatacttcagcttttttctggttgtttaagaattatgtggccaataggctgccttgtatataacagtgaaaaacacccattacttgtatttgtttcattttaaggtttaggcagttggagcataggacagtaactggtttcccttgttttctggaacctgccccttgctctctcttgggtgatgcctcacccctgccccagtgtcagagctgccctgggtccttcttcccttgaagggtctgatgaatgaaccacacagcttgttagtatctcagtttgttaatcctcccggaggaatgtatgtttcaaaaaagaagctgaaaagtataatggatgagaatttgctttggaactcagcacactgtagattagagaaggaaaagaaagaaaaggaaggaacagaaggacatgtttggggggtagggggcctttctggggcttctgaaagcaaatgttgtgataattagttacagtgtcccaaagatgcctgggtctacccctgaccctctacacaggccaattctgctcccaccagaaaaaaacaagagtacagagcaaagaggcagggcagcagcctctgatacctatttgaactttacacattctgatagaatttattatctgtattgaatatgggagactgtgggtaaaagacttcaagacagtgaaaaactaggaaagaaaaataaaggtgtattgggccttggcaaatttttgacacttacttgactatgtgctttaactttttgaaaaggcagataatatagcaatcacattaaatatttatctttaaaagaaattattttaaaaattactcttaatattaccacattatgaactcaataggagatcctacagttcctttaactttaacaacagtacatttgttaatattcattaaagttaaagaagcttactattacaacagaatgaagtaatacttgctggaaaacaccaatattttacttatctttatctaatccccccgtttaactgtagtgatacaatacttaattttaaaagaggaatggtttgaatgtacagacttttacatgtgttcttccattgagttctttcttgtagtctaacccaatagttatcacacttcagtgtacatgaaaagtgcagtaaaggattgtgcagtatacataaaatcctgtgtggagtgtcttgtgggaaagccaaaggattttcaaagttaattttgactatatatgacttttgcttaacttttgaacttaaccgcccacataaaaactcactccactatatttcccttctctttgcctccctacttctgtcccccctttctcccttttttccttcctcccttgtattcttccatccatccatccatccatccatccatccatccatccacccacccacctatccatctatctatcctcccatccacctatccacccacccatatatccatccatccatccatccatccatccatccatccatccacccactaactcatccatccatccatccacccacccatccatccatctattcatccttccacccatccgtccacccacccacccatccattcatctatccttccatccatctattcatccatccacccatccattcatccatctatctatttgtccatccatccaccctcccacctatccatccatctattcatccatccatccatcttttcttccatcactcctttctttttttttttttgagatggagtttcactcttgttgcccaggctggggtgcagtggcgtgatctcggcttaccgcaacctctgtctctcgagttcaagcgattctactgcctcagcctcccaagtagctgggattataggcatgctccaccacagccagctaattttgtatgtttttgtagagatggggtttcaccatgttggtcaggctggtctcgaactcctgacctcaggtgatccacccgcctcggcctcccaaagtgctgggattacaggcgtgagccaccgcacccagccccttcactcctttctttttctctttccctgccttccttttgataaattaacttaaacattttttttggtgaaattaatatggtgatgtctacttatatttaaatcagaaaattattagtatgctgaatattccaatctcttaggaatgataaaaatattctataaaggtcaatcttaattccacatcctatgttcctactcagctttctgtctctgatttctcatttttagctgggaacatcccagccaaaagacagccaggttctctgtgagcatagcatatcaaactaactgtaagaaaataacattttggcttaaaagccatcttctaatataagatagaataaaaatgataatgattggtatactatgtggcattgttagtaagaatttgaagtaagatttacctaaatcgctgaaaatattgaatagttggctgagactttagaattggtacaaacatgtacattttctcaaaatcaaaagaattaaaatagatatccaagaagtcagattatgaaaaaataagatagtcaacggaaatcctaaaagtaacttaaacattggcattggacatatttcatttgtatttctgccatagaagagttaagttaatgtgcatttttgccatgcaatggcaaaatgaagagacttttttttcccttctttttgctcttggtaaaattaagtggcaaagaaaagatagctctgaggttattgctagaattttgtgctaaaaacattttggctagagcagcaagtttttaggcaaacagcccctgataaaagttgcaagaaaaaaatctcattcgagtgcaccaaacacttttcagatgaccatttaatttttttaagttgcataaacaatttcaagtgcactgtaaatatagaaaatagggtatgatagttgacagaaacagaatgaattaagagcagtaatagaaaattgtaaacaattatatctgaatttcatcagttgtcttgcttacattcacaattagtcatcccgtgaaagacataggtgaacatttagctgcttaaaaaggaattagctgcttgaaaggacaaatgttcatgttaaatttcatgaagactaaccttcagcagacaacggcacaaatgtgtcagctttttctggtgtgaatgaagcaagatacaggcaaaacagatgagataaataggacttggaaaaaaaattctactatacaagttttgtatccccatctttttgctctttgtggagcacctactggaaaccactcctgacctaatgatgaggacacagagagaaaattcaataagcaatggcctgaaaaataatttttatctaagtattagataaacgcagtagcatatttgacttgtaaaaataacatggctaggctttgtatgcctccctgtcctcttacctacgtgggattttcaaatagcactgattctggggaggggaatcaaaaaatagaagactcccctctcccagagcacacgtaattaatgcctgtgttgcagctgggagctctctgccagcagagttctttgctcgtcatctctcagcgctcacccacattccccttgattcacaccgtattgtttgtttacatgtttgtctccctgactcaggttggaaatctttaaggacaaggacaacctcttgttcctttttacatttcccatggtgctttgctcgcagtggccactacagacatgattcattcattgttttaaaaaaagtgttaactagttaagtgaaaataaaatgaaacagcaaaatgagacaaacgcctagatctgaaaggctacaaaatacagcagagggttcagtggacataagaggaaaggaacacaatgatatccccaatcttgtgatggaatagaaaaaaaaaaagtgattggtgttgatgtaacacttttcttggccagttgaacattccagagtagaggtcagttttgtagttaaatctggtaggaagatgtttccaaccagaaggaatcatactaaaattattttatcacaacaagcagtccataaccgaaactttaatttgtgagttgggaatcaggataggaaacccaattttatattctttttataggaagaagaatccattccaccactcagactgctttcctctttcataatcgtggcatactctgccattgtttgtttattttccccacaactagatggagagtgcaaggaccatattttactcatgtgtatcctcagggcctagcacaaagtaggcactcagtaatgaagaagtaagatgtttcaatgtccctaacatttaaaaggatgtatgaaactagtgctaataccagaaagagttggttttcataggctgttaattgtgggttttgaaataatgtactactttgtacattgattttatacaactgtgttatatacttcagtaactttcaaggtaaaaagttagaggttattaaatctggcagggtcttaaaacctgagtctcagtccatgtaagagcattcttttgctcttcttgactagccatgtaaaagggtgaatgtaagttagtgaattatcttttagaaatcttcagttgtatatatatttttttcatcgaattgcaaactcactcacacttaccaatgtaatactaccctgttgatgagcattagtagccttatttgggtagccagattagagacacaggcttcatggtgttacctgccttgatgttttcattcataatgcagcatttgggaatgcagcatttttctatattggagacatgtatgatgatgtgtatgttccttccccataaccctgtccgcttctcctttggcagtgtcttgcatcacaattttattttatttttatttatttatttattttttgagaaagagtctcactccgtcacccaggctggagtgcagtggtgcaatcttggctcactgcagcctccacctcccaggttcaagtgattctcctgcctcagcctcccgagtcgctgggactacaggtatgcaccacaatgcctggctaattttttttatatattttttttagtagagatggggcttcaccatgtcagtcagactggtcttgaactcctgacctcaaatgatccgccagcctcagcctcccaaagtgctgggattacaggcgtgagccaccgcacctggcctccaattttaaatatatgtaggctccatctccacctctccctgaaaaaactttccctgctcctttcgccttcatgtgtgccataagttgactgccatcaggccaatatcattacatataaattccctccacccttcgttttaattttaaaatatctgaaagggggaaagggagaagattccctaatgagtatgttgtgtgattcaggaccttggctcttagatcctcagtcatgtgatattttcagattttatgggactatggtgcaattgaagaaaggcttttgacagaaaatgtgaaatgatgaagtcttagcacggactcatacggcagtatttgattgcgggttaatctccaaacgttgaaataaagtggatctgttaaaaagccattggttactttcagttgccaggggtgtgtatgctcacattcctggaagcacattctataaagtcaccaatctacaacacagacacccacctccccctagacttcagagagctctgctgggctgcagctttctaccaaaagagttgtgtgcctctgaatttcacatccaaccttggaagctgcagtctgtttaagatttcagaaagaatgggggctatgtttccagtttactgctttgttattttgaaattgaaagtctgagcagaattcagaactacacaaaacaggatcttttcacatgtttgtttaagtcatgttcttggcaaaaacttgctgaggaaatgatctgtttctctaggagcattgatttcttactccagtacagtggccatttcccaggatctcattccaaaccatctgttttgccatcagagccagcctttcagtgaatgatctctttggtctacactgtgctaaaccttctgattgaaaggatttttattaatgaaatctaggtaataaagttgcagtgaactttaggaagttctctgtaggcagggcgtggtggctcaagcctataatcccagcattttcggaggccaaggtgggcagatcatgaggtgaggagtttgagaccagcctagctaatacagtgaaaccccgtctctactaaaaatacaaaaaaaaaaaaaattagctgggcgtggtggtgggcgcctgtaatcccagctacttgggaggctgaggcaggagaatcgcttgaacccatgaggcggagcttgcagtgttgcagtgagccgagatcacaccactgcactccagcctggcaacagagcgagactccgtctcaaaaaaaaaaaaaaaaaaaaaaaagaaagttctctgtaacagtcaaatagcaagtgctgacctctgtcgcctctgtagcagcagtatggatgaattgtgagcttgttggctaggttgggctgcgggtcattgtggaaaagccatgtttcccttgcctgtggctgggaataagtatagtggggccattttaaaaaaaagtcctgtggttgaattctgagtttgagctgttttaaaatgtcaaacagactgaatccttgggagactcatttgaatgagaccagcagcaatgtaagaatatatatatatataaaacacgttagagcatttccatgtatgggagggaactgatggagagaacacagaccaccacattaactgccacatgctgtcaaccagtggatctcaactggggaccattttgccctctcaggacatttggcaatgtttggagacactttttgatcgtcccaaatgggaaaacaaggtagcaatactggcatctagtgagtagaggccagaaatgctgctgaacatcctgcaatggggctgggggcattggctcacacctgtaatcccagcactttaggaggtcgaggcaggaggatcgcctgagctcaggagtttgaggctgcagtgagctgtgatggcgtcactacactccagcctgggcagcagagtcaggggtctcttgaatgaatgaatgaatgaatgatttttaaaaatcaatcaatcaatcaatatcatatcctacaatgcaccaaacagtcctctgcctcaaccaaggatcatctggcccaaaatgttaatagtgctggagttgagaaaccctgccttagaccctttccttctcatagtttccaagctgataaatcagcctgccttgacaaaggtgaggaggtaagctgcaggcgtgagtgggaagagcaggataaggaaggaaacggagaaaagaggtagcagcattgcatgaaaataaactacccgggccatatcccatttgtgccaaattaatatttgggattctgtctttatgtgtttggtaaagccggaaagtatgtgggtggctggctgggccatggcctttgtgttagaggtgacctgagtttcttcaaagcacctgtgttagtttttcattgctgctgtaacaacttatcaggaactttgtggcttaaagcaactgtttttatctgacagttctgcaggtcagaaatccaatacaggtctcaccaggctgaaatcaaagtgtcagccaggctcattctctgtagggactctagagaataattcatatccttgccttttccgttttctttcttttcttttcttttttttttttttttggcgggggggaacggagtctcattctgtcgcccaggctggagtgcagtggcacatattggctcagtgccacctccgtctccaaggttcaagcaattctcctgcctcagcctcccaagtagctgggagtagcccagcaccatacccaactaaattttatatttttactagagtggggtttctccatgttggccaggctggtctcgaactctcgacctcaggcgatccacccgcctcggcctcccagagtgctgggatcacaggcatgaaccatcgtgcctggcccacctttttccattgtctagatgccattgtatttcttggctcctggccccttcccctatcttcaaagccatcaatgttgcatctctctgtgctgtgtttccatagttgaatcttcctctgacacttcttcctccttctcagacttttaaacttccttgcgattacattggacccacctgtatcatctccccatctccagatccttaatgtcatcacatctgtgaaatcgcttttaccacgaattcacagactgattctggggattaggacgtgggtatgtttgaaggtcccttgttgtgcctaccacagactccaaggcatttactagagccacattttgctgacttgagctagatgtagcaaaagaagtgttataaaaatgggtttttaaaaaagcctttttttttcctgtggtataattttagtgtttagaagtaatttttcttttaatgcagtatgacacagaaaacatttggaggatgttgaaaagtaattgtttaaattggcaaagacacatttcagtaagggagtaaacaagagggaaacgtgttggggggaaaggtgtggggaggaaactctagaccagaggccctaggacttgaatatacaacttagtcctgttgaaaattcagattcctgggccttaaagtatgttaaataggtcaggggtggggcccaggagttgtacttttaacgagcaccctcctgtgattcatttaacataaaaggtccttggctcacacttggagaaacactgctgtagaaactcaaatacctattttaaaacaaaggtacattttaatcatttagtttaaaatgaaatcattgcataatactgatgttagaggttagaataaacatgtacttaagttcttgatattcttgtcatttcagttacatgtcagggaatgtgatttgtgttttgacgtattcaaatccttgtcatattcaaccatattcgtattcaaaatatataatgattttgacccttgattgttcgaattaagactgtcatcttttctgtgtgattaactcttgtgttgatataaatatgcctttggcttactaatgttcagtaagaactaatgactcttgggaatgttaatagactctgtgagtccctttttaatcatttgtaaccaggctgtcattccatgtttgtttggaagcttagagataacatttatgaactttgtgacacatagtagttgctcaataaatgttaactgtagaaacacattgattagtttcacttcagaaatagacacttagagttcaaaattcccatctgcctagctcctgaggcccactttcttaccagaatctttcctgataccctctcctgcataaaatggttcctcttttgagactttgtagctcttttgtacttctcttattctgttacgttactgcaaaaaaaaaaaaaaagaaagaaaagaaaagtgccaattgtgtacatgctttcctccctgctggaatgtaaactttgtaaaggcatgatccatagcagatacttcttattacaaactacctggcagaatttctttctaaagaacctactcagtaagcctgttggtgaactgagcaacatttggacaattatggcatcatcttacaatttttcagctattggttttcacttgtttagaaatgtaaaactttgcaaggacttttataaaagcaaatttcagaatagttattcactaagcttttttatgctaatgatgtcatgctatcaaaaattagctagagtaaatggactgtaatgaggatggtttgtaatctagattatatgttccacatgtaacatcgaaatgaaatataaaattgagttgttggcatgtggttgtggtgagcagaagcagttattatacattacttggtaaaattcatattcatatcttgtcagtttacagtgagccagagattaaaaataacatttgtttctgttttagtaactgcttaaaaatatccaaaatcattttattttctttagcctgacttctagtagtgttttgaatatgtggcctttcaagcagtaatgaaatgcatcaatgcgacttggcagtgcctcacaggacatgcttctaggatcatttttaatgattaaaagtcaaattgagttctaaaaaactgacccaaaatatagatgagccaagtaaaaacggaaggaaatctgaataaaatcttggttcttggtcctctgcatgtatcctccacatctgttttctccagatctcttttttcttgcttgttgatagcacagaggaagatcgcagagagtaatgtactgtatatgtttcacatcccccttcctctttagtgatagtttggagagtatactgcagtcaccatggttttcagtttggagagtacaaggatcagatctgtattttctagagccagcttttgtggcattctggagaggtgattggagaaccatgagagcaggcagacatctgggtgagagggcacgaggggtgagtgacggcagagccagacttgctggagaggcagaaagggaaggattcaagtagcataaccaggaaatagaattgataggatttggtccctgctgacctgtggaataagggggaaggcagaggagttgattctagtatttctaagttgggccacttagtgatattggggtaccaggaacaggcttagtggacccacagaagtgaccagacccaggagtctctctgagcgcccaccctggcttctctgtgttggcttaccctttcttggttgggggtcatggggtggtcagcttcagtggtgtggtctgaggtgacaggtgctcaggagtgaggacagggagtagacatcaccaatgtgaatgtggaggtaggcaacaagagttattctagaactgacaaatttaatatattttgctgactgctgagttccatttggacaaatacctaatgcatttggggcttaaaacctagatgacgggttgaagggtacaacaaaccaccgtgatacatgtatacttatgtaacaaacctgcacgttctgcacatttgtcccagaacttaaagtaaaaaaaaaaaaaaaaaaaaaagattgttcagttcagttcagagagcaataggagcagtttgctattcaccaaatagggacatcaattctttactgattaatagcagtgattcagaaaactgccttttgtagtagagcacaccaagggggtctgccggatggaaaaagagaacagtgctttgtgaactataattgttgccataagtaaatacttaaaatacactaaaatggcaacatcaggaaacatgactaaggagtcagtgtacgccacgccctttcccccacctttgtggttgttgaaaatttccaccaagagtgatgtatacaaaaaagggtaagatcagggtgttaggtttcagaggaaggcaaaaacttgtgtgattctataaatggagcttacaaatggaaatgcaccattcaaggcagaaagtctatcacagtcattaggaataagcattagagtgattctcctttcttaacttctgcacagaagtttgatgtggtaaagaaacagtctgctcttagccatgttccttgaaaatacatgtcttcaattacttggtttgtctgagagaaaggagggtttggaggagaaggaaatgcctcgtgagtttgacatactatgggaggattgttgttattattgcttgatttacatgctctcattttatacaaagtgtacagcacaatttctcaaagagtaattatgatgccaagaaaatggggtggattctgggcttcctgcagtctgtcatccaaataataatattcattacaaagatccttacccaggaggccaaggtgggaggattgcttgaggccaggagttcaagaccagactgggcaacatagacccctatctcaaaataaaataaagtaaataaaataaaataaaataaaaaataaaataaaataataaaagctccataccagtttgtggcattcctactgaaaacagaggtatacgaaatgcttgaacagggcatggaactggaggtatggatgtcattaagaatggctgagaattttttgccaagagttagtatactatcctactttattctatttcagtttgcagtaggacagacctaattctcttccctgagaaagtcacaaataaactagcatggagcttctcagtgggcacccttggctgaactctatagactcctgttctctttaataatatctaaagcttctggttcaattacatggctaatatcttgactctcaagaccaaaaggcaagatgtttaaaaataaaatcaacgttaaaaacatgcctgtgttccatggacacaggaaggggaacatcacacactggggcctgttgtggggttgggggaggggggagggatagcattaggagatatacctaatgctaaatgacgagttaatggttgcagcacaccaacatggcacatgtgtacatatgtaacaaacctgcacattgtgcacatgtaccctaaaactttagtaataaaaacaaaaaaataagaaaacaaaaacaaaaaaaacatgccagtgttctttagtcctcactcaattagagaaaaatgagagcaagcatgatattttgtatctggcactatgtgcactgccttgagagatttctctagaaggttttaagaacatctgtcatctattaatagttacgaaagccgagactcacacaaatgaggcaacattacagggggtcagagagcacataggtaagcccaccttgatgggagtcctggcccgaggcactttggggaaagagtgagctgcagtggttatagaaagacaaatgtcttgagccgggcattgaaaaatgactaagaataatctagaaagtgttcagtatgtttttaacgattgtgggttagcagaaggaaagccatctgaggtgagagaaataataagcaaaggggacagaggtggatggtgaatcaactgacccaagggagttaagcgtttagaaagcacttcaaaaggataacactacatagctccttgccttactgtggtgccttagagatgactggcatttttgcagagcttgtttcataaatgtgctttcagaggaataaacaggggattcgggctgggctgaggataccttgaattttgtttacagaccatcattttgtttacagaacatcagtgctctatcctcatgtccttctaagaatcaaaagttttaacctcacagaatccagcgtgtggcttgtgagtgagactcctttttccatgtgataaccggtctgctttggggaggcaaaagaatcttaccgacacgtacatattttaggatgggctctgagccaattcatcaagccaactcctcactttgaaacaagaaagtgaagaggatgtttcatgattgtggaatacctgccagaggaagaatctaccgaagttcagtcaactattaattggaaaggaggcagcagactgaggagatagagaatctttgctctcaggtggatggaggttggagtcctcaatctgtcacttgtgggtacattatgtagctccttcacctccatttctttatttattagaaggcgggtaataaaagtgtccactgcctaggatggttctagggcttagaggagataatgaaactcaagggcttaacatgtgaatgttagctattatcattgcatgtgtccattaacacccaaagataaccagtgttgtttagtagttctttgcgtattttctttctaaatagataatgatttataatttacctagttacttcatgaattgatttcatgaaaaaggtctttctgaatctctttccatgtactttaaaagtttattcctttagttaaaagaaattttaactagattcttaaagcctagattggaagaaagtgtttgctaaaaaaaaagtcatggctgggtgcagtggctcacacctgtaatgccagcactttgggagaccgaggcgaacggatcacaaagtcaggagagcaagaccatcctggccaacatggtgaaactccgtctctactataaatgcaaaaagtaactgagtgtggtggcatgtgccagtaatcccagctactcgggaggctgaggcaggagaatcactggaaccagggagtcagaggttgcagtgagctgagatcacagtactacactccagcctggtgacacagctagactccaaaaaaaaagaaagaaagaaaagaaaagtcatgtatatatccagaagaaaggaaatcagtatattgaagagatacctgcactcccatgtttgttgcagctattcattatagccaagatatggaatcaatctaagtctccatcaatgaaggaatggataaagaaaataaggtacatatacacagtggaatattattcagccatacaaaagaatgaaattctgtcatttgtaacaacatggctggaactggaagacgttatgttaagtaaaataagccaggcacagaaagacaaatatcacatattctcactcatatgagggagctaagaaacatgacgtcatggagacagagagtagaatgatggttagcagaggatggaaagggtagtgaggagggaggaataaagagaggttggttagtggctataaaaatatagttagatagtaggaataagagctagtgttcagtagcacaatagggcaacaatagttaacaataacttattgtatatttcaaaataactagaggaatgaatttggaatgtccctaacaaaaagaaatgaagtgatgggtatcccaaataccttgatttgaccattacacattgtgtgcttgtatcaaaaaatcacatgtacccaataaatatgcacaacgatcatgtacccataaaaataaaacaaaattaaaaatgcacacttctcacagtttcttgcctagtagaatccaagtaaatacagttttccgcccacagataactcttccctctggtgccctcatggtttatctcatgttcttgaccacatgggttaatggtctttgttaggttgtactcagtgatccccaagaggacaaatggtgggaattatggaaattgaggccagaaggaaacctagagttctgtgcttttacttccagtagggatctgtggggtttagaatgtctgcctggtcagcagttctcactttgggaacccccccacccccacccaagaccttttctggagggacatctgtaagatcaagattatttttatggtaatactaagacattatttacctattccattcccattctcttccatgtgtacagcggagtttttcagaggctatatgatgtgtgatgatattgtgtaatgaaatgtgtcaacttttggaagatttgcataattcactgaactaatataattttccaaatgaccagggtatgatgttacaaaatcatgcatagctaaagatccatccaaagttcaagatagactaatgaattttaatataaaagaatacttagagtttatttctatgcttcagattccatggtgctgctcccctttaagaaactaccacttattgagttttggtatgatataaaaaaagaatatccacaattgctgaaactattggccacatcttctccacatacttcaaccaaacaacatatcacagaaaactgaattcagaggcacagaagagaatttaaccattttccattaagccaggcattaaagagagctgcaaaaatctaaatggatctcactcttgtcactaacttttttgttctgaaaaatataattattttttcataaagatgttatttcatgtagtatgcaatgggtatattagtatttctattaaatgaactaatgaatattttacatttttctcaattttgcttctaatatggtataatagttgttaaatatgatctacctaatgaaaagttccttggggtcctcaataaattttaggagtatagaggaaactttatactcttaaaatttattgaggacccaaggagcttttaagtgtgaggaccaaaagtgtgaggaccactggcctagtctggtcagtgtctacaccctgtgtccactggtttcacctttcttctggaaaaagtgttctgtggtaaaatatattttgggcctagatgagtgctttctcccctcatagatttacaatacacatgaacatatgagaccctccaaagtctttcccaaatttatcccaacctttaaaaacaaattatcccaacctttttttatcctccttttaattttggcacaacataatgttccacaatggaatataacatcctatggaacgtaccggctggtatatgatatgggctgccctctttccgttaacaaaaaaattaaaagcaagacattttccttcaaatccatactttatttagagagaggcctataaaattcacttgcgaatctgattgactttcttaaaaaaacatactcttcattcattgtattatgccattttgcttatactctttgaagctgtttctacttctgtttccaaatgcatatgtttttttaaagctctgttttagacatttttgtgtgttaattagtagcatctgctccatgtgtcataagacaaagtaatttcatccccacaaaattgtccaaattgcaggttaagtggtagcagcctagctgttgagctgttactactgtttggtatttttaaatggcaaaaaataccttcggtgatgcatcacatgcctttaataaaacacagtcactttgggtaacagaaagatttagaaatggcagtgggttttgttgtatttctttttatgattctttctttccagtgctttagtttccattggttgtgggtacaatcctaagagtcagaccaaaataaagaatattccatcagtatggatcaaaaacatgttcctggccggacatgatgggtcacacctgtaatcccagctacttgggaggctgagctgggaggactgcttgagttgaggagttcgaggttgccgtgagctatgatcacaccactacactccagcctaagtgacagagcaagaccctgtctctaaataaataaataaataaataaataaataaataaaaaattaaaaaacatgctcctggctgctgcgtgatgagcatcatcttcctaagacatgagactgatacttgcaccacccagcaccagtttcttcccggcacagtgccattctaaatttgtattgaggcaggagtgcagcgagaatttctttctccttctgtatttcacatgtctatgccacagaaagaatagaaacatcttaatttgttataataattatagggacaatagtcactgtattttatataattcaaaagttctttttaaaaaattttttggtcttgccggttcctactgaaacacttcgtacagtttgaatccttagtgactttctattgccaactgaaaattgattttttcctatattaaaaaaaaatccagccgggcacggtggctcctgcctgtaatcctagcacttcgggaggccgaggtgggtggatcacctgaggtcaggagttagagaccagcctgaccaacatggtgaaaccccgtctctactaaagattaattagccaggcatggtggtggacgcctgtaatcccagctgcttgggaggctgaggcaggagaatcgcttgaacccgggaggcagaggttgcagcgagccgacattgcaccattgcactacagcctgggcaacaagagcaaaactccatttcaaaaaaaaaaaaaaaaaaaatccaaacagaaaatactgtggctatcttattcagtatcttgttcttttccttaccactgagtagtttcagggaaaaccctttacaattgcaaaaagacattcagtttataggactatttattacagcgttggcaaatggtgctggaaattctctaatagttaaatgacgcaaattaaccagactgaaatggaagaaccatactgaggttgctcttcaaacagcaagaggctacctttctgttttctttgacaactgaatatagcttatgatatagttaaggtatcaaagatgcaagaattgtagagctatgtggcaggttaagaagcctgatgaatggccgggtgcagtggcccacgcctgtaatcccagcactttgggaggccgagaccagcagatcacctgaggtcaagagttcaagaccagcctggccaacatggtgaaatcctgtctctactaaaaatacaaaaaattagctgggcgtggtggcgtgtgcctgtaatcccagctacttgggaggctgaggcaggagaattgcttgaacctgagaggcagaggttgcagtgagctgagaccacaccattgtactccagcctgggcaacaagagcaaaactctatttcaaaaaaaaaaaaaagaagtttgatgaagatgcagatgcttcattgcttgtgcaaattgtgtgattttagcatattctacagtggaaagtcaaatttcaggcatgcacacctaaagtaggaaaaatggttcttaaaggggtagtgtgatgcagggattaagaacctggtttctggagtcagatggcctgagtttgagtcccacctctaccatgtatgtgtgctgttgaacaggtgatttaacttctttggggctcagtttctcccactgtaaaaagtcatgtaaagttcccagaagagtgtttcatacattgtaactgtagtagttatctactgctgtgtaagtaattactccaaatcttagtggcttaaaacaacaagtgtttattatctctcagtttttctaagtgtgaatcactgcatatcatagctgggtgtctctagctccaagtctttcatgaggttgtagtcaagttgttaacctgggctgacgtttcatctgaaggatagggtgggggcggtagggatctgcttccaaatccactcacatagatgctagcaggcctcagtgatatgccatgtgggcccttccacaggactgcatcacagcctggcagtcagcctcccccaggtgagtaacccagaagaggatgcaagatcccaagatggaagccaccatcttcatgtaacccagtcttggaaatgatctcccattacctttgccacagtctgtttgctagaattgagtcactaaatccagtccacactcaagaaggctttacaagggcatgaattccaagaggtgggatcactggaagccatcctgcaggctgcttataacagtaacttgtgctttaatttatatccccttatggtctattcctgacaatcagaccaaatgagcccttaaaatgtaaggcagatcatgatactactgcattaaaaattatctctggtcttcccattttacttaaaagtcggtatctttacaatggcctacaaggcctttcatgcttataaaattatttttctatattttgtaaaataatatatatgtataataaatgctatatatgtatatttgtataaacacatgtttatatgtttagttatatatctagaatttattttccatatggtgtaagatagcaatctctttcgaaacgaagagccaggtttcccagcactatttattgattacaatacccttttcctgggccaggtgcggtggctcacatctgtaatcccagcactttgggaggtcaaagcgggtgaatcacgaggtcaggagttcaagaccagcctggccaacatggtgaaatcccgtctccactaaaaatacaaaaattagctgggtgtggtggtgggcacctatgatcctagctacttgggagcctgaggcaggagaattgcttgaaaccagaaggcagaggttgcagtgagctgagatcactccactgcactccagcctgggtgaaagagcaaaactctgtctcaaaaaaaaaaaaaaaaaaaaaaaaccaaaacaaaataaacctcttttttccctgagttgatattctactgagaacctgtttgtctcttattatgcaatctgtgtctaattgttgcatttttgaataaagatatacttagtgggtctagtaaatcatataagatagttgtgtttgttatgattttatttgatttgaaacattcaaatacatgtaaaaacaaattataattgagaattaattatggcaaacatttaataagttcctttatttgatagattaggaactaattttatttaaaaggccgtgacttacatttaaaagtccaattagctacaacattaagactaaaaagtatatttcatgactcccaggtcactgtttataggttgttgatatcccatactttgctgctgctgctgttgcttataactgttcagaaaattttcaccaaaatgtctatcaaattggaaaaccctctggagtgagatcctttttaaaatatagccaactttcacatatgcaggcatatctgtgaatgccctaggcccctgtgctttctcttctgctttttgggcttttggccttatctttgcttatgataacttcaaatggtaaacaagaagggataggtgacagagattaaacccaagccagtttgttttgttgattattattaacggtattgataaagagtttgctgaaagagggaagcatattgaaattattgcttaaaaagaagtgtgtagaattttcagttgttttcttttgataagagttgcctcatagctgttgtagtatgtgcaaatgaaggtcagcgataaatcacagaatgaatcacttccaactccttcacatctacagatataagtaagaatggaaaatattgtcacttagatgagtccttattttttttttctgtatgaatagtataaaccttacttttctggacacctagctttggcagctggtgaaggttgttaaagtaacaaatgggaccattctgcctctcccagatcgattttgctgcaagatagttgaaaataatataatccagaaatgaatttattttcttatggcaaaaacaaaacagaaagagagtactatgaggaagtatcatgctactggtaaatttttcaaactaaaaccgcattacatttcattaaatgagtttatgtccattaagcgtcaatgagcatgagtggttgaacccagaatccagtcaaagtacatattaactttctgtatgactttaaaaagaggtatgtcaacctccctgggtcagcaggttcctttgcagaagacattggaatgaaacgtcaaggacctcttccaattatagaatacctcgagatatgaagttggtaacaaataagagaaatgcagcaagatatttttagttaaaaaagaaaagattgatacaagccagtaacttgcagtgaacttgtttaaatcctcctcctctctccaaattctgtttttaccaagccggtaaagtaaagacagtttgtcatgctttgaacttcctggcttatgttgatttctatcagtatgttgccttacacatttgagtgggagctgagttacataaaactaataaaatccttacaaccccattttctgtgggtactgatagcatccaaaaaataaaaaaggcttttgccattttcaggcagttgttcctccggctagatggaaaattgaatggcattatctcaactcacatgtttaaacattaacggagagacactttctcctcctcaaaagtttttagtgttcccaggaatttaaccacagatagacacaactcctcaaacgtcccgaaaaaaaggttgactattccataaagtaatagttacagaaggctttcaaggaattagttattcacacagtaagcttctgaggcatacgagcatatcctctttcttacaacttggtcacttgatccaatctttgatgatcaccgtgggacctttggagatttatggagtttagggttacaagtatgatgtggccaccatactcagggaactggatgacagtcagccgatgggttttcaacatagatgaggatgagctcataaaaggctaaaaaaggaggcagacacctttggaagactgtttctaggctctcaaatggccattgtcaaaaaacaaacagtggggtggatttgactaagcatcagaagatgctttaacaacagcctgtgacaagtgagcgttaaaagctcacaaggcagaaaggaacttttcagagtgaccttgtcagacgaggttctaatgtgtaggctttatcagctgctctgagtgggggtaaagaggcatgcatattttaaacattcatttcatattcagtgtgtaaagtaactactgcttttcagcttgggtggagaaagtatttatcaagaatcacacaagggaaacccatgcattacctacttatagggcaaaatggaaaatgttctctctcttatgctttatcttttttgttccatcttaatagctctttatttaaaaagtattcacatcagttgattagtctgagtctttcatttgaagcaaactttcttcactttctgcccttgatactgcacatcagtctttaatcacttagacgtactgaatttttctttattcacatctttcaatcggtaaacttgaaattttgcaagtgcattcccactggtgtacattctgattttcaagacctgctacctcccccagtgtcatgcttgttttttttttctttctttcttccttcccacaccccacctccagtattttagggcaccttatgtagataagcagtgagatggcttcatcctgataattaacatgcttgtttgaggttatgaaatatacatttgagaaaggccagggatttccccctgaatatccactaactgcttgaagtggcattttcattctgacttggtattttgttttgtttgactgcagcatactggagcatagtgaaagagtctattttgaagcttcaaacttagtgctgctgcagaccaggaacaagagagaaagagtggatttcagcctgcacggatggtcttgaaacacaaatggtttttggtaagtcatccaaaagacttgacatcttttagctttaaatgtcatcgggcatcacttcactggtgtaccagaacttcttcttcaagcgtattgctatttctctacatcctaaataacaggacatttgaaaaaatgttgtcctagtgacagagcactgagagagcaaccgcatttactttatgtgtttgtttctgaaacttgcagaatagtatgatctgaatagaatgtatttgtggttagaaaaaagaacaaaagcaaaaacaaagcaaacccaaacaactaaacacacaaacagcaaataaactacatctaccagatactccattttagctgaaaacataagggattaatcgcacgagaggaagtagattcaatttaatggcaagttttttgcgtcttgtgatcaaatacagtcatgtgccacataatgaagtttcagtcaacgacagatcacacgtattacagtggtcccataagattataatactgggctgggtgtggtggctcacgcctgtaatcccagcactttgggaggccgaggcgcgcggatcacgaggtcaggagattgagatcatcctggctaacgcggtgaaaccctgtctctactaagaatacaaaaaaaaaattagccgggtgtagtggcgggcgcttgtagtcccagctacttgggaggctgaggcagcagaatggcgtgaacctgggaggcagagcttgcagtgagccgagattgcaccactgcactccagcctgggcgacagagcgagactccatctcaaaaaaaaaaaaaaaaaaaagattataatactgtattttggttgtaccttttctatgtttagatgtgtttagaggcacaaatgcctaccattgtgttacagttgcctacagtattcactacagtagcatgccgtccaggtttgtagcctaggagcaataagctataccgtatagcgcaggcgtgtagtagggtgtaccatccaggcctgtgaaagtactctgtgatgttgcacagtgacaaagtcacctaacaatgcatttctcagagcatatccctgtcattaaatgatgcatgactattgtgatgggcaaggtgaaagatgatgggggtttccaagtcctgttcagcaaacatttactgagtaacttttaagtatacatgggcccttgaatgacagtcttagtctgggggttggaattcaaacactctaaactataaataaatgataaaaccattccagagcatacaccaacataatgtggacttccaggaattttttttttatcaaccccgttcatgatattacctggaagcagagtcctcaaattgaagcctaggtctgccccacctatcttggtcaccttggagaacttgctcatcatcttggaacgacttgcctttaaagatgtatgtgcctaactgatctccaaggtctcctgcaaatttataattcagttccctctagtgcaatgaattaaataattatccacttcagttcttgcccaacagaatttctgtgtaggcttggtggtcatttgcagaggggctcattgtatcaaccagtgtggaggaaaggagccaggtcctcggggggtccctcctggccccatttgcccatttgacagccagccctttggtcaaacaggactgtcagcatctgcagtaaataatttttttgttttttttttttttgagatggagtcttgctctgtcaccaggctggagtgcagtggcacagtctcagttcactgcaacctccacctcccaggttcaagcgattctcctgcctcaacctcccgagtagctgggactacagatgcgtgccaccatgcccagctaatttttgtatttttagtagagctggggtttcaccatgttagccaggatggtctcgatctcctcacctcaggtgatccgcctgcctcagcctcccaaagtgctgggattacagatgtgaaccactgcacccggcccgcagtaaataatttattcccttgcaacattaaaaaaaaatgtggcacagtgctttatgaatattatattcatttttatgtatttaattttaatttatttatttatttatttatttgagacggggtttctttctctttgttgcccaggctggactgcagtggtgcaatcgtagcttgtgctgggaccatatgagactgggactatcctggctgtcattcataaagtcttcactgaatttttaggacttcgctgactggtctctctttatgaacttctgtcacatttagggcctgcatcatataaaatgcactgctatgtgttgttctgttagtgtttgtcatcacgccatcaggggtacacacagcttcagggcaggaatcatcatcacagaccagtagccgagactacaggcacgcgccaccatgcctggctaatttttccatttttttgtagatacgaggtctcgctatgttgtccagactggtctggaactcctgggctccagcaatcatcctgccttggcctctcaaagtgctgggattacaggcatgcaccactgtgcctggcctgaatattatatccaaataagtgagataggcttcttttgaaatactgtcctttgtttttctttaggggatctgactttttccttctctgtgcttgccgtcattgtgttactggttaccggccagcctgttaaccctgtggatccccacactttgttttacgttgaatagcatttattattgttctttcttactaaacatcccctttctgaagcagagcttcagaaatgatgctcagatgtcactcttgttagcagctggctttctgccttcaagtgatgcattattggggtttcataacagcatttttttttctcttacaaatattaaattatgaagtgcaggaaaccacatgaatgtggtagaaagcaaatgcaaacacagtgttatctggaagtgctagttttgtgattctcctggtgacagtatccttcctgtaatcaacataggaaccctctttacctgtttgctggtggttttctatcctgtatcttcctctccatttatgctgtatgccatggccactttgtcatgctgaatcgggaggtttgattaagacagttgcttggggactatctctatcaaagttctgcctcaccacaaatcctggctgtcacttacaaagtcttccctgaatcctcaggacttcactgactggtctctctctctctctctttttttttttttttttttttttttaaggcagagtcttgggtctgttgctaggctggagtgcagtggcaatcttggctcactgcaaccttcgcctcccaggttcaagcaattctcttgcctcagcctcctgagtagctgggattacaggcatgcgccaccgtgcccagctaatttttctatttttagtagaaatggggtttcaccatgttggccaggatggtcttgatctcttgatctcatgatccatctgccttggccttccaaagtgctgagattacaggtgtaagccactgcgcccggccctgagcagtctctctttatgaacttctatcacatttagggcctgcttcttacagaatgtactgctgtgcattactctgtgagtgtttgccatcagcacaattgcacatgggttgcacatggcttcaaggcaggaatcaaatcacagaccagtgtttcccaagggtggtctaatcccagtacctcctgcttccgaatctcttggatatgtttattaaagttgcagattcagcaacaccaggcttatgaatcagaagttctggggatgtagaacccaggaaactcaccttagttaacttttgcacactgaggtttgagaataactatctgaaaataattgtgcatcctcctctttgcctcctctcccacagcaaagggtccaggtctgagcctatggtaggtgtccaggaaatatttgcttgttgacctaagcaacatcaagccatgagggttgcattccctcttcagttgccaagctttttcaggatgtgaggtcagcatattctctgaacctttagaaacccactttcttccaaatacgtaaagtgttcccctagggcagaggctcttttggaaatctttttttgtctctttatcttttgtaatcactaactctgttggtggtaatgacaggagcccctgactaagattgggatagtggggacatcagctatgaggagctgggctggagcagcaggctaggagaaagatctgaggataggaaccggactgtgctaaactagaagctttatccttggctcccaaagccacacctgctacccttggcagtttattctgagtggtatttctttcagctgttaggcctcgcaggttgtcagttttggtggcagaagagcggtcccgctgctgaaaaggatcaagtttagctctagtggacgcacatcaaagcacctacagtgcacagtggtggattcaggatttgaatccaatgttagcagactgcagtggtgacacttggccctctccttccgtccgcctcttgttccagcaagggcatgcctggtcttggatgatccaggagagatttgcagggcgttgctgcttctggtgcacctcctgaatgcccttgctggtggctccagccctggtagatggaatccaaacagaagaactcacagaagcttagctagcctagaaaggaaccagcgtggccatcaggacatttattagctgttaatctaaccactaccaaatgcattaacacattttttttgacaactttttctcttttatttggctgttgcttagttcagttttgcttggagaagttgtggcaatcctgaattcagtttgtgtgaaaaagcaagcaccttcaagcccagtgttggagaagtatcttctcccaggtctctattcagttttgactaaaggaggtttggcgagcagaaaggtattaccgagtggattcttctcaaattctcatctaagtgaaggaaaaaagcccagtttgctgaagccatgttaagggcacattaggcttttaatatgtgcttcatggagaccttactagattttcctctgcgtagttctttccatctgatgggagcgagggctgtttttgggttgcagaaggcaagagccaggttgtcagctacagaagagaaaggtgccattgtctgcataattgactttgagcctttgtctaaaaggatgtcaggtggaggagtaatgaggggcgagatttttaaaaaattatagagtacaggattttagcaaaatgccagatgttggcatttctgttttggaggtctttagtggtccatgtaaactatttccttgcaagtaaccatccatggtaggaaaacagaaaaaaatgattctaaaagagcatttgtctagttagaaactgtgtcacttgtatcgtttaccgtgaggcatccttgagaggtacatgatttccaaacagccacctaaatcataggtactgcttttggaacagatgtaaataggaaaagcgccagtccagtacccccactaaagaccatcgttagaaagctctcgcagtgctttccagcttagaggagtgtagttcccttcaggtacttaagccagtgttcggtaaagcagcacccaaaatgccttttgttaaatgtgttctaactcgttcctcttgctgatgctatcacaggctaatgattgtctaagtccttcagagaagctgtgtggttttgtatagctgtgagtaaaaccacacccattcaggaaatgcaatgtactttcttctaacaggcatcatcaaaacagatgctgatttacatggtaggtccccttctttagtgacaatttgagagctttgaagggaggcatttgccgtgcatcagaagaaatcagaattaaactggcacacgtgcacattgttggagtaaaaaggaaaagcagtgacctagagtttgttaccgcacatgctttccctgaaggcatctgcaccatcatgatgtcctcatcaactctgcacacacaactagtatttctgtctctttctcttcagagtttaagctcaatgatttccaacttcctcccacatgactccagctggatatcacataggtgtcttcaatttgaatctaaacctgactttgtcattgtcctacgtttatgggctccagggtcactagctcaccatttgttgatgctggacacctcctcttcctctgcttcatccctagctcatatgctggagttctgccttttttttttttttgagacagagtctctctctgtcacccacgctggagtgcagtggcaccatctcagcttactgcaacctctgcttcccaggttcaagggattctcctgcctcagcctcctgagtagcttggattacaggtgcgcaccaccacacctggctaattttttgtatttttggtagagatggggtttcaccatgttggtcaggttggtctcaaactcctgacctcatgatccgcctgcctaagcctcccaaagtgttgggattacaggcgtgagccactgcccccagtctgagtttggcctctttaatatgatagtttacccactcttctccactctcgggcccctgttctgttgcagaccttcagcatcacttgcctggactgctgcagtggcttccaagaagccccttgcttaaagtcttttctttctgtgttccatttattctactcttttgagaattctcatatgaaagaaagggtctgattgaattactcctacacttgaaaatccttggtagtatgtggaaatatggaaaagtactcataatctaatgtgttaaaagaaaaactttagacaaattaaatttaacagagtttaattcagcaaagaactatttgcaaatcaggcagctcctctctactcctttcctcccgaactagaatagattcagggcatttctgacatgctgttgtgtggttggagaggatttatagacagaaaaaggaaaacgacggacagaaaacagaagtgaggtacagaaacagccagattggtttcagctcagcgttcgccttatttgaacagggtttgaacgataggctgcctgtgattcgccgaaacccagagattggtacaagaataggttacagcctgtttacacatccaggtaggttacggttcactgcatgcggagaaacctttaggccaaacttaaaatatggaagaaggcagctttcggctaaacccaacaaatgttaagtataaaattcatatttcaaaattgtgcaaacacattgattacaaagcagtgacaaaaatctatgcctatccacaaaggctagaagtaaagaaaacaagaatgaaggtatttttaatattagggcaattcatgtgtgtgtgtgttttttaatactcctttggtagcaaatgaatatggtgaagtaaaatgaataattgaaaggattttgttagctttctgctcctgataaggtaaaatgtgaatttcactgcatggcctctaaggcccctaggaattccttatcaacttaccatttaaatctcatctcccgtgactcccatcccttccatctctccatataatatttgttttcttcttaaacatactatgtatataataaccatgcacctgtccctgttgtttcttctcgcatgagactcttgttctctgcctggtaaactcccactcattcgttgaggcctaattgaaattcctggccaagcatggtgtctcacatctgtaatgtcagcattttgagaggctgagggaagaggatttcttgagcccagaaagtttagactgcaccattccactccagcctgggcaacagatagagagctcgtctcaaggaaaaaaaaaaacaaaacagaaattatcctcttgctgtgttaccgctattatattgcaattttctgctcatatagctatcttggtaaatgattcatgaagacagaaattgacttatcttaaaccttgtattccaagtgttaagcccattcctgcatataatacagtttaataaatatttacaaaggtaagaagaaaggaaagagcccatttagaaatacagaaataatccttcaggtaagatattaaaaatgtttttggataagcttagtactaattactatttcataaaaattacaaaaatagatgtttttggttaaacagtttttacagtaatagttggattcagcctcacatcatttaaactaaactactggcgtatatctttggcattagaaaattctaacatcagatagaattgcttcagcttcactgtaagccatatttatgaagttactaaaaaccatttttttaaactgttttatgtcatgcataaccatgtcggccaaatcagaaatccaaataaatgacacatccagttctggccacattttgtgaatatctggtatttttttcttaagggaatttaaaaagactgggtaacattaaagggttgatgtaacattttcaattctgaaaggctactctgctctaggaatatacttgttactattttttttttcatttctaagaattctgtttggctaaaataccaaaagagaaaaaaataacttggcttaaataaaatgaaaagtcatctccaaaattaattcggctcctcaaaagttctttccaaaggaaggaataggatgctatttaatattacatgtcaaaaacaccactaaaaagaaaatcatcatttgtacgtgtgacaaggaattcagaatggaattttatgaaggctagtgtgtgaggcacgctgctcacatcttttaaaataatattttgatatcggggaagattatttaatactatatattattttatattatatatgtatgcatatgtgtatatacatatataaaatagagttttttcctattaatgctttagagtcaataagttgtaatggggaatttcagtttgagatttgtcattttttttgcatgatagccttgcccagccttcagttttcttgtttataaagtcatgccaaaaggtgaactgtcactggattaactaattaagaaattagtcagtcactaacatttattgattgaccactgattggaaacattaaatacccacatcattttttagcatttcatgtaagttgatccttgtctgttttgcagagtaaagaaccttagctgaatttcatttttgtctgtcctgatctttgcattcatttaaaaacctgacccttcagctgtttacaagatccatcatgaaatataccatggctaaggtgaatgtgcagactcccagtttccctttagctattctgttgcactagccatggggttgcaaacttttttggtgactgttacagttcattcatcaggaggtactgactatattttgttgcactttcatgagagccagggctcagaagcatcctaagtacctagtgacaaaaactcaggaaggcaattagactatgacgcttttcattacaacctaaggtgcctctcaatatagtaggtgcttatgttgaactgccctctgcagactgtatgtgtgggtccatgtggtgatattgtggctgtaccctctccaaggttgcctagtgttggctgtagcaggaaaggaagtgtctgtaagcaatagtagcttcaatgaggaaggatataaaagagaagtgaactagtcctgaaatcttaaggatctacatacagaccagagtaccttgatggatcccaaagttttattttattttattttgtttttgagatggagtttcgttcttgttgcccaggctggagtgcaatagcgcaatttcggctcactgcagcctccgcctcctgggttcaagagatcttctgcctcagcctcccaagtagctgggattacaggcacctgccactacacccagataatttttgtatttttagtagagagggggtctcaccgtattggccaggatggcctcaaactcctgacctcagatgatccacccgtctcagcctcccaaagtgctgggattacaggcgtgagccactgcgcccggccttattttatttttccagcattattgagttatgattgacaaaatttgtgtacaacacgatgctttgatatacatatatattgtgaaatgtttattatcatcaagttagttaacactttcatcacctcacatagttattttttcttgcatggtgagaacatttaagatttactgtctcagcaaatttcaagtgtacaaatatcattattaaccatagtcactgtgctgtatattcaatccccagatctcaaagatttaaaatctagccctgagacaactgattacagccaccatatgttttcttaggtagttcacaataaatagttataatgctgctgagaaacagtatgatgtgttgaaaagtgtaggttcttgaggcaaacttcctgggtttgaataccgaacttccacttaatggctgtgtaatgttgagcaagtgacttaatctctttgggtctcagtttatcaatccatgaaataagaaaaataaaacaggccaggcacggtggctcacgcctgtaatcccagcactttgggaggccatggtgggtggatcacaaggtcaggggttaagaccaccctggccaatatggtgaaaccccatctctactaaaaatataaaaattagccgggcgtggtggcaggtgcctgtagtcccagctacttgggcgtctgagacaggagaattgcttgaacctgggaggtggaggttgcagtgagccgagatggtgccactgcattccagcctgggtgacagagcgagacttcttctcaaaaaaaacaaaacaaacaaacaaacaaacaaaaaaacctaaatgagtcttgatgcacgtaaagctttcaaaaaatggtagctgttattatcataccactttcatggaatttcgttagttactcagtttgtggtaaaatttttccagtgtttattcttcatgccttcctacaaacttggtttaggaatttacactgttaggggaaacatgtaggtgaacccagctagggaaggcgaagcaatgctgtgggaacacaaaggagtgggatatttagtctgatttgggagtggtgaggacttggaggaagcatcagagctgacttggaagaatggctaggattccacctgacagagctgggagcaaggcattccacacgggagggcgtgtgcccaaaggtgtggagaagggagagtgcagagcagagcatatttgaggaaagctgtggaccagtttgagcccagggttaaggtgtgtgaggtggaacagtgggagactgggaggaagatagtctgatttaatgataatgatgataacggtgagtgtgaactattcactgagtggtgccatatatcagattctgtggttggggctttacataaattagctctgattacaactcccttcaacatagctatccacattttacagatgagaaaatgggattaattccattttttcttaagtggcggagagccactgaaggttgttgaataggagagggtcatgatcactcttagcaggaatttacttatctgctttttcacttccctggagtggtagacacgtcttttgttttgtttaagagacagagtcttgctctgtcacccaggctgagtacagtggtatcatcatagctcactgcatccttgacctcctgagcccaggtgatcctcccaccccaacttcccagagctctggaattagaggcatgtgccaccacacctggctcatttttaattttttttttgtagagatggattcttgctatgttacccaggctgttctggagccctgtgttccagcaattctcctgctttggcctctcagagtgctgggattatgggcatgtgccaccacacatagccttggagatacatcttgcaccatcctgggctccccagaggagtggtattagactgtcagtatggtgaatactccataaatactggtggagtctgttttcaaagcttccttaacaaaactctggaaacatgttttgtacaatttcctttttaaagaagaaataaactggttaagttactgagcaactcctttttgcctgtgcatgtttcatctcatttgatccccataggaaatcttaaaggtagagagtgtaatttttgcatttcaattatatgttattaatattataatggatgaggtcactgggactgaagaaagtaatgctgcttggagatggtaaagctgggattcaatctgtggctccctcacccttggtctgtagtcggccaccacccctccctctattgaacctctcttttattgctgttttccagtctccactaagtatttcttccactggtttaagtccacgttgctaagcaagtacacagttgcttttaaggaaacgaaagccccacaaggacccagtctactttgcagaggttaaatggaaatagattattttcaataatctgtcctcaggaccagaattcttctaaatgatgctgctggcagctggccatctctgggagcccatcagacaaaccacttgtaggagcccagcatcctgcattgggtcagaatgcaaagtcaactaactcttcacagtagatgcagtttgggcgtgagtacctagcaggaaccctagatatttggggcaagcactttgcttcttccatctggtggaacccacgtttattatctaaaagacacatggcaacaggcaatgcagtgtttgcttccaaagacagcctggaatttggaatgacatttagtgaaaggggaaagttcaatttcagctatcaaaggtcatggccagtgaacctacaagcacatattatgtaaatttggcccaaatctgtatttattagcttgaacagttttggagtggttatctgctctacaaaaatgatctaccgttaagagtctcaaaaatatcaagtctgcttgatgcatttaaatcaggaagcgtaaatatttggcatccatgctagtgctgattttcagaggctttgctcacctgcagctgtgctcactttgcgaaaatggacatggtgacctctactttcctggtgagtggccacgtcagtatcatcccttcccgttcctggcaccactctcacccactttggagagccagcatagagcagcacgctgtgtctcagggaccaggctatccatcagataccctactctgaaagtgtccttaatttgatttttaaaatatatataaatatatagtgtgtgtgtatacacacacacacacacacacacaccataaaatttaccataaatttaccattttaacctttttttttttttttttgaaacggagtcttgctctgtcgccaggctggagtgcagtggcatgatctcagctcactgcagcctccgcctcctgggttcaagcaattctcctgcctcggcctcccgagtagctgggactacaggcgcatgccgccacgcccagggaatttttgtatttttagtagagatggggtttcaccatgttggccaggatggtctcgatctcttgacctcgtgatctgcccgcctcagcctcccaaagtgctggggcgtgagccaccacacctggcccagtttaaccatttttaagtgtacaattcagtggcattatgtacatttccagtgtagtgcaatcatctccactatccatttccagaactttttcatcatcccgaacagaagctctgcattcattagacaataacactccattctctcctcccagcccctggtaacctctattgtacactgtgtctctatgaagtttcttattttagggaccacatggaatcatacaatatttgtccttttatgtctggcccataatttaatttttaataacagtgtttcaaatatactgttcttttccaaagtatttgttatcaatactttattatgtcagtaattatcaataagttctcattctaatttcagaaactgggttgtattggaatatgggcatagagaagatacagatttttttttcttcttaataactgaagagaataacatttatcaaacaaacgatcgaactctttctgagacatagtttcatgtgcctctttggagttgatttcccctcactttattttaactcctatttggcccgaattcttctcagaatttctgcaagcaggctcatagtcctgcgttcttctcttctctttttttttttttttttttttggcagggtctcactcttgtctcccaggctggagtgcagtggtgcaatctcagctcactgcagcctcgacctccgggcctcaagtgatcttcctgcctcagcctcccaagtagctgagattacatgtgtgcacgacaacacctggctaatttttgtattttttgtagagacgaggtttcatcatgttgcccaggcttgtcttaaactcctgggctcaagcagtctacccgtcttggcctctcaaagtgctggaattacaggcgtgagccaccgcagctggccaggcttacatttctgtagtgcctgttaggaagagttcagaattttttagacacaggcatagctcagagatattgtgtcttttttttttttttttgagttgggagtcttgctttgttgccaggctggagtgcagtggcacgatctctgctcactgcaagctccgcctcctgggttcaagcctcccaagtagctgggactataggtgcctgccaccatgcccagctaatttttgtatttttagtagagatggggtttcaccatattggtgaggctggtctcgaactcctgaccccaggtgatccacccacctcagcctcccaaagtgctgggattacaggcatgagccactgtgcctggacactcagagatattttgggttcacttatagaccacagcagtaaagcaagtattgcaatacagcaaatcacacaaattttttggttttccagtgcatataagttatgtttacaccatactatagtctattaattatccaataacattttgtctaaacaaaagtacataccttaattttaaaatgctttattgctaaaaactgttaacgatcatcttcattgaaccataatcgttttgttggtaaagggtctttacgttgatggctgctgactgatttagggaggtggttgctgaaagctggggtggcggtggcaatttcttaaaattagacaacaatgacgtttgccacatttattgactcttcctttcatgaaagatttctctgtagtatgcaccattgtttgagagcattttacccatagtagaactttcaaagttagagtcagtcctctcaaacctgtcactgcatcaattaagtttatgtaatatttcaaatcctttgttgtcattttaacagtgttcacagtatcttcatcaggagtagattacatctcatgaaaccactggtttttttgtttgtttgtttgtttgttttgagacggagtctcgttctgtcacccaggctggagtgcagtggcgcgatctcggctcactgcaacctccacctcccaggttcaaacaattctcctgcctcagcctcctgagtagctgggactacaggtgcgcaccaccacgctgggctaattttttgtatttttagtagagatgggtttcacaatgttagctgtgttagccaggatggcctctatctccggaccttgtgattcccctgcctcggcctcccaaagtgctgagattacaagcgtgagccactgtgcccggccatgaaaccactttctttgctcctccatagaggcaactcctcatctgctgaagtttgatcatgagattgcagcaatcaattcagtcacattttcaggctccatttctaattctggttctcttgctgtttccacctcatctgcagttccttcctccaccgaagtcttgaaaccctcaagtcatccatgggggttggaatcaacttcttccaaactgatgttcatgttgatattttgacctcttcccatgaatcaaatgttcttaatgacatctacaatggtgaatcctttccaggaggttttcaatttacttttcccagatccatcagaggaattactttctgtggcaatgatagccttacagaatgtatttcttaaataagaagacttgaaaataaaaattactccttgatccatgggttgcagaatgggtgttgtgttagcaggcgtgaaaacgacatgaatctccttgtatatttccatcagagctcttagatgagtgacgaagtgcattgtcaataagcagtaatattttgaaaggaatctttttctgagcaattaagtctcaacagtgggcttaaagtatttagtaacccaatgtgctttcatccaggctttgttgttccatttctatagcactggcagagtagattcagcataattattagggctctaggatttttggaatggtaaatgagcattggcttcaactaaagtcactagctgcatttgcccgtaacaagagagtcagcctctcctttgaagctttgtagtcaagcattgacttctcctctctagctatgaaagtcttaaatggcattttcttccaatagaaggctgctttgcctacgttgaaaaatctgtagtcaccttcatcaatgatcttagttaaattttctggataacctgctgcagcttctacatcagcatttggagaagatttctttccttaaatctcacgaaccaacttctgctagcttcaaacttttcttctccaagttcctcacctctctcagccttcatagaagtgaagagagttagggccttgatctggattaggctttggcttaagggaatgtatggctggtttgcttttctattcagaccactctaactttgtccatatcagcaacaaggctgtttcactttcttaccattgatgagttcactggagtagcacttttaattttcttcaagaacttttccttagcattcacagcttggctaacccttcagtcacaagaagcctggcttttgacatatgtcagctttcaacatgccttcctcgctaagcttaatcatttctagttttcttatttaaattgagaggtatgtgactcactcttcctttcacttgaatgcttagcggctattttagggttattaattggcctaatttcaatattcttttttttttttcttttttgagacagagtctcgctctgtcacccaggcttgagtgcagtggcacgatctctgcttactgcaagctccgcctcccgggttcacgccattctcctgcctcagcctcccgaatagctgagactacaggcacccgccactacgtccggctaactttttgtatttttagtagagattgagtttcaccatgttagccaggatggtcttgatctcctgaactcgtgatctgcccaccttggcctcccaaagtgctgggattacaggcgtgagcccccgtgcctggccaacttcaatattcttgtgtctgaggaaacaaggaggcccgagaggagggagagagaacagccagtctttgtagcagtcagaacacacatgacatttactgattaagttcattaccttatatggggtgtgtggttcatggtgaacaaaacaattataatagtaacgtcaaagagcactgatctcagatcaccataacagatataacagcgcaaaagtttgaaatactgtattaccgaaatgtggcagaggctcaacatgagcacatgctgttggagaggtgatgctggtggagttgcttgacacggggttgccacagaacttcaatttgaaaaaaaaatgcagtatctgcaaaggacaacaaagtgaaatgcaataaaatgagatgcgcctgttgcatctttcaactgatgtgtcctttcttttcattaaaaaaaaataacgttctgtccatctgcctctgtccaacaacaggcagtcacatgtgatgcctactgttggagaattggtgaatcataggcctccacttctggtgctattactcagagaagaagtatttctttctgcatagaaggaaacattgtaattttactgcagcaatgaaattgtagtagaggtgaacataattcttctatttacatctttaatgagccacaattaaaagtagtgagttggcatgtcagagtgaatgtgttattttcagatttctgttagaacaatggctgctgctggttgaagctgcacttccctggccccttggagctccaaaagccttaagaaagaaacccaggggccgggcgcaatggctcaggcctgtaatcccagcaccttgggaagctgaggcaggcgaatcacctgaggttgggagttcaagaaccagcctgaccaacatggagaaaccccatctctactaaaaatacaaaattagccgggtgtggtggggcatgcctgtaatcccagctacttaggcggctgaggcaggagaatcgcttgaacctaggaggtggaggttgcggtgagcctgtgtctggagttggttccttccgataggtttgtggtcttgctgacttcaagaatggagccacggaccttcacagtgagtgttacagctcttaaagatggtagggacccaaagagcgagcagtagcaagatttattgtgaggagcgaaagaacaaaccttccacagcgtggaaggggacccgagcgggttgtctctgctggctggcgtggccagcttttattcccttatttgtccctgcccatgtcctgctgattggtccattctacagagcactgattggtccattttacagagtgctgattggtccattttacaaacctcaagctagctacagagcgctgattggtgtgtttttacagagcactcattggtgcattttacaatccccttgtaagacagaaaagttctccaagtccccactcgacccaagaagtccagctggcttcacctctcaataccacttctgcatttaattatagccaccgactagctgcactatgatattaatctgggctacttgcttaggaacctgcagatgggtttccataagctagacattgctgcctgataaatgactgtgggatacaggttttcctgatgaggtagtaaagccacatattggaattcatttaacagctcgacaacataatttgtaaacatttctatttagtcacgtgtactcagcaaaaatgtatactaaagtgtttaccatatacttggcattgaagggaattataatgaaatatgttgatcttggtcatttataggtgttcccaccactgtgatgtgtgcatgcattgtgggccaggaggttttatctggaagctagtgacacttcagcgtcaaggcgtctcgctcctgcaggccctttgtaagaccctgtacctaattttatgttgataattttgtgcagtttttttttttttttttttttttgaggcagcgtctagctctgtcatccaggctggattgcagtgttgtgatcttggctcactgcagcctcaacctcccaggctcaagtgatcctcccacctgagccttctgagtagctgtgagcagatacatatgccaccatgctcagctaatttttgtatttttttgtagagatgggggtctcactatgttgcccagttttgtcttgaactcctgggctcaagcgatcctccacttcagcctcccaaagttctgggattacaggcgtgagtgaccatggctggcctttgagatcttttcttaaagaccctaacaccccatacacactcctctaccccttgactagttttataaactgcagacctcacagactggatccacccctgattatgaatatgtttaaactgtgcatatgtatgcattaattaaaacatatttatttctctttcatactagtatgtgaaattccaaaaaatctgctagcccacaaattaggaaaattaaagggctatgcctacctctgccagctgtttccaaggaaatttatatcttggacatttggcagataataatatcatgtttgactgatagtgatcatgtcctaaatttcccaaactgatgagtcacaatcgtgattcacatatttctgggaatcgccccccaacaacttgcgatttgcctggcgtagctgtagtatatcagagttttttaggtgtttagcagaactgaactatatagcttcttgtcccatgccaattcaagaaaattaatttaatagctattttatgaaacattttttcctaactcgacatggatattttaaggtgattttccctgctaagaattcacttgttataggtgactctaattggagaaacagctgttgacttctagtgtgctcaattagtttctttcttcctttttctttttttattttattttatttattttttattatactttaagttctagggtacatgtgcacaatgtgcaggtttgttacatatgtatacatgtatcatgttggtgtgctgcacccattaactcatcatttacattaggtatatctcctaaagctttccctcccccctccccccactccatgacaggccccggtgtgcgatgttccccttcctgtgaccaagtgttctcattgttcaattcccacctatgagtgagaacatgcggtgtttggttttttgtccttgcgataatttgctgagaatgatggtttccagcttcatccatgtcccaacaaaggacatgaactcatccttttttatggctacatagtattccatggtgtatatgtgccacattttcttaatccagtctatcattgatggacatttgggttggttccaagtctttgctattgtgaatagtgccgcaataaacatacgtgcgcatgtgcctttatagcagcatgatttataatcctttgggtatatccccagtaatgggatggctgggtcaaatggtatttctagttctagatccttgaggaatcgccacactgtcttccacaatggttgaactagtttgcaggcccaccaacagtgtaaaagtgttcctatttctccactttcttcctttttcaaagagttcctttattattcccaggccgtcgttaggtgtaaaagctaatttagtttagattattttttaaagtgcacctggcattcaagctatgacatttcctgttgaaacagcactgctatgacctgggaagaaaagatcccaagaaaatataactgaggaatcaaatatttgtctgtataaaaggtttcatattaattcatgataccatttattagtcacttaccttttatgttagtagccataaggaggtgtgatggcatagactattcagggcgaatgacagttgtcatgggcagaaggtgcccatgcatcaggcagagcagggtgaccacaaagtggggagtggccaaatatactttgtcctactcaagacatgagggcctgtcccagtggcttgcttgagaacaaagctcatcctgatgactcagcagccacagtgaagggctgcctgggggctgggggagaaacaagtaggcagatgaggtccagttggaaactaaattgctttgggaggaggagagtggtcacacaatgtaggtttcagttccggctgcactgctaattttgtaaccttgggaaagttaccaacctctctggaatctcagtttcctcccctatgaagaagaaagcagtagcccagatcatccttggaggttccttcccttcagctgtgacattttgcatttgaaagagtaagagaagtcacaggaccatgggaaaggaaaacagaaatgatgtaagggaggcaggtcatggggagggtggtcaggaacacaggttggaagtgcccgtggtgtcaattcaggtgttcggtgatctccacgggcgagtgacttttattgggagaactgtgcactgcctgaggttagggttgtgctctggggaaaccggaaccttgaaaacaccttgtagggagccgcgtttcccttgcacggactgtgctgcctgtgcttccccagcacagtgggcgtcgtcgctttgtgtttgtgctggctgctgtgcggggttgcctgcctccccagcccacacctgctcagccttcctccactcatgttttcaggatgcttttggatgcttctggctacagtggattttccttctccttctgaagcccttttgaaattatttctctgcagattcagacatatttatttatctggtcaatgtcctgcctaaagaatcagataacgactgtgtttttgcctgaactcacacatatgaatgagcttttgtaagcggcagcagcagtgtaggtttagttggagctgtctgagcccttgtcaggttgctacttagttgtttagttagctctcgttgaacttctgtcacatcctcagtttctgggcagtgtgtaagaagagctccttctctctagaccagtggtccctaacctttttggcaccagggactggtttcatggaagacagtttttccacagactagggtggagcgggggatggttttgggatgattcaaatgcatttatattcattgtgcactttatttatattattatgttgtaatatataatgaaataattatgcaactcaccataatgtagaatcagtgagatccttgagcttgttttcctgcaacaaaacggtcccatctaggggtgatgggagacagtgacagatcatcaggcattagattctcataaagagggtgcaacctacatccctcacatgtgcagttcacaatagggttcacgctcctatgagaatctcatgccgttgctgacctgacaggaggcagagctcaggtggtaatttgaacaatggggagtggctgtaaatacagatgaagctttgctcattcgcctactgctcacctcctgttgtgcaggaggtctgtagcccaggggttgggaacccctgctctagagcttaataatcaactggtggagaccagtgcaattgtaaacaaaagtgacaaaacgatagtaataatgccaatggtaatgaaagctacagacattttcagagtgctgtgtctccaagtactgagctgagcactctgcactcatgaaatatgtatcctcctcacacacacacacgcaaaataaatgtttaatggaatattgatcaggaaaaaaacaaccagtaagcaaagtattaatacatgctacaacatagatgaacctcaaaacatcatgtgaattgagagaccacatacttcaatttcatttatatgaaaggtccagaatagacaaatccatagagacagaagttagtttgggggttgcagaggccggaggtgggagaggaatgcagagtgactgctaatgtacacagggtttcttttttggagaagaaaatctaaaattagattgtgatgttggttttacaaaacagtgactatactaaaaaacatttgagttatacacttgagttatatgtaaattaaatcttaataaagctgtttttttaaaaataaatgtttaattctcagaaacaaccctatgaggtagggagtattatcctcctacagatgagaaaaccgaggcccagaaaagaggagaacctgctcaagattacatataaggcatatgtaggattaactttttcattacagagaaatccatggtagtgcttgctaagtaaatgctaaatctattgattgcatggatgccagaactagatggggttagtttagatggattaagggaggaagtggtttaaactgtgttttctaagaagaaagagtagtgattgtataaagaagacaaaagggcatttcaagctggagataattgcttgtgagagttaaacatcaagaaaccagacatctaataggtttgttcaactggagtgaagaatagcctttcatatgacaggtaggtaatcagaagcaagtgaatttagagttatattgttagctgtagtgcgggcttgctgtaattagtagcaggccgacaccttgtaacatctctctggagtgtaaagacatatttctaacagaaatgtgttagtctgcaaagcaaataaggtgcaagcgtaaatgtcctttttccttggactgtctttaccgaatgacatgagcttcacacccttgccttgagctgtcactatcattgcttcactttctattaattagctcggagccttggttctatagtcaacttgaaactgctctggacatatttgctctaatcctcctggacaacctgtgagatgtgccttttcctacacttctgccttgccctggcagccacatgacacactctcgcaaggcaggaacctcagggaggggaggtggcggtgtctgttggcaagtactcagctccctttgaggctgcagatagtaggcattggttaagagtttaaacttgggcaagaactggaagcaaattgggaggacctggaattgtgggtgcttggggaaaaacattacaatgaggactcatatgggtcgtgtggtcatgtttgtttcaagggctttcccttccaaaactggaaaagaaaactgataaaacaaacattgggtggcatttttttctaggcttgtcaatgggtgacttgtttgccgaattaattaaataattaattaattaccttgtttataatcttccttgttttgaaaagatttatggcagtgccttaaatctgtaaatctacccaacaagagaatcttatgaagtaaacaagttaacaggtgaaacatgcctccttttaaatgtttctttataacaaaatgaccatatatcaataacagactgtaacaatgcgtagcaaatgtatttatgtttctcatctattttccactttcaaaaatgtgcttttcccttaaactccaaattgtcttaacaatttcacattttcatttctttcttttcttttttttttttttgaggcggagttttgctcttgttgcccaggctagagagcaatgacgtgatcttggctcactgcaacctccacctcccaggttcaagcgattctcctgtctcagcctcccaagtagctgggattacaggcgcatgccaccacacccggctaatttttttgtgttattagtagcgacgaggtctcgaactccagacctcaggtgatccattcacctctgcctcctaaagtgctgggactacagatgtgagcctggcccaatttcacattttctaggttctgtagaggttcatgtttgtggcatggtaattcttgttttttgcattttttttttcttaacccccctcctggcttttggagcactataaacttagcactggtggggccacatcttgacagcgagacccttacagcccccaaccccgcatcccagtggggcttcatgatctggccctgctgtgctggtggcatggccccctcggggcttaagtgattctgggtcattgacaagaatcttgcctgtgtgaattcaaatcaaaactttggagagcaaagattcagtgttttccttctgcctaacaatctcatggaaagcacagtggtacctagcatttagctcatgtgttcatttagcaggctctaagtcatcttgtcacatgtcatcctcatgtcagctctgtgtggtgttgtcgacccacgagcaaacgttgcaaggtcccctttagggtgacaaggctgattcaggatgtgtctcactgccccaggaaggatgcctctaacatgcggaacatggtgccagtggctgaggggattagttggggaagaagagtgaatagggaaaggaggttgttacatgatccacccctcactggccagagaggaaaaggaaggcatctcattaagagcattagctgtagcctctcatttaaacctcctcactaccccatgaagtaagcattattgcttttgttttacaggtggtgtgagacaaaagtgaaggaatgagactaattaataataagaatccatgccccaccatagctacgatgcagtggagcatggattctaaaccagctctaacatcacatgccctattttcgagcactagtggcttatttctgagctcttctcttcctctttcctgttgatgcttgagttttagttatatcatggcaaattgaaaaattcttcaaaaaacatacagaggaaataaagtggtgggatctgaaacaaaactcttattgattagccattctaatgaagatttgtggctgagatgggagttttgcaatcaccttgggatttcagaaccctgcttttaataattagaactaaagaagggagagtcctatagaagtgtgggtcataaaaccaaggatgtgaatgaggagtggcaagacaggtatcctggagactttatttcagtgagacttctggggcagagttgggactgatgggggacaagtcagctttggaatgatacagaatttttggctgtgacacctgtgtgattttagtgctttgcaccatatcaagagctgagcagagtgtggcaccaatattcaagggactcaaggggcaaatataggtgtcagtgagtgaaagcagatagcgagatttgcaatgcagtgtccaggagtgtccatctttctagacccatttctacttataagatcactgcataccctgtgaaacattatattcatgaagccacagagtttgagccactgtgtttacgctgcaagtggaaggagagtgggcatggagtcagaaagactcaagttcaaatccagcctccataatttatcgtctttaagaccctgggaaagttgacctaagcctctgttttctcagctttaaaacatgaataataatcctgcctcacaggactgctgcacatacggcagtcagcgcagtgccaggcacacacgagtgtcttattagttattattattatcaacaaagagcataggtgatccttcttatcatgattataaaaactgtggcttaccaatgaaagggtccttcataagccaacaaagagacatccctgaaattttcactatagcagaaatgcaaattattactgggtacatttctggcagacacatgagccatttacataatgaaacctctctaatattatttctattaatagcaatacttctgagtatcaatctgaccattttgtatttagaatcattctctctgtgaacagattccttttattgccatgtcgtcttaatatcttctgacaagtatcattatctctttgctgcatattctaatgtttatgattgcatgagttttaaagtgttcatttactacctgagaacctccattttaataatgcattgctttaatgttggtgtttgggaggtaaggttgttgcttattttctcagatgccgattcacagttgagcagatgatgacttgcaggaggctctcttgacctgtcatgctctgatatcatcaatgcattggagtggtcacttctgttagcttttcctccatgaatcccctgttgatcagcccactaagtgactcagcatatgtctgtgcacacctttggaccacattatcatccactcacttaggcccttgaatttttttatgggtatgtgggctatattgctaagtgataaggctggttctgtaaatggacctcgcaacttcagcataacaacggtatggctagtgtcctcctctaggagggactccccttgagggcagatacaggtttttcctgtttgcctcaagagagtcatacaatgcagaagtgcccaagtgaatgttgggtgaatcagtgagtgtaagagggcacccaagggaatgcccacagttggaaggaagttgcctgagaggaggagtcctcagacccattctagctttgtgattctgcccgtacagacatgatttatatgacaggaaaaacatggcaggcccttgggaagcattttcatcttaacctttataatatctaataaatgggcaagatgttaaaaaaaattgccctttccagaagaaggttatacagactctaagaaggcaacattaagaaatttttgaatttttttttttttgagatggagttttgcttttgttgcccaggctggagtgcagtggtgtgatctcggctcactgcaacctctgcctcctgggttcaagcgattctcctgcctcagcctcccaagtagctgggattacaggcgcacaccaccacgtccagctagttttttgtatttttagtagagacagggtttcatcatgttggccaggatggtctcgaactcctgacctcaggggatccacccacttcagcctcccaaagtgcagggattacaggcatgagccaccttgcctggccgaaatatatatatttttaaaaaggttattttcatcccagcactttgaaaggccaaggtgggcagatcacaaagtcaggagttagagaccagccttgcaaacatggtgaaaccccatctctactaaaaaatacaaaaacaattagctgggctggtggcgagtgcctgtaatcccagctacgcgggaggctgaggcaggagaattgcttgaacctgggaggcgaaggttgcagtgagccgagattgcaccactatgctccagcctgggtgacagagcatgactctgcctcagggggaggcggggagaaggttactttcaaccccatgaaaaagtgagcaaaggacatgaacagacacttttcaaaagaagacatatggccaataagaatatgaaaagcagctcaatatcgctggtcattagagcaacgcaaatcaaaagcacaatgagatactatctcataccagtcagaatggctgttgttaaaaagtcaaaaaataaccagttggatgctgatgaggttgcggagaaagggaacacttatacactgttggtgagtgtacaaattagttcagccattgtggaaggcagtgtggcaattctgcaaagagctaaaagcagaactaccattcgacccagcaatcccattactgggtatctacccagaggaatataaatcattctaccataaatttagacacatgcacgcaaatgttcattgcagcactattcacagtagcaaagacacagaatcaacctaaatgcccatcaatgacagattggacaaaaaaaatgtggtacatattaccatggaatactatgcagccataaaaaaggaatgagatcatgtcttttgcaggagtatggaaggagctggaggccattatccttagcaaactatcacaggaacaaaaaactaaatactgcatgttctcacttacaagtgggagctaaatgatgagaactcatggacacaaagaagggaacagcagacactgggtcctacttgagggtagagggtggaggaggaagaggagcagaaaaaacaattattgggtactaggcttagtatctgggtgacgaaaccatctgtacaacaaacccccatggcatgagtttatctatttaataaacctgcacatgtacccctgaacctaaaataaaagcttaagaaataggttattttaaagactatcctaatgcatttgtttgtgtgtgaaatatggttttgctaattagtattctttattgccagtaaaagtaactcactagagggagcttctaagaaacggggattttgatgagggcacgtggatatcccatggattttagggacgggcacggctgggccttggggaaacaaaacaaaacaaacaaataaaccaaaaatcaaaaccaaaaattcacattgaatttggagtttgggtcatattgtatgaacaggactgcttccacctgcattaataggcaaattccagaatactgggtgctgaatgaacagtccagtatggatctgtacggaggctgtaccaaggattggtgtctgtttatttttatttgtgctgctattgaagattttctaatcattagtgctaatattgcaggagaaaataattaatgaaggtgtctactgttctattgtagtaatttctgtttgcagggctcattaacatctttgatcagaatgagcagctcttttctggttggaatagatgaaaattatacaatgtatggagccattcttcaccttgtccttgtttcttcttcatgttgcttcgacttattgctcacaagttgacctcccccttagagctggggtggtccagcagggctgcgttgtgatgtgtattccttttgtgataggagacttgctgagagaggatcctgtttttttgtttgtttgtttgctttgagatggagtcttgctctgccacccaggctggagtgcagtggcatgatctcagctcactgcagcctctgcctcccaggttcaagcgattctcctgcctcagcctcccgagtagctagtatgacaggcgtgagccaccacacccggctaatgtttgtatttttagtagagatgggatttcaccatgttggccaggcaggtctcaaactcctgacctcgtgacccgcccacctcggcctcccaaagtgctgggattacaagtgtgagccaccgcgcctggccgaggaccctgtctttaatgggatgttgggtgatatgtatgaaatggttcaagaagcagatgggaagtgtttgggaggcctactgccagtggctcagtgtagccagggaaaaacagacacacctctgtgccatctctcacatcttagaaggtaacattgagtttgctgcatagaaccatacagttctaggtcacctgaaactcagagctcatgtgatctaaacttctatatttaaaggaggaaagagactcagagaagtaaaaatggcttgaccaagaagtcagactggaaccagaagtggacatatggactcctcattcctgttccagtaccgttgctgccagttcacattgtctttctaaaatagccatttatagggccacagctccatctcaaacaagggcttagtatctgtcagtttgcgaggtctaccataacaaagtaacccagactgagtggcttaaacagcacaaacttattttcttatgattctagagacagtaagtttgaaatgaaagtgtcaggaaagttggttccttctgaagtccttctccttggcttgcagatggccatcttccccctgtgtcctctcgtgggcttccctccaagtctgtgtcccagtctcctgttacaaggacaccagtcatagtggaatagggccctttcatatgaccttattttgttttaattacctctcaaaaggtccaatttccaaatacagttatattctgagaaactggaagttagggcttcaacacatgaattttgagtggttgtggggggaaaaaattcagccagtaacagtatccataagttaacttgattcattagttgattaagtatgattaaaccagctgggcgcagtggctcatgcctgtaatctcagtactttgggaggccgaggtgggtgggcacatcatctgaggtcaggagttcgtgaacagcctggccaacatggtgaaaccccgtctctactaaaaaaacaaaaattagctgggcatggtggtgcgtgcctgtaatcccagctgcttgggaggctgaggcaggagaatcacttgaacctgggaggcagagaggttgcagtgagctaagatcacatgcaccactgcactccagcctgggcaacagaggaagaccctgactcaaaaacaagaaataaagtaaataaataaatattattaaactagattatattggttaccaagtctttacatgaccattttaatagccttttcagatgttaactttgcaataatatgcagccagctaattgaaaattctagtgccataaatgtttttaattgcttactatgtgtcaggcgttgtactaggcactggggaaaactgtaaataaaagagacccagttccttcctttttttcaggttgcagtctatcaggaaaggcagacatttaaaaagggtcttgtgaggactgttatgaaacaggaagtacgagtgccatttctataccttagtacaatcactcgttttaattcacatcttccatggtggcaagtttgcctcagtgtcagccggtcaattgccactcaaggggatcagaacatttatgtatctggaatgcttggtacctagagttctgaagatcactattctcattccaaatatgttttttcattgccagaatgctcactcagtgactggattagttatgtgtactctgcatttttcgaagaggggaaagctgctatttttatcatctagtagcattctgatgactccttgataacatggttactatacggaaccccatctgtttctctgctgggaccacatcttagtcatatttttgtccctaatgtctggcatcgtgcctggcatttagtaggtcttcagtaaatatttgctgaataaatgtatgctgattgaaaaattgcctgctattatcagctctctgtgcatgataaatgccttgcctctccaaagcgattgtaagcttctgagcaggaacaccatggtcacacatggtctgtctaactcagcgccttgtaaataataggaatgccatccctaaatccctagccccctccaggatggcctgtcttccttgcatctgggactgttgaagattcttaatgatggaaaaatcatatacaggttattgcatagacatacattaaaaaatgtagttcgttcagtgtatccctagtgggcctatggccataaattaacttgctcccagggtaggtagtactctcttcttcacttctgctgtaatcacagctgccttcattatagaatcatagagaagtgaattaaggtgaactttgaaagaaggaagagatgcagctcacttgatcgatgtgggagtgggagtgggaagatttttctaggcataaggatggcatcaaagaggcttggctgtttttccattcccagtaatcgttgacagttttttatttaacatttaaaaaagtgtcctccgaaccttaggctgttcaaaaacaagtatttcatggtagagattacgtcaaatgataagcgatgcattctgcgatcagtggcagaaacaaaggttgaagctgcagtttgatgagaatttaaacatacagaagtcaaaaaattcaggagttgaagttaaactgcaagtgtgactcagtcccctcgggcatatggtagtagcattttctgaattgtggcatattcagttaaatttaagcccttgtttttgcagagtcgttgtgtcaaggttgcaatgtgagcagtaactttagactttcacaattttttatattctcacccacagtatgtgctgttatagcatttgtgcactgaaatttggtatagcttataaaaataaaaaaatggtgcaatgctcaatctatggtgcagaatgtatatgattatgaaggaataacccttctgtttgcttgaacccgacctaatactgaaacaaaacaccgccacttttgcttttaagtaaataaataaaccatacattgtggcaaaaggcatacactataaaattgaccgtcttcaccatcaagtgtacattcagtggtattaactgaattcacattgttgtacaactgtcaccaccatccatctccagaactcttttttttttttttttttcttgagacaaagtctcgctctcatcccccaggctggagtgtgatggtgtgatctcagttcactgcaacctctgcttcctgggttcaagtgatcctcctgccccagcctcccaagtagctgggattacaggaacctgccacgacgcctggctaatttctgtatttttagtagagacagggtttcaccatgttggccaggttggtctcaaactcctgacctcaggtgatctgcccacctcggcctcccaaagtgctgggattacaggtgcgagccaccacgcccaacccagaactctttttattttgcaaaattgaaattctacccattaaatagcaactcttcttttcccttctcccccaagcccttggcaactgcttttccatttctatgacaatgtctactctagatacctcatagagggtgaatcatacagtatttgtccttttatgactggcttatttcacttagctgctatattattaataccagctttctggggatataattcacaaactgcagaattgaatggtttttagtctattcacatcggatatgtttttgaagagacagtaaaaccaatccttttttccttagttctcagacacacacatgcttcttatctggcaagtcccgttataaaaatgccatgaactaaatgggaacagaagattgggggaaatatctagattattcttagtttggttcagattaattgagatagccagaatatttttgtaagcatgtttgctttaatttaaatgtcttcattttgcttcctggagccagcaatatgtgattacttattgttgttcttatggggtattgtttgcttgcgtagttgattgtgatgagttggctagaaatttaacagaatggaaatttcttcaagtctggatttgttcaaagaacagtttgaaattgaccaaagcgatagatggaactgacacttgacttatttgagatctggagttcccagtaatgaatattttggtccaagtttgaaaaatggcatttcatgtttatgtactgctgataggaatattcattggtacaaccatttagaaagacagttaggtattatccagttaacaaaaacaaatgtgtataccctgtgactcagcaattttccttctaggtgtttcctagagacttctgtactgtataccacgagacatggaggctctccagcacagctttatttgtgttaataatggtttaaaaaaataaacccaaactacttgaatgtttattaaagtgaaataaacaaattatgatatgatcaaatgacagaacacaatacaacaatgaaagtgaatgatctaaaactatataggagcaatatagatacatttcagtaacctgatatgaagccaaaaaagttacgttgcagaaaaattcaaaatatgaatgattatttttgtaaaatttcaaaagtatgcatcattaaacaagtaaagtggaatttcaccctgagacagttaaaaaaaaaaggctagaagcttagaaagacatggattagaactcgtttttctctgttctgagagtacatgtggaaatgaaagctaccagctatttctgccattttaaatgctcatatgaaatttctaagtaccctgcatagtaagtctttaaaatatcacatacacactactggcaggctaaaaaccaacagaaagatggctgggtaaaaagaaatcatgcatgcagaacactcttacttttaaaaatttacattcctgaaatagaatttttggagagaagcttttcttgaatgatgttagattgaaggatataactaaaaatagaactgcagtctttaataaatgaaaattagtcaagattctaattagtacttcctgtgttcgatactaattttgtcagttcatttctttacttaatgtgggctgtacctattcgcacatcccttgtactctttgcttgtttggttatcgttatgagaccaccaccaaccaccaccaccaccaccatggtcatcatcatcatcaccatctcctagagcacatggttttatgagccctgagctaagctccttaccgtttaatgcaaacatgttcctccctcagggtctttgcattactctaaaataacaccctcatcagtttttatccccttcaccggtttaatttttccttattgcacttacacatacttgtttgtctttctcatttcactaaaatttgagagtgatgttaagtctgtggaagcagagcccatgcttacatctgtcacttgtgtatttccagtgtttaaaactgggcctgtcacacctagaagctcactgatcataatcagtgatcatcaagtgaatgaatgcctgaattagcccaacaactctttgaggtagttattgctgttactattctacagatttttaaaaatggtggcactcagatagattaaactactcgcccacatttacccagcttgtgggtggtggaggctagaattcaaagccagtgtgcctgacaccaaagcctgttgtcttaactactccacttttctgcctatcatctgctgctagttctcagtgactttttatttatttatttttgcatagagcatcttttcttcttttcgggctatcaactcatcatttgtttaattctttgttttttgtttttgagatggaatctcgctctgtctcccaggctggagtgcagtggcacgatcttggctcactgcaacctccattgcctcccgggttcaagcctcagcctccctagtagctgggattacaggtgtgcaccaccacacccagctaatttttgtatttttagtagagacggcattctccatgttggccagggtggtcttgaactcctgacctcaggtgatccacctgccttggcctcccaaagtgttgggattacaggcatgagccgccgggcctggccttgtttaattctctgtatgcacctttttgataaatagttgtgtctccttttagggctatttctgttttgcatatacaaagactttactcatatttcaggttcagccaatttcagcctcttgcagctaacgcccttgccgtgtttagtgctattgtctgggctctgagactgaagcaggtctgtgagagcagccgacaaggtgtcaagaaggaaggatgcaataacccactgagctgcgttatctcctaaatgcatgtgtctttatgccattgctaatggcatctaatgaccttgggctccgaacaggtgctgccttgtaatctgcgctcatttgtctctttctacactgctagatttactgaaataacatgaacagggaaagcaaatgctttcatggatgccaggaatgctttatttatcttttaattttctttcatttgtttcgggatgtagaagcccactttggagttgaaataaaacaactaatgttcagagctgaggttgtcaccctttttagtaggacctcagatctagaaagggccccagagagttctcctttgcttatagaggagagtgtagtcctgtgggaccacatgtggtgctggccagcggagtaggtgggggtcctagaacttatgcagcctgactccctttctggggctccttctgaaacccagtggcatcctccttggcactttgcacacccagctgtaaatacacctgtgccatggagggctaaagccttttgggggggcatatatgggccaactgatgatcaacaacctctgttttcttagatcatctagcttctttatataacgtacctcttcgacttgggttgaccaaactcagatgatctccttaaagatgcatattaaagattgccccaatttcttaggatcctaggatatgagaatcttcatctctctctctctgtctgtgtgtgtatgtgtgtgtgagagagagagagacagagaaatttgtcctaaggaaacaaccagagatgttgaaaaaagatatatatgttcaagaagtccagcacagcatcactaaacgatagcacaatatctggagaattgaatgctagataaatagattatggttggaaattatagttatgttaaatattcacatattctgtgtgtgtgtgtgtgtgtgtgtgtgtgtgtgtgtgtgtttgagagacagagagagagagagagaatatgtatgtgaatatttaacattttgtgtttacagcctttgaagactactgcttttcctctagcatagaaataagatcaaggtttctcctactgtaaaagtttggttgaggggggttattgttttaaaatcaaaataatactaatatataatgagctcttattatggtccagatgctgtactaagtgctttacatacatgtaaaattcaattgccacagcagcccaacagcatagtgttattagccccatttgacagaacaggaagttgaggctcagagaggataagcaacttgcccaaggtggcagatcttaaagtgatagagctatgttttttttttttctttttttttttcccttagagacggagtctcattatgttgctcaggctggcctccaactcctgggctcaagcgatccttgcccctcagcctcctgtgtagctgggactatagtgcatgttgccacgcatggctatagagctatgatttgaatccaagcagtctgactccagggcatgccccagaaattgtttattgtttccctgatcacagaagggatgtatatattcatttagaaaaactggaaatacagaaaagaatgcagagcagatcacgcatacgataaatatgaacatttttagtgtctctagtcatatagattttttaactgggatcatgctgatttactgtttgtgagctagctgcctgatatttaccaggggtctgtatattgtaaacatgctgctgtgtgattttcaagcccacacagtgtgatcttagggcctatcgtaagttttacatcactcatagatactgtaatttccatccataatctatttatctagcatttaattttccagatattgtgctatcgtttagtgatgctgtgctggacttcttgaacatatatatcttttttcaacatctctggttgtttccttaggataaatttccagaactagagctggtggctcaaatagtaaggccctttataaggcttttgatatgtgttattaaattactcttcttgagcacttgccaaccatgacaaagaacgttcatgtgtctgcactctggacaacactaagtactgtaattaaaaaaaaaagaaacaaacaaaaactctgccaatttgataagttaaaaattatatcttgttttaatttgctttttttagtgtagtttcaagtgagggtggatattttccttatgtttctctgttttttacatttcttttttaaattggccattcgtgttcattgcttatttttgtcttagaaagtttttccttttactcacaattacatgtatttattttgtattaaggatattaactctttgtttaatggtattggaaatatttttcccactttgatattttcctttgaattttacttacgttgatttttatttacaaaatcaaaatatctgtgtagtcaagcatattaataattttcaaaaagtgttttgctttttttttttcccacagttgaatcctttttttttttttttttgagacggagtctcgctctgccacccaggctgcagtgcagtggcacgatcttggctcactgcaacctccgcctcccgggttcaagcgattctcctgcttcagcctccagactacaggtgtgtaccaccacgtccagctaatttcttgtatttttagtagagatggggtttcgccatgttggccaggctggtcacgaactcgtgacctcaggtgatccatctgcctcggcctcccaaagtgctgggattacaggcatgagccaccacaccctgcctgaattcttttgttttgtttgttttactttaagttctgggatacacgtgcagaacttgcaggtttgttacataggtatacatgtgccatagtggtttgctgtacctatcaacctgtcatctaggttttaagccctgcatgcattcggtatttgtcttaacactcttcctccccttgtccctccctccgacaggccccggtgtgtgatgttcccctctctgtgtccatgtgttctcaatgttaaactcccacttatgagtgagaacatgcggtgtttggttttctgttcctgggttagtttgctgagaatgatggtttccagcttcatccatgtccctgtaaaggacatgatctcattcttttttatggctgcaatttttttttaatttttttttttgcttttatacctagaaaagccttccattcactagggtcagataactatttacccacaatttattgtagttctttattatctcatagtttatatttatcgtttattttgatgtgcgatcttagacatgaggattcaatgaacttttgtcaaatattagatcagttgttctcacattatgtatttattagtcttttgccccactgagaggagacatcatctttattaagtactaataaaaactaaatgtttttagaaacatgagtatatttcttttttttttttttttgagacagagtttctctctattgcccaggcaggagtgcagcggcgtgatctcggctcactgcaagctccgcctcacgggttcaggccattctcctgcctcagcctcccgagtagctgggactgcaggcgcccgccaccacgcccggctaatttttgtgtgtgtttttagtagagacggggtttcactgtgttagccaggatggtctcgatctcctgacctcgtgatccgcatttctaagccttatattctgttatcttgatatttgttttttttctattttgcttttgattctatgagtttagaagattttaatataattagattctttcatatattttttttcagcatttattagctatttttagtctatttattctttcatgtgtacatagactaatttagtcagattttaaaacatcttttcaaaataaaatttaatttaatagattagatatcaattcagagagaatggaagtctttactgaactcttgtaatttttgatccatgcacaatgtttttcctttagttttttagtaatgcattttctgtttttatagaatctgagcagttcttgttttctttagagattttacagtgttggttataattgtgcacttaatctttattttccttatacagtagtccccccgatcaactgggggcatgttccatacccctggtggattcctgaaactgccagttagtaccaaaccctatatagattgtgttttttcctgtacgtacacaccatgataaaattcaatgtataaattagagattaacaacaataactaataatcaaataaaatacttatataaaaatatactataataaaagttatgtggatgtgatctctctcagtctccaaatatcttcttgtactgtactcgcctattttcagacagcaaattgaccaataaataaaaccatggaaagcaaaaccgtggctatggggagactactgtataagggaaattttcacctgattatcattgcgttttaggaaaactattagtatgtctatgtaagtgtgtgtggaggggtatatgtatatcttctagtaactgaccattatatataattattaatatataatatatataattttatattatacattatataatatattttatataaatatataaaatattttatatatagtatataatatattataaaatatattatatactatatataaaatatattatatatattttttgagacacagtctccttctgtcacccaggctggagtgcagtggcatgatctcagctccctgcagcctctgcctcccaggttcaagtgattcttctgtctcagcctcccaagtatctgggattacaggtgtgtaccaccacacctggctaatttttgtatttttagtagagacagggtttcaccatgttagccaggctggtctcaaacccctgacctcaggtgagccacccaccttggcctcccaaaatgctgggattacagatatgagccactgtgcctggtcaactgaccataatattgatctcagttctagagtctttcagctaattcccttagatattctaagtagacaataacatttccaataatgataattttgtctcctgtattttaatatttttaacttttatttcttctacagcatcctgatggtatgccaaataataatggaagagcagatacaaatacacttgactttattcctgaatttaatttttttttttcttgagacagagtcttgctctgtcacccaggctggagtgcagtggcgcacgatcttggctcattgcaacctctgcctcccaggctcaagtgattctccggccacagactcccaaatatctgggattacaggcatgcaacaccatgcctggctaatttttgtatttttagtagagacggagtttcaccatgttcaccaggctggtctcaaactcctgacctcaagtgatccacccgctcagcctcccaaagtgctggggttacaggcatgagccaccgcatgcagcctgaatttaatcattgactcttgtttttaacttttaatataatattggctactggtttgtggtaggtatcttttactgtggcaaatacatagtattctattctaattttcaaccctctttcccacagaatatttaagagaaaacctttttggccgctttgataatgataatttttgtctattgaatggtgatgctgtgattttcaggatgtatgtatcatggaaactggtagagaaagaaagaactgagatcatgctgaagtatactggggcccaccaagaggtagagctgagtgcaccaattgtcaccaaaatggcaacccgtaaaagagaaccattcttaagaaagagtcatgtaccatcaagcggggatttccagaagcctctgatagtaacagttctcccttccattcctttcctctctactttcaagatgcgatgatgacaaaaagactgacttgtcaaaaaaaccatgaaattccatacaaatgggcaagctgacatatagcagcttcggaaatttccacaatcgctcctctgagttgcctcaaggagaagaaaagtgagagaaaggaagggtacctttgcccccattaaggcacatgtagcatcctggaagctttgaaattacctgtccccaaagttattagaattatgtcattttttggttgttatattatgaaagcctccccacccctaaaagtttgtctataataatttttttgatcaggatttttacttcttaaattaatattaaagcattttaatgtttctagaaaatttgtcatttgtatttatattattttattttatttcattttattttatcaagacagggtcttgctctgttgcccaggctggagtgcagtggcacacgatcttggctcattgcaacctctgcctcccaggctcaagtgattctccggcctcagactcccaagtatctgggattacaggcatgcaacaccacgcctggctaatttttgtatttttagtagagacggagtttcaccatgttcgccaggctggtctcaaactcctgacctcaagtgatccacccgcttcagcctcccaaagtgctggggttacaggcatgagccaccgcatgtggcctgaatttaatcattgactcttgtttttaacttttaatataatattggctactggtttgtggtagatatcttttactgtggcaaatacatagtattctattctaattttcaaccctctttcccacagaatatttaagagaaaacctttttggccgctttgataatgataatttttgtctattgaatggtgatgctgtgattttcaggatgtatgtatcatggaaactggtagagaaagaaagaactgagatcatgctgaagtacactggggcccaccaagaggtagagctgagtgcaccaattgtcaccaaaatggcaacccataaaagagaaccattcttaagaaagagtcatgtaccatcaagcggggatttccagaagcctctgatagtaacagttctcccttccattcccttcctctctactctcaagatgcgatgatgacaaaaagactgacttgtcaaaaaaaccatgaaattccatacaaatgggcaagctgacatatagcagcttcggaaatttccacaatcgctcctctgagttgcctcaaggagaagaaaagtgagagaaaggaagggtacctttgcccccattaaggcacatgtagcatcctggaagctttgaaattacctgtccccaaagttattagaattatgtcattttttggttgttatattatgaaagcctccccacccctaaaagtttgtctataataatttttttgatcaggatttttacttcttaaattaatattaaagcattttaatgtttctagaaaatttgtcatttctatttatattattttattttatcaagacagggtcttgctctgttgcccaggctggagtgcagtggtgcagtcatagctcactgcaaccttgaacccctgggctcaagcaatcctcccgcctcagcctcccaagtagctgggactgcaggtgcatgccactatgcctggctctttttcttttttaacttttttgtagagatggggtctcactatattgctcaggctggtctcaaactcctgccttgagcaatcctgcctcagcctcccaaagcatggggattacaggtgtgagccaccggacctgaccatttctatattcaaaattttgttaacacagtcaaatattacatattttaaaaatttaaaacattctcaatatttgtgaatttattccacttcttatttttaatttggtttgttctctgaaacttaagattagctagcagtaagtcaatcttatttttgtatatattttaaaacattttgtatatattttaaaatatatgcaaaaataagatagacttactgctagctaattaatagccttttaaaataattttttttttttttttttttttttgagacggagtctcgctctgtcgcccaggccggactgcggactgcagtggcacaatctcggctcactgcaagctccgcttcccgggttcacgccattctcctgcctcagcctcccgagtggctgggactacaggcgcccgccaccgcgcccggctaattttttgtatttttagtagagacggggtttcaccttgttagccaggatggtctcgatctcctgacctcatgatccacccgcctcggcctcccaaagtgctgggattacaggcgtgagccaccgcgcccggccaaaataatttttatctcacatttggatagttttatgtgcttttcctttatattgcttttcttaggtttatttccctttctttttttttttttttaagacagagtctctctctgtcaccaggctggagtgcagtggtgcactctcggctcactgcaacctccaccttacgggttcaagtgattctcctgcctcagcctcccaagtagctgggactacaggtgcgtgccaccatgcccagctaatttttgtatttttagtacagatggagttttgccatgttggccaggatggtctcaatctcttgacctcgtgatctgcctgcccgacctcccaaagtgctgggattacaaaggtgtgagccaccgtgtcccacccccttttctaatttattgagttgatcttttatttttaatttttcttaatgataaaaatactaaagatatttgcctctgactgtaagctgcctacactttgatacataattttctcattatctttattgtctcagtctgtgattccataatttattatcttttatactctacacctatttagaagaattctttttgaatgtacaagttaatttgaattgtttacacttctgtctattaatgagttttgttgcattgtggtcacagaatattgaaaggtagtaaaatttattttatgttccaatacaggattcatttttgttaatgttccatgagcccctgtatagaagatgcatgctctaattaaatctaatcaggcttatcttgtcatcagatctgccatatttatgattttatcctacttctctatatctttattaaattttcatctgctggccgggcgcggtggctcacacctgtaatcccagcactttgggaggctgaggcaggcgcatcatgaggtcaggagatcgagaccgtcctgactaacatggtgaaaccccgtctctactaaaaatacaaaaaattagccgggtgtggtggcgggcacctgtagtcccagctactcgaaaggctgaggcaggagaatggcatgaacccaggaggcggagcttgcagtgagccgagatggagccactgcactccagaatgggcaacagagtgagactctgtctcaaaaaaaaaaaaaaaaaaaaaaaaaaaatttcatctgcttatttttccaaggactgaatgcagtggggtagactttaacattattgcatgtctctcaatctctgttttattttctttatatatttccatgctctactatcttgacacatacaattttgacttaattctttggaatgtatctcttgtcagtaaaaatttcacccctgttgaatgctttagatatgtaatactgattttgtattaacagttgtaaaactgtcacttctaaatgtgcagtttcctggtattcctttgccccaatcttcttgtaacttttatgggtttcttgcagatagtctaagggcattcttaatttatgacaccatctgagattcttttgcttttcaaaacgaattaatacctgtcttcaatgttgatacgcttattctaatttttgtcatctttttattcttttggttttatgattccttgatatttccctcattttccattttgtgtgatatgatttactgtctgtaatactcataccttatatttaatcttctagttgtcttcttaaatttgactaaatatgacctatatttctgtatgagcaaagtgaggaagctggctgaccatacctcctccctgtataagataagattaacacattttattctcctttggaattctccttttcttttttaaagttagatatagacatatagatgttttgatccagtttatgattacttttaaatattatgtaacttttcttaataaggattatctatatctgtgttcctttttataacgatattcagttgtttgttatatgctctccttatatgtgtatatatttttctctagagacagggtcttgctctgtggtgcagcctggagtgcactggtgggatcataactcgctgcagccttgacctcctggctctaaaggatcccccacctcagcctcctaagtagctgggactacaggcacacagccccacgcctggctaactttattttttttttttttttttatagatgacgtctcgatgtgttgtcccgggtggttttaaactcttggcctcaagcaatcctcccacctcggcctcccaaagttctgggattacagggatgagcccctgtgctgggcctgaatccatattgtgaactgttttaaagcacaactaccccttttctttattgtttaaaattaaatttttgattgattagggagcttcttcaaatatattctatgaaatacattgtgtttttgttgctccttgggatccaagaatgccttttttattttttaactctcataccttagtaggaaagttggttagtttggaatttttgtatcagaaccctttgccattagagctgtgtagttgttttatttcttctattgtcagaaatctgattttttttccaccttggtgacctggttacctgtatttcttttcctcctcactgaatgcttatgagttgttttgacctcaaaagttgcaccagaaggtaaataaatagatggaagttttctttaatttattaatttatattaatatttatatcagttttcatttttttcttcttgtatagagtgagtttttggttggttggttggttggttggttggtttactctgtatttcttcagtttagaaaaattttctttcattatttctttaataattgcttctgtggtatttactttgactatgcatcaatcatgctatctctatgttggcttcctactttgtctcctgtatccattagcatctatctgatttgtttatacttttcatcttttttccagtgccttttgggagactttttcaggtttgttcttcacttgctggtttgatgctccaaaggctgtttttccttttcattgcatcgaatgtagttttaaataatactttggaaaatcagtcattgaaaaaaaatcctaatttttttttgtaagttggtgtttctttttgttttcatttacttgtcattcacgcctaagtctgggtctcctccccttctttttcctcctccttcttcaaaggtgcaaatcacatcttgtctgaaacttgtttctatttccagtagtaaatattttttgaaatcgtcttcttcctttatttcttggatgtttcttgttttgttaaccaagtccttataagcccaatgttgccagttttgggtctgctcatcattgaatgatgggagggctagcccgccctggaaattgttctcaaataatctctgtaccattagggaaaggttggactcctttcctcggtcttaagctgaaggctttgttcttaaaaatgtactagaccaggtgtgtttttcagcagctgcacaaatttgtagggagctggagccacagggcaatctctattggggttcttccttgcatggttgctgcttggcaatgggtgaagccatcgtgcaagagacagtggttctcattctgaacttctccctgaccctagcttcactccaagccccctttgtagcagaggatgcatttttctggcatcagagtcctgctatgtagagagacatctcacatcccaccagatggccatgggcatggaggacttatgcttggttctcttcttagtgccttccgaatgtgaatgccctggacaccagacactatctggtttgctagcctgctctcacctccagcgttcagtccattttaggaagatttctaaccagtgctctgtcagaatctcttcttgtttcttctcacagtgctgtgccaccttttcaagaaagagaatcccaacacacatttctgattcagccttttatgtgatgctttctctggtctatctaacaaaatgtcttaatgttaaaaatgctgggtgccctccttttttttcagcactggtgtagacttccccccatctttatatttgtgggaaatggatgttcagattgatgacgtgctctaaagacagagaggggaaatttacaaaacacaaatggagaggaatgtgaattttacaaaagtatttatggagttctctaaataatgaactccctcaggacacttagcacaccaagtaatgtaaaaagttaggcttacacgtagattgtcagacacacagcttttgtatattgtaagctacacctgtatccctgtaatggtccccaggagtatcacgctgcatggtccaattaggtacagaagaactctcaagtagcagccagtcactttgcctgtaataatgtttatgattcagagtggtgcccaattcaccctttgcacttttcccagtggcatttggcagctggggcctggttattcagcagattattgcttctccccagaagcttttgtgatccttgcaggcgctctcctactagggagagaagaatgccaacatattttaaggaaacaaagaataatagtgtcacacgtctttgaataagagtgaaaaaatagttctccccacatccaaacacagtgtagtcaaaattaagaagatagaaatcaagtgtgcatgggcagagggtaggtcataggcttaatgaacccagaagagctttatttattgacttctattttatcccttctcactggtccagctgcaatgattgtcaacaaaggtgacttagaaaaagagagaccttggagagagacagaaagagagagagctggataggcagacagatgtagagcaggtttgtttgcttggcagaacatccaagtcgcagatggttctagaacagaggtaatattgccagggttgcgtggaacagatctggactaaagctgaggcttgcaggtaaagccagtggctcccactccaatgtcattcagcacatagcaatttcagctggagatctgtttatagcataaaacagacactgcagacttttttctccatgagactttaatgtttcatttactaacaagattatatatgggaagtggatgtcataagaagactgtagaatcctattgtctcaccaccgattgaggggcctttgtctatagaccaagcacgtctttttcctcggatgccttgggcatttcagaccatgcccaaaaagatatgttgtgacctgcagacctgtggttgaccatattaggatctgtgatcaatttcttagagattttgggcataaaaaatgagcaaagagccatctttaggaatttggggatatgcttgacccaaggtatttttgttttctactaacacattttgatgtaaagcaagaagtggttttcaacagttgaccatggttgcctagagagatgggtacatattcatgtattttgacctatcagatggaaacaggcttcactcttagaacttccctttggatttcccacccaccccagacactgacattccattttgaagttacacatgaatataacactgacacattgggacatgctttccaagctcaattaccatgcagcgcaatatcaattaagtggatcatgaaacatgtgtctgattgtctcacttgcataatttacattttttgacaacacttaattctcccttatatgtccaggtttcctattttgtgatgcacataattgcagaacttgggagctagaatggaccttggagaggtcccttacgccaaccctttcacttcacagatgtagaaactgaggcttagagagggtataactttcccaaggccacaaaggactagtttacagcagagctgggcttatataacagggctgcctggccggacgcggtggctcatgcctgtaatcccaacactttgggaggccaaggcgggtggatcacctgaggtcaggagttttaaactggtgaaaccccatctctactaaaaatacaaaacattagctgggcatgttggcgcatgcctgtaatcccagctacttgggaggctgaggcaggagaatcgcttgaacccgggaggcagaggttgcagtgagccaagatcgcaccattgtactccagcctgcgcaataagagcaaaagtccgtctcaaaaacaaacaaacaacacacacacacacacacacaactcatggaactgtatactttcccccaaaattcaatttagggccgggcgtgatggctcatgcttgtaatcccagcacttcgggaggctgaggcgggcggatcacgaggtcaggagatcaagaccgtcctggctaacacggcgaaaccccatctctactaaaaatacaaaaaattagccaggtttggtggcaggcgcctgtagtcccagctacttgggaggctgaggcaggagaatcacttgaacccaggagtcggaggtcacagtgagccgagatcgcaccaccggactccagcctgggcgacagagcaagactgtgtctcaaaaaataaaaataaaaaaaaaaacccacaaacaaaaaaaccacaaacaaacgaacaaacaaacaaaacagggctgcccattatcccctgcatggctccagagctattcttaagatcctctgcactttggatcttaagataacattagatttcatagtatccatgaaataacttagacctggtcttggaaatacgtttcaccatccaggtacccatcacatgtgttcgcaggtgaggctttcttagcagcactatgtaaggagacatagtaaagaaatatttattgaatactgaatattgattgagcctatgtcctgtgctaggtgttctaaatatagaaccttatctcatcccataactctttgagttaattgtcattctttttgtttgtttgtttttgagacagggtctcgctctgtctccagagtgacacactgtactccaggctggagtgcagtggcgtgattgtacctcacagcagccttgaactcctgggttcaagcgatccccccacctcatcctcctgagtatctggactatatgtacgtgccaccacacctggctaattttttaaacattatttgtaaagttagggtctcacatgtttcccaggctggtcttgaactcctgggctcaagtgatcctcccatctcagcctcccaaagtgctgggattataggcatgagacactacacctggtcagtatcgttatcttggccattttacggttaagggaatatagacccggcaagtttctatagcttgttccagaccacatagctagtaagctttgaggctcatcctagggtcactgcttgaataacctgcatttttctactgtaccatatgtattctcctgctaatcttcttactgagagagatggtagttcttctaagtatcatatgatccaaaagttgcttaaccaagagctccagcatctgaatccctgagcatacctcttcccccatgcatcatacctgtttcccattctctttgaataattttgaattgtgagcaaatgttcttacaaaataaagaagagagtgtgtccctgcagcattgtctaagtgcagaggatcttaagaatagctctggagccttgcagggctcatgggcagccctgttatataagcccagctctgctgtaaactagtcctcttgtggccttgggaaagtcataccctctttaagcctcggtgtctacatctgtgaagtgaaagcgttggcgtaagggatctcctcaaggtccattctagctcccaagttctgcaattacacgcatcacaaaatagggagcctgaacatataaaggagaatttagtgttgtcataaaatgtaacttatacaagtgagtcaatcggatacgtagttcatgatccactaaattgatactgtgctgcatagtaattgggcattagtggaagcagttcacgtaaaagactataatttgtattacttttacaccattgcaacactttttattgttcctcagtccttgatttgttttctaatgtctctagtgtgtttaacactttctcttgttatgatatgcaccatacatgtgcatgtaatataattcacatatataacatgaaaacatctgattcccacatctaacagtcagacttccgttttcctcttttccaaaatccaggtggtcagctgggtgcagtggcttgagtgtgtatttccagcactttgtgaagccaaagtgggaggattgcttagggcaggagtttgagactagcctgggcaacatagtgaggcctcatctctacattttttttttttaatcagccaggcatggtgatgtgtgcctgtggtcccggctactcagaaggctgaagtgggaggatcacctggttccaggaggctgaggctgcagtgagctctgattgtaccactgcactctagcctgggcaacaaagcaagcctgtctaaaaaaaaaaaaaaaaaagaagagaaacaaaatccagttgtctgaagaggaacaacttcttcctgagacattttctttatttcttttaattttgttttcttttttttagatacagggtctctctccatcacccaggctggagagcagtgatacaattgtggttcattgcagcctcgaactcctgggctcaagcaatggtcctaccacctcagtcagttgagtagctggaactatagatgtgcaccacgtgccacgataatttttgtttttttttttttttttgagacagagttttgctgtgttgcccaggctggtcttgaattcctgggctcaagtggtcttccctccttggccttccaaagtgctgaggttacaggtgtgtgccatgtgcctggcctgttcctctttatctctttgtattgagaggttcttgagaagcatttccatctgctttccatcgttttctcccatgtgcagacttggttaaaagaccttgaggaatcccccctttacgaagccttatccatgagaggacaagataaggagacccttggtttgtggattcagcttccatggtcattcccatcagttcccaccacttctaggagagatagtatcactcgatgctgacctggaaaatcctggtagagacccaggaactcataggactcggtccccacaccctcatgccagtacctgtgtgacggagaggcgcccctttgcatggggtgctgcacaatgccttcgtcaatcttctgccactgtcctcatccccaccccagcctgctcacctcttcccctgtaccccacagccaccaggccagtttcacctggtggaacacttcccccacttcacctgctgtgcctcacctacttcctcctgcctgttctggtgaagcctcccgcgtcttttcttgtggtaatgctcttttctgcctctctaaacttctgccagtgtttttgtatttgatttttgaaattcaactcagacctccaaatgaggcctaagtcaagcctagcttttggcgagctcaccccatttatggtgggggcctgcctggtcacctgctcgtcttaaaacctgcctttccttatggaactgtgttttcaatgaggttctggccgctaagcactcaaggctgtgtacactcaactgttgggctgttggaggtctccccatgagaactttattacagaatggagtatggagcctggaaagggaaggtggcccagtgaggaatggtactgcattctcagtctctgggtgagttgaggcaggggaccagaaggagaggagggaggagtgggaaaggcttaaagcctcttggaaggagaaaagccaggggaaaggagaatggtaactgggaaatgggctaacctcagacctgcctttagcggacgcctggctcgagggcccaagacctcaagctctcagaaactggtaagaatcatgctgtcccaggtcccagtgaggtgactctaggtaggaggcccttagcagaggtggctgggtcaatcccagtcggctgcttttatcttttattttatcggcacttagaaagaaagtatggtgctccttctgagagggctctttaacattgcaatgggccaatcactttatatcattatctcataattattatattacattacattatattatgataattcctgttttgtaaatgagtagccgaagctcagttacatagcctgtccatggtcacagtggaacatgaacccagtttgtgatgtcaaagcatttctatctttatggcaagccttcataggaagcaaaagaagcttgcaaaagtaggagacgttaccttatcctctttccccgttcagaatttgggctgcggccaggctcagtggctcacgcctgtaatctcagcactttgggaggccgaagcgggtggttcatgaggtcaagagatcaagaccattctggccaacacggtgaaaccccatctgtactaaaaatacaaaaattagcagggcatggtggcctgcgcctgtagtcccagctacttgggaggctgaggcaagagacttgcttgaacccaggaggcgaaggttgcagtgagccaagatcatgccactgcactccagcctgggtcacagagcgagactccatctaaaaaaaaaaaaaaagaattttggctgctcactgatgttagaatttaaaagaaagtaaagtgatgcttcaattaaaaaaattaaaagcttaaaaaaattaaaagctttaaagtatggattttttttggtgggcggagcaaaaacagtgactgaagtgtattcatattgaaacactgtggtgtttcactggtgttcaagttgacagggcaggggtgggaaagaattacggagtagaaacccctggggcccaatggggaggcacctagagggcctaaggggaaggatcctacagatgaacttgaccttctttatgattttgcggaagacaactctgcttatctttcctctgggaccagtaaaatagctgttgggggcagatgctttgctgatgcttagtatacaaaagacagcttatatgggggcaatattaattttcttaagtcccttggcatggattctgaaaactttaagatttatgatttgagaaccctgactctaaaatacgtgagaattttctgcttgcaaaatagattacgcttgcacaaaatacgcttgcacaaaatcttctacttgtatttctactctggattgttgaaacaaattgattttttcttttttgagacaaagtctcactctgtcatccaggctggaatgcagtggtgcaatcttggctcactgcaagctccgcctcctgggttcacgccattttcctgcctcagcctcccgagtagctgggactacaggtgcccgccaccacacccaactaatattttttgtattttttagtagagatggggtttcaccgtgttagccaggatggtctcgatctcctgacctcatggtccgcccgcctcggcctcactaagtgctgggattacaggcgtgagccactgcgcacagctgaaataaatagattttaagtggctggctggctctcagattgcatcctgttagaaagtcagaatagaaaatagatgcattttagcagtgttggaagaataaactcaaagtcccctggaaatcctggaccccacccacctcttaccaagtatccagcaggaaccttcttccttactattgttataatacattctagccccagtaatttgttccacgtatctcattagagtgaagatagcaacatacttaaataagaatttcatttttcagttttagcttttgatgtaggctaaatgctctgtgtcacataacttagactacctacatgcctcatacactgataccctattttgaaattacacatgaatttaacactgccacgttgggacgtgctttctaaagttacctatgaaataacttagatccggtcttggaaacaccttttaccagctaggtacccatcacatagcttagtaggtgatggtggggtccttcgtttttttgactacccgtataatttcaggagcaagcctaattgttatgcctcctttgttattacctcccctagcctagataacatgccttccaaattgtattgagagtacacaggaagacaactgcagcaggcaaccagctctaacaactgcgtcattttctaagaatcaaaggaattacttgagtttctagttctggctttggcttgccagacatataccttaccccagcgaggtaaatgattcaatcatttgggaatgattgaagttgctgcctaattcataacttataggtgattaaacttgtaaagtattttgaggctgtttctttcattcatttattccaaacaaacatttgttgttgaatgggtagtgactttgattttaaaacactatacagacataaaatagtggcagcttgtagatagcaattttttaatttgctgtccttaaggaatttcgttaccaaatcctcacgaatcttgaaccttagaagaataatcctttcctttgttggagttttaaatttagaataatcagacaatagtgaagcattctgttcaaagcattccttttaggctacccatttattatacgctgctcttaagaggagatgaatttgattagcattgaacattcagtcagtgtttttgcatagctaatatcacggagaaattttcaaaaaaagttatgcctgctatttaacattattatacagtcaacttttaattatctgtattaatggaatgtaatcagtgatgtgttgctccaaaatcatttcctttggctttgagaagcaccggatgatgcttttattggtttgtggttttgcttagatagtattaaaattgtgccacatgtgtgcacatagctcatcttagggaggaagtagcccaaaagtatactgggggctagggaaaggtcaactggaatttttaaacctaccacagatacatatacaatggatgaccccaagattattcatcttaattattaaataaaaaacaatggccaagaattatataatggcagctgtgtaagaaaaaagacgcaatgaaccacatgtgagatttccatgtaggacacacattgtttcccacctttcccttttgaaatttcctgaaagtgaaacactctcataacactacagcagtgaacactgttagatttagtgatcctccaaatgcattttgctggtgctccaaataggcctcttgggggaacagaaggaacagaagggctgatgtcttgacatgttaatgtttctagataatgtcacctttaggtgtgatagctgttactgtttattattttttaaataaccctcttgttcccattcattcaagttaagctttttttttttttttgagacggagtttcactctgtcaccaggctggagtgcagtggcgcgatctctgctcactgcaacctctgactccctggttcaagctgttctcctgtctcaccctcctgagtagctgggattacaggcacgtgccaccatacccagctaatttttgtatttttagtagagacaaggtttcagcatgttggccaggatggtttcgatcttctgacctcatgatccgctcgcctcagcctcccaaaatgctgggattacaggtgtgagccaccatgcccggcctaagcttgttttttttttaatgaataacaatgatagaaggaaatctttggagggtttatcttcttagtagcggcctttcaaatttcaaaagtcttctcagtgcacaaatctgtttttgcatgaggctgctatagggccagcacttttagtcctctgtggcctgttcacctgagtgagtggtgacatttcttggttcataccttggaaggcaatgatggctggccctttagagtgaggtgaaggaagactgatccctgggtgtggaggtactgatgcataggaaaagaaaacatctttggtgacaccattgggtgtcagatcagtttttggcaagttggcaggaaagtctccaaatcagtggggtctggctgggcaccagcaagttggaagctgcattagttccttctgctggcatgtccccctgtcatctggccatagcctcatctgctcctactaccttgcaggtgcccttggggtaaagctgtccagatgcacatgaacccctcctcttttcagctggacaccaagccaggaaaaggagaggtgtgactttttgacggaggccagtttctatgtcagcagccttgccagtgaacactgcaaaatggtgtcagcctgcagcctttttgtgcactggagcagagctcccctcaccacatttgtgaaacaggttctgtcatggggcccaggtgtccttttctcctgccacccccactccagcttgctggccgccttatcattccacaccaggaagccagcatccttgagttgtccttacttcttatgacctgctgtgtagaaagagaggggaaaaccagtgtccgagtggctgctgtgggtgtggtctgggccgcgtagttttatatacgtaacaaccttctgagacaagcgttagtgactccttttacagcggatgaacttgagggtcaagccagtaaataatttcctcaaagtgacagagctggaaagtggtaaagttaggatcaatactcggctttgattttaaaatatgcatatgcatatattttggagatctggatataccacttccaaagtagcatattatactgaaatttcaaaagagaaaacatctttaaacaaaaggaaataactcttaattatggagtttcaggtatcaatgtgttgctggagggctgtgatcttaaaagcatgtcacattggcaacccgttccggcaggttgtgacaagctatgtagcatgcatgaaagcatcattcattttttaaaaaatgtcttcaccatttatttctttaattttttgttttaactttttatatttataggcaataattatgtatatttatggggtacagtgtgatgtttttataatgcatacattataacaagattcaatcaagctagttaatatattcatcacctcaccagtttatcattttgtgtgtgtgtaagaacattaaaaatctgtgttagcaatttacttcattcttaatggcagactcagcttctttttttttttaaatcctagactgttggcttctccttccagcagtgttgtaggactcagctgcctttctttgctgtccctggccagagatgtgtgcactcctggtctcctaataaaactttagcctatgctgggagccatggatttggcagcactgcctttagcatttaggaatatgtttctccttacatcaagaatagttttaggccaggcatggtggctcacgcctgcaaatcccagcaccttgggaggccgaggcgggtggatcacctgaggtcgggagtttgagatcagcctaaccaacatggtgaaaccccgtctcgactgaaaatacaaaaaaatagccaagtgtggtggcatgtgcctggaagcccagctactggggaggcagaggcaggagaatcgctagaatctgagaggtagaggctgcagtgagccaagattgcgccactgcactccagcctgggtgacagagcaagactctgtctcaaaaaaaaaaaaaaaatagatttatgctgcttgttgaggaccagcagtattctcaaccatgtgaggcattcttcgaacatgtgaagcagcattttcctggatgggcatttctgccataattgtgggcagaaaaaggtgtggtccacatatgcccaacagggccaaggggcaagggtgagcatgtacctatgtcttataccccggagattcttgcggctgacgaggttcccttacaaagcccaaaggaattctcctccttccaccggaggtgtttataacctctaatttgctcaccatgcttctagtggaaggagtaggagctcaatcccctgggaggctgcggcagagccagagcaggctggtgacccagagcagtggcactcccctctgagtgcatgatgcagatggagcaggagggggatgcaggtgggacaccctgcgccctgcaggtgagtgcacagccagcgagacacccaatcagggagcaggaaggctgtccctgtggcagcaggtaaaagagagagtcgctgagatgaaattcgtgggtgtgtgcttcagcttgtttgaacagctcctgtgcaagatcttatagtaaatgctgagcttctttgtgctctgtgcctgtcggtggaaggcatagcccttgatgaagatttctccttctacccatcttgcctttggaaagggctcccctttgacaaatgctgctgtagtatttgatgcagcctccatgaggtgctttgggtgggaagtggattctgacctcatttcccagaggaatttgaagtggaggggaaggactaattggtccctcattaaggacttacaatgaagtacagtatttctcctgaaaggataatctaagtcactggataaaatgcccaacacacttttaacgtgacataggaatccaaagtcatttttaaatcaaagatttttgtagttgtggagaatggctgtgttttaatgggatctttacatatcagcattacaaagggctccttcaaatgtgatgattttaatgtttttgctggggtttcacctgaggttccaaatacatatttccctatcatatttgcaggcatccagcacccgattttagatatgcaaatcagctcactttgtttaccaggctttggataggggagaaaaggaggtctgaggctgggcacggtggccacacctgttatccagcactttgggaggccaagatgagaggattgcttgaggccaggagttcaagatcagctttggcaagatagagacctcgtctttacaaaaaataagtaaaaattagccaagcatggaggcgtgcatctgtagtcccagctcctctggaggctgaggcaggaggattgcttgagcccaggagttagaggctgcagtgagctatgatcgtgccattgcacagcctgggtgacagagctagattcagtctctgaaaaataaaaaaacaaaataacggggctgcaaaagcttccttgacgaagaaggaaagtctctcgctcctgtttaacactgcctggctgggttccagctcactagcttaaaacgagaaggcaccaccactgtgattaaaataaggccctacttaattaaaacagtgtgagaatttaataagaggcataagacttcactgatagtcaccaaaaaatctcaaaaaggtgacttaacaggcattaatagcatatgttgcttgtttactctctgtcaacattccgttttccagagacatccttcgtacaggtgaaagtctctcattcctccctctcccctcactgcctgcctttcagccatttccttgctttttgtagttaaccagtaagaaagagaccataatggagaaagaacacactgactgtgtttcacagactgttgccctcatctccacttgtgttaaagaaggtaaattagttcccctccagattaacttcagcgtcagctgtggtgctttcctgacacttcttaacatttgaacagtaccacattctgtccgttttatcgttgtctcttctcataccctgtatttgccaattctgtactcatgcccagacagatctataggtatatgtaggaggatgatgaagaacgggccgattcgtagctcaccctttgagccaggaccaaaggtttgggagtcttaggctctgaccttattcttttggagaggaaagaatcattttcctttaagcctaagtctggcaaaatctaattacaaagtttttcgattttgctattttaaaataaaagctaagccttccccccatctaatcagccctctcttcctctgcttctaatagtgaaggaaataaagaagtctctcaatttcacaagcttgaggtacttatatttgtacatgatttcctgttctaagtgggtggttttggcccctggcacttcatgtacgctagggcatttttggacacttttggtatccaccttgcttaagaattgaatgactaggaaagaaggtcatggggagtcttcaaattattaaccctcagtccaatctaagtcattagttaatgccatgtttgaaggtggtaaagtaaccgtcatcttacgaagtaactctcgtttgttatgcttagtgctgaacaaagtataaactcaccaatgtgagagacagggacaggatgcttatttctttatggatatttagaatttgagcctgtaggctgggcacggtggctcacgcctgtaatcccagcactttgggaggccgaggcaggcggatcacgaggtcaagagatccagaccgtcctggccaacatagtgaaacctcgtctcttctaaaaatacaaaaattaggtgggggtggtggtgcgcacctgtagtcccagatactcgggaggctgaggcaggagaatcacttgaacccaggaggtggaggctgtagtgagccgagatcgtgccactgcactccagcctggcgacagaatgagactccgtctcaaaaaataaataaataaaaaaaaaaaaaggaaaaaaaggaatttgagcctgtaacaccaacttcagcacaaatagatctctttcttgattctgaaatgatttatcagttttaaaaaatggtggggtgcactgctggtgggagtgtaggttgatatagtcatttgggaaagcaatttggcactattgtttaacagtgaatattcatagacccattcctaggcaataacccagggaaacttatgctgatgggtattgttcctaatggacacagcattgtttctaatagaaaaaaaaacgaagctgaaaaaattttaaaggtcgtcaacagacatatatatatatattagtctaatatatgacaattagactaatatatatattaattagactaatatatattagcttctatccctgtagactaatatatattagtctaatatataataattgaactaatatgtataatttgactaatatgtatattagcttctatctctatagacatatattagtctaatatataataattagactaatatgtataataattggactaatatatgtattagcttctatctctccagactaatatatatatatattagtctattgagaacctttatatatatatatatatatatatgcacacacacatatacacgtacatacatacatatatataattttttgcttcacagaatggaatattatacagcagtgaatatgaaggaactatagtagctacctgtaacaacatggctaaatcttagaaacaatattgtgtgaaaaaaactagtcacaaaagactatatacagtatgatagtattataaagtttaaaatcaagcacaattaaactatgtattttagagagtgatagatagaaaatttaagatagtggttacccctggagagaaggcaggaggatggcttagggaaatagcaaataggtagatggatcaaaatacccctaaatgtctagttctcaaatagggtggtcggtgtatgcctgttcattttattcttatgcttcacaggttacgtacatgttagtgcattcttttgtgggttacaaacattgcatgatagaaatatttttaaagtgatagcatgtcagaattatggcttgttttttccatctctatttcctaacattctctttccatagtccccagggagggggcttgagatcacacaggagtaattagaaggtctgcttctgacagtgtcgctccttgagtggtggaggttttagggggaggctgacagtaactactgagtggaattgagaggtgaagccagctggacttcctgggtcgagtggggacttggagaacttttctgtcttccaagggtattataaaatgcagcagtcagtgctctgtagctagcaagaggtttgtaaaatgcaccaatcagtgctctgtaaaaatgcaccagtcagtgctctgtagctagcaagagatttgtaaaatgcaccaatcagtactttgtaaaatggaccaatcagcagggttctaaaagtaaccaatcatggggaggattgagaaaagggcgttctgataggacagaaacaggacatggacgggaaaaataatggaataaaagctgccccccccaaccccccacccccacccgcaccagccaccagtgcaacctgctcagattcttttccagctgtggaagctttgttctttcactctttatgataaatcttgctgctgttcagtcttttgggtctgtgccatctttaagagctgtaacagtcaccgcaaaggttagcggctccattcttgaagtcagcgagaccacgaacccaccagaaggaaccaactccagacacagaatcagctaggagacgtgggtgctttctgtatagtgcttcctaccaaaagcctagaaaatcttggggcgtggagaaaagaaaatccatcaagtaaaggcttgatcacctcttggaaaacccatattcattgtcccaacagtgactaatacgtctaactgtgggcctgggtaggatattatgagaaacctgttcttttggtgcccacctttcttttctgagcaacacgtggtcttctgagtgaggcaggagtccggcatatgcgtgatgatgtaatatgttaggcagccaggccctcaccttttcaaaggttcgatcttgaaaaatcaaaggtggatatgtgagaaataagcccatataggaataagaatgacaatggaagtggaaaatgtaagttgggactgatgttctgctgctttgagtactgaaattctctgctgctcggattcatcatcactgaagtgctggccagtactgggaggggggcagagctctcccgggagtcgtcgcttattctgaaacagctgagcagaataatgagtgacaggctggtggtggggaggttgagtcttactccggatttccattaaatgagtgcatggaatcaatagctaactgaacatttgtctttagaacacccaggggcccctggggaatttggtattttcagtctaattctcagacaggaaaatgcgcagcatgactattttttaaaatagtttcaacatcttttatgtaatgctgatgcatctggaagtgaaaacgctaagagtttcatttcactaaaaaatggattttttttggctttaacctttaagttgaaatcacaattagtggccttttcaccatagtcataagagtatcaaagtgtgtgtattcacccacacatcaaaccagtgtttactgagagtatattctgtgcaaagaattgtgcagtttgttatgaaaaatacagagacctcgctggggcccctaaggagctcatagtctagaaagggagacagatcattacacggcagggaaaatacaatatgtatgggagcatgtcacaaaggaagtgacatcgagctgaatcttaaaggaagagcaatgcttgaatgaatgaggacatccctgattgaaggaccagcataatgaacaaagaattttgccttatattactaagattccatcagatgttatgacgcaaacataagcatcatggtaatgaaattaatagtaaatttaaataaaaatgatcaaattaagacttttttggttttgtctattctaccttctcattttaattatgttgcaaagaaccatatacttagggtaaactggtcaatagctgtggccatggaatagaattataattcaatttaaaaggagtttaatagtctcatggtaaatgaataggttacagctgggcactgtggctcacacctgtagtcccagttctttgggaggcctaggtgggaagattgctggagaccagtagtttgagtccagcctgggcgacatagcaagaccctgtctctactaaaaaattaaaaaaatagttgggcgcagtggctcacgcctgtaatcacagcactttgggagaccacatgctggtcgagaccatcctggccaacatggagaaaccccatctctactaaaaatacaaaattagctggacgtggtggtgcatgcctgtaatcccagctactcaggaggctgaggcaggataattgcttgaacctggaaggcggaggttatggtgagtggagattgcgccattgcactccagcctgggcaacaggagtgaaactatgtttcaaaaaaaaaaaaaaattaaaaaattagccaggcatggtggcgtgtgcctgtagtcccagctacccaggaggctgaggtgagaggaccacctgagcccgagaggttgaggctgaagtgagctgtcatcacaccactgcactccaacctgggaaacagagtgagaacttgtctcaaagaaaaaaaaaaaagaatgttatgaatttagtatttttatacttcccctacaactctagtatctctgaggaaaagcctcaatcagaaaaatgatttgctttggggttttatcttttatcagtgataaatgtgaattgagaatagaaatctcaaaatgcaataatgatagtactttatatttcagtaggacttaatatataaaactctaatatgcattatttaaatttggccaatatgcaagagaaaagcaacatagggcagaattatgagtttgcttcgtaaaataactattaccagttcattctgttcaactatgtactggtagcatttgtaaacaattcattcttattttttttccaaagtgcattgcaaaatagtcttgcctgtattttcctgtttgcagtctatttcattaaatttctgcaattctaaattagaatagcatctaatagaccacatatgaaatgtgcttgctattaattcagacattttatggcatattcattagtcaaatccttagtatttatttatgaagtcacattactctgtccagtaattaacagaagtggatgaatatgcatctctaattttttttttagcaaaagaaatagcttacagtaagtatttataattacgtcagctcaatgtttacagcacttgaatggcgatatgtgtagtttctgtcatttagacttcatagataatttttgtacagaaatgctttgttgttgatgctttgcttccttcacacatatatcacagattaccgaaacaatcattagtccttcagttgcaacggataagactcttctttatccttaattttctgagctcctttctaggcattttatgttcttacacagatgctaatgctaattaatgctttaatatgaaagatactggcaaataaaactgttacattttacccataagttgtaaattcagcttagttgccctaacaatactgatagtgataatggctgtacaattaatatttatggagtgcttccagtatactgagctctgtgctaaacattttacttatgtagcttagttaactctcgtaacaaccctgtgaggtaggtgttattagcccgtttcacagatgaatttgtaatcattatgccttaccacatttaataataacattctctattaatcgtatatttcagatgcccagctctggaactttgcagtatgaaacgtgtgtgtatgtgtgtgatgtatatataatatataagtatgtatatataatatataaatgtagattatataatatatatgtgtgcgtgtatatacacacatttcttttttttgttgttgttaatttatgtgccacgctgctgtacgaaactctggggtactatgatgaggggatacctctttcttgcctttaagggacttaggttgtggtgggagagatggacttggttaaggaacaagtacaggaaaatatgataattgctttaatagggataggtacaggggttgtagaaaaatgagagaaaagggcccccacttcccagaaggtgtcagggagtttttcacagagaagcgtccccagccctgagacttgaagactgagtgagtttgaaaagatgatgtgtggggggaacagaagagagaagggtgtggagatgagggaaacaagatggggtcagggagctacagggagggacttggaggtgctgagggtcaagtgcagcaggaggagagacccggctggctggggtcagagctcaaggagccttgcatgttacccaaaggaatgtagatgtcatactctgtgtgctggaaaacgatttacagatgaatccaatcaacactaattaaatcagtatgattaagggatgaccttcctttcttcctaccttcctccctcccttcctccttccctccttctttggctcatttattcactcagaagattttattgagtgcccataatgtgcaaagctttccattgaatcccaaagatgaaaggaggggtgagagtggacacagttctccctttctggagtttattgattcgtgggggaaaacaagcattaatcaatgaatcaaccaaaaaatgtaaaagttacaaaatgactactataaccagggagggtcattctatacaagtgtgtcctaggaggtggtgacctggctgaggaagtctcccttgagaagaggactgagctgagagctgaaggagaaaagaatacaaggtcatttgatagaaggggtgggtgatttgaggagaagtcttagcaaggaggaagtcatgtgcaaaggctttaaggcctgggaaagcaaggtccttttaaggaattgaaagtaagccagccatgctgtagtgcaagttggaagagaatgcaggttttgggggccatgtttagaaatggaaagccactgcaatgccttaggcaggagccaaggaaggtagtagggtggcagggtggacgcggggagacgtgttagggggccagggaaagagtccagatgagccagggtggtgccggagaggagcggagggagttgaggagtatggctgcatggttgaatatggggcataatttgggagaggaagacgtcagagtgatgttgatgccatcactgagctaggaaacgtaggtgaggcagaatctattctgcttagatttccagaaaacattaggggatagatgaggatgacatcacaatggaatttaagctatttaagctcaaggttggccttgaaaaatgagtaggaattttctttttttttttttttagacagagttccgctgttgatgcccaggctgtagtgcaatggcacgatctcagcttactgcaacctctgcctcccaggttcaagcgattctcctgcctcagcctcccgggtcactgggattacaggcgcccaccaccatgcctggctagtttttttttttagtatagatggggtttcaccatgttggccaggctggtctcgaactcctgacctcaggtgatcctcccgccttggccccccaaagtgctggatttacaggcatgagccactgtgtccagctgaaaaatgagtaggaattttctaaatggcaaggagaggcaaagcatgttaatcaaagggagtgtcatatgcaaaggcagaggcataacaaaaatagtgcaaataaatgcctacacatatacaaaaggagagttattgtgggacccatacataattttgttgatttcttgatatgctcatatccattttgtgttgcagtgattctaagatctgtattagtatgtagactttgtgaacaggtaaacatgtttaagaattttttaagacatggctgtattagatatcgaaattcctctcttcattttcatatctttactttggaattcatatatgccttttgatgttatcatctgacttgtttctaatgaaatttagccgcttaggcaggacgtggattttaggtttctgcttagtgttttggcatctggatttgggattacttagcatttttaatttactaaaataaccaccaacttacactcagttgaaatatgaacatgtcggtttcacttgagcttgggaattaaaatcaaagtacagtcaaatccaaaacaaataatagtaattttaagactaggtgacataaccctctgggaaaaatgaggtgatagtgatttgatactttttttttttttgagacagagtcttgctttgtcaccaggctggagtgcagtggcatgatctcagctcactgcaaactctgccttccggttcaagtgattctcctgcctcagcttcctgagtagctgggattacgggcacgcaccaccatgcgtggctaatttttgtatttttagtagagatggggttacaccatgttggccaggatggtctcgatctcctgacctcatgatccgcccacctcagcctcccaaagtgctgggattacaggcatgagccaccatgccccagccccgatatgttttaatactaactacagaagtgttggtagaaagatcagccttgaagagatggtatagtactagaatcctaagcatgacctctgtgaactgttggcttaagtactggctttaacatccgttggctgtatttactgtcagttttcttgtcaataatgcagaggtaaacatgattcctggccacctcacagactgcagtggagtggggcaatgtgtgtaaagcccttagcacatggcccagaacatagtaaatgtttaatcaatgttcgtgatgaccttggccatcactgacatcatgtcttaactgagttattaacaaagaggcatgtgtagtttcaaaagtgaaagtgaggccggaatggtaaatacatgcactgaatttgcataattttgtggctagaaggagtcttagagaaagagagcatcaaattcagcaatgtttctgacattttctatgaagaactgactgcttgttatttcttagaaatcttagaatcattgagcagggaaggaggggcaggaacgggattattttgatagtggtgtcctcaaggggaggagatggggtgggaagcaacccctggccagaacccactcatccctggggatagggacctgctgtgtctctgcctgctgagtttttgacattctgatttaaaaaccttgtgtgtgtgtgtgtgtgtgtgtgcgcatgcttgcgtgtgtgcatgtgtgtgtgagagattatgcaatatgatgtttcccgtttctgtgacttcagcgaatgtgaatgaagaccacagaagcagcctaactcagtgagaatattgtttttataattacaggtctaggcgttttacactgagattctccactgccaccctttctactcaagcaaaatcttcgtgaaaagatctgctgcaaggaactgatagcttatggttctccattgtgatgaaagcacatggtacaggtaaacatctccaaaagctttaaaggaaaataattatcattgagttgtaaagtccccaagatagtggtgggggtgtatacatatctggtcacacaaacatacacacacaacatacacatgtctattcatgtagactccattttttcctactgtctcttttataaaaatggaacccttgcttttttatgggaaaggaaataacttctacttattttgaggtcactagttaggatagatgacaaggcattgctgataattctgaaggcatttataaatttatagatttataaattcacttagagagacaaacatcaaatggtagtagagattgtagaagtagtagagattattaagagtattgttcctcttaacaatataattctgaacatctttcatagcaacagatatttttctaccgtatagttattaatgattagtataccattgagtaaacattctaaaatttatttaatttatatcccttctaactggacagttagccgtttctaatttttttgcctttttattttcttgagatagggtctcactctgtcacccaggctggagtgcagtggcatgattttggctcattgcagcttccacctccaaggctcaagtgatcctcccacctcagcctcccaagtattaatagctgggactacaggtgcacatcaccatgcctggctaacttttgtattttttttttttatatagtgatgaggttttgccatgttgcccaggctggtctcaaactcgtgacctcaagcagtcttcccacctcagcctcccaaagtgttgggattacaggcgtgatccaccacacccagacattttattgctttcatgatgccaaaaatattcttatagctctgtattagttcccattacaaattatttccttaggctaatttcttagcagcatactggtaaatgtaagagttttcaagttttacggcttttggtaacttgttgccaaattactttcagtaaagtcataccagtttgtatttccagaggcagtttatgagagcgtctacttaatacagttttccaatgctgagaattttgaaaacaaaaagagttttttgctgactgattatgcaaaatggtgtttccatgtattttgggttttgggggtggggggggtcatttgtaagtcaagtaaattgtactgttttgtagaaccttcctccattagacagcagcatccttgaaacttaccagatttcgacatttcagaaataatattaaatccagaaggagtagaagggtcctagggaattttaagttcttcctttctggccaagtatttttagacaactatgaaatcactagatacaatcatttttcagtggaaagcataatttttcatttcttaaaaagagcaaaaaggtatttaataaaaaaattttattagatatgtatctgaagttatactgctcattagtttaaaaatatgtatgtgcctatatatgtatgtgtgtgtgtatatatatatatgtgtatatgtgtgtgtgtgtgtgtgtgtgtgtgtgtatatatatatatatatatatgtccaatatcgggaacatgattaaatataactatgttagtgccatatgatggaaaagctgtagataagattgcaagcttcaggctgcctgggctcaaattccagctctgctgttttcttgaagtgtgacattgggcaagttactttgcatgtaaaattcggataataatagtacccttctcccttgggtgttgctgcaaataatatatatgaaatgtttaaaatcgttaaaactcctatttcaggagtatttaatcatttgagaaaatgatcaatatagaagtaaacaaatgtagggtattggcatgaaccatagtataatcctaatcttccaaaattactttgcctctctttcctccctcttttcatcctcctctagtatctacaaaaagggtttagcatacttctgaatggatttaatttgtattagtggagtaatcccagtcctggagagacttcctgattcaagttttcaagtcagagacccatttttcacagagctttgaaaccatggctgtctggatcacctggctgggggcacccttggagcagccgttgggtgagagcagagcttccttcccagccagggctgcctagctcctgtggtacagcaagtgccttgggcacagagtccctcaccgtctggcaccatatgtgagctgccctagttggctcatctcttcccgtcattactaaataagcttcatttcactaaataaatgaaagagaaggtagatgaagagacccccccgccacacccagctcttaggaaacgcatgctttatcctacagatgcatgaaggggaaggctgtaggtttgtgaatctcttgaccctttggctccatcgtaacgttgaaaagtgaaaggaaaagtggtcaaagaatcatttggcatgaaggagacaaacacagaacgacgtgtacggcttcagcctctgcctttcactggttaccctgctatgagcttgtgtatgtagacgctgcattcgttttggccctaatttctggtctaatttgaacagctctgtatttctcagcagaagaggaatatctgaattcctaattaagacatgttagcttaagaatacctccttaatgtgtcataaatcattcccctgtgactatgaggatgaataagaaaacaaaacttggatttatacacacatgtatattatttcaacaaaattaataagttcatagagggagagaggacaacaaatgtgttagcaaatataggtcaggaaaagagttcataatgttctgccagattctgatgaggcacctcatgagtgtaggtagaaggcctcaagtaacggtagtgggaatggtaataacactaccatatggaacatttggtatttgaatagcacttagcttcctcccaaactacaaaatcaataaagactcagagaggaagaaaggattctcttgctgtggatcactggctggtgtgcagaaatgcagacgtgttggttgtcaagggcttaccagaataaatttctctagggagacaggagagtgggaaatacttaaccatattaattgtgctgtgacctcagatctgtggtcagcagtttttggttgtttccatatactgcacatggttgcccacaccatttttgcattcatgtacaagacctatctgcaagaccaggcagaatcattgttgaaatcttagttcgcaaagtcccatggggactttggggtgtcttaggattttgccagcacaaagttaaagcacaacttttgaattgtgagaaactgagacaaggtctttaattttaatcccattcagtcattcctcactcatttattaatttagcaaaggcctttttaggggcagctatgtcccagtatagggctgggcattgaagataatggaggaaaacaagattgacaaaagactggccctaatggagtttacagttctcagggagatacagtcaacaccatcataactggtttgggggaacaggggagatgaactggaccattctaaaaggaggcaagaggtgcatctgaaattggaaactggagaaaccaggggagacagacctgttgatctggaaggcatagaacagaaagaaccagagaatagtcagggactgacaatgaggttgtgattgttgacagccggaccaggccaggaaatgaagaaggtaaggagagaagcgtactgtctaacacccctcgaatgcacagttgctagggccagtaaagatcatcgggctactcatctctcaatttaggtaatgtaaatgatgcatcttattgacaatccatatccttaagaaattgtgaaatgagtcttttactttttataactctacaaacatgttagaaagatggatgtcaccgtgtctttatcacagtatggtgatttttcttaaccacccaaaggaagaatcgaggtgcaccagaacacgtgtaccttgttctcttattaaccatatcctttttcttactttacccactataattcacctcagagagtgagattaattatataattaatcctaccttttgtgcacatgcataattaactttatttagttcactttaaacagattttaggttccagatctaaataatagcccctccatttgtcacatcttgacctctttactatttggtacccttccactcagcattgtttgtgggattgtggttcttcttaccttcctccctccattcctgggtgcttttagtggtctcttaaataacaggctctgctcagagatttcttttatctccttaggccttgacctgcatttggtaaaggctgcatttttagcttcggatttactgtctttgacgaacctttttctctattgtatccctccctggtcagctgctctcttcgggccctcaaacatccaccacgtactctacccagatgttttcttctttctttaacatgtccagttgagttgcccatatcatcccctactccccatccacacacccacccagcacacacacacacacacacacgcgcgcacacacacacacacacacacacacacacagtgcattctcgaacatggggtcttttccccttcaggcaccgtatgtaacccaccccgcccctcagctcttaggaaatgtttcctttatcctacagaaacacaaaaagaaaaactgtagggttgtgagtccctctcaacccttcgactacatctatatcataaggttgaaaatgaaatgaaaaaggttgaaatgtacatttctaaggttaagaaaatcctactgatattaagtatttaaaacacagacttccccaaaatttatctttcagcataaatatgcccttcccttttctcccacccttccttcaatctgtagatagcctccataattcatagccagtttgggtaaaggcattattttgagacatttaatgatttttttaggaaaagcgaaaaaatgtagggtcaaagattcaagagtatattgtgttttatatgtaggcgtagcttttaaactattttggatactttaaagttttaaaataacttaccaggcttctttatgaagcattttattctttgaaagttttataaataatatgatttctggtgtcagtatggaaacattcacatagttgtaataactctcatgaaataaggtagactattccatcatctgtgtttactcttaaaacacattagaaaatggttgatatcaaagcttacaattttgtctttcttattgctaccctaaagcagactgctgcacagaccttcccctgctacactaatgctgctttcaatgttggcaaaccatactactcaaagtgcgggcaaaactcgaggtagaaatccaactttcatacagctttatcaaaatgacagtattctatggtacttttcaaatcactatttttttctcttagaggttatcaaatgaaatgaagcatttaaatatgttttctaaattcaggaatgtgagataggagagcttttgacattataggattcagcggtggaagagaaaatgaacatccagttccctttctccctaactcaagatctgtgctccctgaatatcattagtgcttctcatttcatcagtgttcaaatagtgaatcattcattcactgattgttgaaacaactgttataagatttggaaataatatacagaacatcttggaagtactttttttttattagcaagaagcagctatatgccaaaagtattaagaaggatcatctcttcagaataagtgagaagtatatcactggtaattttttagatttttgctgaatgttttagtaaaatttgggaaggtagtttttttttgagttggcaattatatgctgtccctcttgttttctcttccaaaataatcattcttctctctctctctctctctaaaatgggagccacagagccactgtcagaattgtatacatataaacctgagaacattgcctggcctggcacatagtcaatgctcaataaacatttcttgctactgtatctactgtgttctgttccccctctgttcaacaccctgtattttttcctggtggagattttcctgagtacctaaacaaataaacatagccaaacaaaacaagaattcagtgctgatgccgtgtgctttagaagctgggtctgtgcttgacttgactgacggagatgtgatactctgagtgtgtctgcagataaagccaaattcaaaattcaagtgaaacgcccttggacttgggaatgaatcggcgggtggggggggggggctttgaccaaggtactcagtgaccctgtgcttccaagttctccatctgtaacatgagtggtttgctctcagaggtttcttccacctctaaaaattaccatcattttgcaaccttgatgctttaagactttgaagtccctgtggaaaagaacctatgaaaagcggtcactgtttctgttttccccgtgcattttagtggctgcatagagtgttttttggtgtgtgtcttccatcttgctcaggtggagctaatgacctccttctccaggatagacaataaaacaaaccaaaacaaaaacactctgttcatgcacaaaggcaaccctcttccagatgcttaaccccttaaatgagtatttcgatgacacagagggatcatcacttcacttgccactgaaatacagccatctctggagtgaaatttggcagctgggaagtagtcaagctgcagtacttatatgacagtttggggaaaaggagtgagacagaaatagcagattccaaaataatcccattaaaacagcagggaaagtggaattgggcaataagatgggaggatggtttgccccaaagtctgactgtcctgtttagacaatgcggacttcagccccagaagctctaacttgtgtcactgctggaatatagtgaccacagtcaagaatcccctacacacaccccaaaaaggggggcttatctaatgtcccattgatctatcgtcttgtgatttttttttttttctctttttcctgctactctagttatcaggctgtgctggcacataaatggatctgtctttttaaagctacctcttccttttgccccctgcataagatagtgttgtaggtaagcatgttataacatcagaaagtactcagctgagaaggagtgatgttaaagcaccctttgggctggctctggaaggatgaactgactgaccagaaaggaaaactcttctgtttaattccaggatcttgggaataacagtgacagagaaagaagattcgagaagtagatgtggttgagtacaaatgtagaactcttcagattttctggaatggggtagccattgtgataaatattaggatatgagcgtggaagtcgtagtggataaatttgaaagctactcagcaatatgtgcagcaacagtttttaaaaagcaaaaggaagatttgtcaacatagttagaaatcctcagatcctcagataatggaacatcatatctctcaaaaggaagattccagggaataaagaaagcagatgataagggaacctgggcattttagtttaaccagaaaatagaacgttaccaaaaaatttagagattaaagagtcagtttcatttagaagcacataaaatgtttatgtaatgagcagaatttatagagtctactattataaaatagaaccaaaaatgaattcaagaaaaatgtaataaaattaatgtagtgggagaaaatgaaatacaatatcagaaattctagttttgaatctcagttctgcaacttatcagctttgtgaccttagggaaatcactcaaaatctgagggttttttccgcatctctataaaatagaaataattataatatctgtctcacaggggtattgtgatgatcaaatgagataatgcattgaaaatgttttgtaaattgtagagccctctacatatgctatttctataactctgcaatttcttatggcatggagtgagctctcagagacagtaatcacatgtggaaatagcttagagaagcagtcatatcagaggcaaaatctattgtataaaaatttaaaaattcatatgaattattttttctgcttctcatttttctggctcagaaattcttctatgtttacagaatttttccaaaaatattctggtaagccctgtaacagaattgtccactctctgttaagcggtaaaccacatgattttttttccttttttttttttttttttgagacagagtcttgctctgttgcccaagctggagtgcaatggcacgatctcggctcactgcaacctctgcctcccaggttcaagcaatccttttgcctcagcttcccaagtagctgggactacaggtgtgcgccactgcacctggctaatttttgtatttttagtagagatggggtttcactatgttggctaggctggtctcgaactcctggcctcaggtgatccaccctcctcggcctcccaaagggctgggattgcaggcatgagccaccgtgcccggccaaaccacaagattttatagtaaatattgcctgtgagtaaaccttgaataacaacattaaagcagaagactgctatcttgtgtcatttgataatcctaatttagggaggtctgggcagagaaaagcggggtgtgtctgtggtctggggacaagagtaatgtaagtagcatgccacatgatgaagactgaaacggagacagtgaagcacggtaaatctttactgagtgtgggctggtgtgctgaagttccctttatgcatcagcccatctgtctcattagcttctctcttaatcacaggctccatgaagtgtctacttgtctttttttagctttttatgtcaatctcctataaaagcaaaaggaagtcaactggcctttatgctgtttgtgtatactccatgcatgctcggggtggggccagctgtatttataaatgcatgctaacatgggggttactctgtgtgcataagagcttatttgtatgtgcattcatgaatatgtgtacatttgggcagatacacaaagacacaacacatatgtgcctctgctgtatgctctcttacatggaaaagacacattgacattaattagaaaaggtgatatgaaacagtgaaagtaaaattcctttcggcagtatttactattgtaattaaagtgcatgatgtaacattatatgtgcaggagaatttgcttattcatcctttagaacaatagtaggagttacatattaacaggtttaagtgtcaataagtgtctgaatacagattctctattgtgtgcagttcttgtaataaggcagtgtattttccttgtgtctttgcttgcttggaattgaaaatgctttggatgaagaatgttgcagagtgtaatttgtggcagaaaatatgcccccactgtttgtttattattcctgaggacatttgctgggctgaactatcatatgtagaaaagaacagctttgtttggaaaatactgtaagagcagtacaagaaaattgaattaagtaaagagacttagggagtccatctttctctgatgatattccttatttgctcttcattattccctgtgaaggaataaaaacgatgaaattggatttgaagactggattaagacaaatgacttttcagatttttttttttttaccttagctgtttccaattttcctagaaaagcacatagtcactatataaagagtctgagtttattgcattaaatcttcctaaatagtgtgcccttgaggtttgatgtggggaattagtttagaagattcaggggcttggagtacctgctaactgtgtgatggcgtgtgtctctagaaattttatatgcccattgatttttatagagcaagcagtacaatagaagggaagcaggatgctgcttggtcttaaggaagtctttcctgcctaccaattgccacacccctttttctccaggtagagttgactatgttttcttctgggccattgctgtacttgcctaatacttttaataaggacttgcaaatgtgcctgtaggtctcttctaactaggctgtaaaccactcggacagaggaattgttttatttcttgtaactctaacacctaacacaaggccctcaagataacctgtcaaatgaatgaacagatgagctgaatacccgctgtgtgcctgttcttgtcttaagacatgagggacaacctgtaacacaggacacaatgtggctgtgtctgctctgaaatggtagaatatctagctacagcttagaataactgggtaaggaaataaatgctggattataacccaaagaataaaatatccaacgagtccaatgaataaataaataagggaaaaggaatgactcttccctgcagcagaatttcagttaataaacaaacgaggaaggaagcagtatgaaaacatcattagaactcatagtaagaattgccacgagaaagtcccaccgatggatgcattagatgggcagatgtggattagatggattagaatgagcgggcaaaagtatatgcagaaacaggaaattcgtagaattttaaaatatccctaccccaaacatttagtaattacaaggagaaaaataaaagtttacggtgaagaatcctggcagacatcaccttaactgagtgatcaaggttaatgtcaccagtgatacatattgacatcgtgtgtcccactgagaagggcgtgtcatctctgatatcctccctgaaaaggcataatctcactctaatcaagaaaaaaatagcaaactcaaatggaaggacattcgaaaaaataactgacccctccccttaaaattgtcaaggtctttaaggataaggaaggattcaggaactgtcacagattagcagaaactaagaaatatgaccacataaaattctaagtatgatcctgaaacaggaaaaaaaaaaaaaaagcctgtttggtgcaaaaactggtgaaatcctaatacaccctacggtttgttgagtagtcgtgacccaggttaactttctagttttgatcgtggttctatggctttgtaagctgttaatatagggggaaactgggtggaaggtacaagggagctctgtactatttttgccgctttctgtaaatctaaaattatcttcaaaaaaacctagttgacacttaggtaggccgaggtgggcagatcacttgaggtcaggagatcgagaccagactggccaacatggtgaaaccccatctctactgaaaatacaaaaattaggccgggtgcggtggctcatgcctgtaatcccaacactttgggaggccgaggcgggcggatcacctgaggtcgggagttcgagaccaccctgagcaacatggagaaaccccgtttctactaaaaatacaaataaaattagctgggcatggtggcgcatgcctgtaatcccagctactcaagaggctgaggcaggagaagcacttgaaccccggaggcagaggttgcagtgagccgagatcgcgccactgcatgccagcctgggcgacagagcgagactccgtctcaaataaataaataaataaataatacaaaaattagctaggcatggtggtgtgtacctgtaatcccagctacttgggaggctgaggcaagagaattgcttgaacctggaaggcagaggttgcagtgagctgagatccggccactgcactccagcctgggtgacagagtgagactccatcaaaaaacaaaacaaaacaaaaaatctagttcagggcacaataccaatccacaggaagcaattatagagcaatccatgacaacagacaactgagaatttgtaatggggtgccagtgtcaggttcagaagaggaatgagaaatggctggggattggagtcttcaggaagagcttcctatgagaagcaaagcctgacagggaccttaacaggatgtgtagtgatgatgggtggaggaaactgaggggtcattgtaggcacagtggcagcagggacaaaagcatgaggaagggacacagatggcctgcatgggatatgttggaggggccagcggagttatatgtgcattgctggagattggtatgaaagagaatttgacagctgtggggataacagagctaaaggatcactaagacctggcggaggaatgtgaagttaatgcaggaggtgacacagagttcccagttcttgtttatggaaggggctcagtgagtttgtgtgtatatatctgaaaccggtgacaatgtatgtagggtggccagagttgggagaaacaggggacaggcgagtcaggaattaaagataggtaatgggagcctattcgtttgagggtgttgggaggatggcaggaaaggaaaagggggcaacatattcaaaggtatttgaagggataaaataatataacttagtaattgttggatttggagaatggagaggaaggagtcaaagatgatttctgggtcatatttactggacaggtactattggtgtccataactgaaataatccattcagcagatatttgcatgcctacatcgaggaataatgtattctaggtgaggaaggaggattaaaaagaatgtcaacacagcatctgcttacgctggaatgtgggccagaaagcctgtggcttaggctagactgaatgaatggccaggtcagcctacttaaggagtccctgccctccacataaaaagaagggaaagattgccctactctgttcctagcagtagccatgaacagtgttagaagatctttcaaactgacacttctgtcctcttgataaaaatgtcaggtctactgttggaccatactcataaaaactctgttaaatcaccattctacttaggaaaaggccattcatgccccacttaactctgccaagatagaggatgctgtgttcccaaggtaccaaaactgaaagttaaaatgccataaaagtatactgaactttatagaagaaaaaacagaaaaagtgtatgcatgcttaaacctcaaactcttgatcttcaggtaccatgtcttttcaacgtagataatatcacctagtgagcacaccctgaagtcatgctctggctggctttgctgtgttctttttgttttctcttgggcttgtgtctcactctgtgttgggtaggaaagggtttctgtagcctttatacccttgttttcatcacttatttcacgaatttccacttattactcaagaataaccatatttttttatctctatgacaagctgaaaacctccctgtcagcaattatagcctgttagccctcacagagtcagtcttggggaggtatggccttgcggttcaggggcagaaccgtaggtgtattcacctgtggaagacttagacatacacatttgattatgggtggcagtaatcagatttatgttttgaaggtcttcgaagatctccgtccctttctcagtcaacattatacatcattgtttcttaacagttgagtccttataccttttttggtatcagtcggtcattaggccaagtaaacattttattgacaataggcaactgaggagaaaattaaccctttttatagttaattgtaagtggaagttgcttgatattcttaaaaatatgaaattgtggaagttctggttctagtctgagaattgagcattgagcatcacctttacaacatgtagacttaaacttcaaatacctttatgatgctgagaactccccatggaataggaaccggccatggcatatctaaaacatgacttacatagcattgcacgatataatatgaatgcatgtttttttgtagaatttagaaagaggctgaacgtgatggctcacccctgcaatcccagcactttggggggctgaggtggaaggatcacttgaagccacgagtttgagaccagcctggacagcgtagtgagaccctatctctacaaaaaaaatttaaaacttagctgagcatggtggcatgagcctgtagtcctagctacttgggaggcttatgtaggaggatcacttgagtctaggagtttgaggctgcagtgagctgtgatcgcaccactacactccagcctgggtgacagaacaagtctttgtctctttaagttttttttttttaattagctgagtgtaatgttgtgagtctgtagtcctagctgctcaggaggctgaggtgggaggattgcttgagcccaggagttcaaggttacagtgagctatgattgcaccactgcacaccagtctgggtggcaaagtgagaccctgtctctagaaaaataaaataaaagaaaataatgtataaaagaatgacatcttttgtagagcggacattggaaatggcagaatactccatgaagtagcctctagattccctttatgggcttgctgtggaagcacatatgttcacattggcagaataaagactctttttatgtccttttaaactaatgtattgacttcagtattttttttatagggaacatatttcaaaattgtaatggtagtcaatggttctatgtaaaaatactttgtctttccacagacccatatataccagccaggtcaccttcattctcagagtgcctgatgagtagagtgcattcaatacaatagctgtcttgtttttttagcagcagaagtgggagtcacatgctgaactcgggaaccattttgaatttattctcatagcaattgcaaggtaaaggcaggcagaatccttgctgtgtaaccctcaacagagctccataaggattgggaaatcaggccatgctttgtcaaagagagggtgcacacaggcatcaaacaggtcacttctcttaattcttaggccaccacacaggaagcacataattatttaatccctggatctttctagagatgcaacaaagtgatgagggtggacagctccagaaaatcgctgtgcaaggagcaagggtagaaagctagggttttggattagacagactccatttcaaattacatcttaacttagtttttattgtaccctctaacaacttatgaataaaataaggggaatatatagagagttaggcgtggggaatggttacaacttatttctcttcttcactttcatctgtctttcttcagtctcttctcccctcttccattaaaggtaaactgaataaatgaatagtgaatgaatgaagtgagcaagctgttttcaacaaagttcacttggtgccacttccatggatttagttataaaagtgatatgatcctagttatcttaggcagaatacatatttctgtgaccctaatctacgtgggtcctacttgaaacctggaaatgataggaaaaaccttcttgggaaggagaaaaatgaccaataaaaaaattctgaattatacttatagatgaagccctggtgaacccagagccctgttgactcacaaggacactcaaagtaagattagtgattcaacacattcacttcttcagtttcccaaatagattagaaggaataagagggctttcttgggttaaacttactaaccacagtgaaggaaggagaaaacctataaaaacttgaagtattataaaatctcagcggtgtgaggccatttcgtttgaggacaaacaaacctagtggattgtccagggcaggtgaatgtaaaggacatttcctgagatgcaacaaagagatgatggtacaatgggcaaggatgttgcaataacaagcaaccccaactcttcagggtggaacacagtagaagttcctttttgatggtgttacggataacttggggtgttctgcagttggagagggcgtctgtatggtggtgattccctgacccagggtccttgtatcgcaaggctcagacattccctcagtgttgggagaccctaaggatcttctgcacctggcagaagagagaagtggggaagcgagagagtgagcagtctcctgggaggtttgttggtgaaattggcatataccacttccttccatgttcccttgaccagaatttagtcatgtggacatagtcaactgcaggtaaagtggagaattgtcagcctgtatgtcaaggagtacagggaaactgttttttcaacaactaaccagtttctgccacaactggataccttcctgacgtcatctttactcccatcccagccccacccgagatttggccatgagtaccctgtaatttgcagggcattatatctctgtctcaggaacagcaggagaccactgagtcaatcggaactgttttttttttttttttttctgagacggagtctcactctgtcgcccaggctggagtgcagtggtgtgagcttggctcactacagcctccacctcctgggttcaagcgattctcctgtcttagcctccccagtagctaggattacaaggctcacaccaccatgcccagctaaattttttattttttatttttagcagagacgaggtttcaccatgttggtcaggctggtctcgaactcctgacctcaggtgatccgcccaccttggcctcccaaagtgctgggattacaggcgtgagccaccaccacgccaggccaggactcttcatcttttaaaccacccgggtctgaactgacagtcccttatgttatcttcatgggaagaagagcaggcagtcatgtgtggctccccatgaaaaggcaaggaaccttctagatactgccgctagaaaccaggtgtgggatagaagccctgcctttgatctatacctgttggtcaggaacctgcttctactttacttcattcatctgcacttcttaggagctgggtcctgttcttgtttaccattactaaattacggggaaattcctgaaattatccagtcctcccagatggttcattctttgtgtgtatacccagagcttggtcatgtccccattcctctctctcaagattagatctgctgtcaaaacctagaaacaagtctttactgaactgaactctttattagcctttgattgccagataactggacttgggaaggggagtttgggaaaaagggttaactatattaaatttttttggtgctctcttatatgggctgggatgaagcatttagacagtgggagaagtataggagaggcagacagatgccagaaaaaaaaaactttggttgtttccaggtaccgaaaaagaaagttcatttgtaagtcacccacctcctcatgatttcttcacctcctgtcccctgctcatggtactagagtttgtctatattataagctctatagctctttttgccttcctgcaaaactaagcactatttataacactgtttctctgagaaaatgtgtttggagtttcaaataaatgacttacaaatgaactttctgtatacaactcattcatacattgagaactgcctgtaccgggcatgtaacctggagataacttttatctctgctttatcaatatgggcttgtcaggttgacttatgtgtacttctctctgccttcgttttgatgatagcctctctcttaaaatttaatactctctttatgtttggagaaacattccctttggcagcgtttcaaatattcttgcgaattggaatagtgattttattttatctcccaatgtatctttaataggattcatggctatgaaaatcttttgcacagtccgcctataaattgtagaaaaattgagaactatttaaaagaagggggcgcagaaataatccttttctagtattactctgggttgtcagatatctttgcaatataattactgtgttggtttttaaaggttaaaagagctctgacgtttataattctcttttgtgtgtgtgttctacacatataaggggaaaatctaacacatggaaggaaaatactttagttaacataaaggtcctgagcattttatggtttttcaatacagagacataattcatggattttatatttgcttttacagatatctggtgaatcagttatttgctctgtggaaccaatttgcagtttacacaccttgtttatttctaagctgtgtgcatgggtaatgtgtgcacaaaaatactcttgctgacattagattgtaaagtaaaaaggcggaacactggtcctggagatatgccttctcagggaacttactatccatatacaagtaaaaatttctcattgttagcagagcagctgacagaatatgatcacaaatgttgctgatgctgttctgttaggaggtagaaatagaatgcctaggactatgcaagcttgtcagagttagattgtcagggtgatgtgcttccatattaaaaagaatactttgttcccccctcacacatgcacccttgcagtggaaagaaacatttatttcagaataagcgcaagttattctgacttgcactcacaggctcagactttgatgccagtgtagttaaaatttagtgaataccagtcatgtttaatggtctttcccttctgtttaaaacagtactgcagcccatgcaagaaacatttccctttaattttatgcattttgtggtatcttttgatggtttttctctactgtcaaaactgtgagaataatttcaatggcatgttttttctgccatcttcagttggcagtcatatccccccagattgtcctcatagattccagatcacctttatgtttaatcttcattaattgacaagtacctttgaaagggttttgcaaaaattgaactgcaaagctgtgatttaatacaaggaaggctacatcagtgtgaaagaaagcactttatgaactgtagagtactatttaaaggtgaggcattataattaaatatgctcaggttgttactgagcattgaatgccaaagcatatgaaagacaacttacgatgccaggagtttgagactagcctaggcaacacagtgaggacccacctctacaaaatgtttttgttgttgttgttgttgttgttgtttttgagacggagtctcactctgttgcccaggctggagtgcagtggtgtgatctcggctcactgcaacctttgcctcccagattcaagcgattctcctgcctcagcctcccgagtagctgagattacaggaacccaccaccatgcccggctaatttttttttgtatttttagtagagacggggtttcacagtgttcgccaggatggtcttgatctcctgacctcgtgatccgcccgccgtggcctcccaaagtgctgggattacagtcgtgagccaccgcgcccagcctgtttgtttgtttgtttgtttgttttttaattggccaggcatggtgagatgtgcttatagtccagctactctggaggctgaggcgggaggatcgcttgagcccaggagtttgagattacagcaatgttatgagagtagctagaagttacaccaatgctgcaggagtttgggggaatccagagttgtaaaatgccaacaaaaattattaattaaggggatctcttagccgtctctttgaccctacaaaaaacatggtggtactgagttttttagcctcacccaagcaaaaacagaatagggcattgtatttcttatatctggatgcaaaaacatgaaatgttaattgtagattataagtcattaagtgtcacggatttatgttttatgacaagttggagtttacagatttctaggctatttttttcacatagagatacatgaaagctttattcttgttattcaacgtaaatcttttataatctgctctcaatttccagtatcctgaaaaatcctttttctctcttttttgagacccttccctccccctaccatccagagtcatgcagttaacagttctgatagtgcttggattcatttgtagattgtacataccaaatggagctggcacctcttcatggaaattggacccagtgggctattttacacttgccggatgtgctttcctcagtagaagtttatattttatagctgatactccattgaccatagtaacctgttataaaacatgatgttttatcatttgttctgtgtcttcagggctgaacattttatggagagactttattaacatttaaagagactttattaaccctagatattaacatggtttacctggaaattttttgagcaatgttttcatttgattcctggaatgttcaaatagcaaaggcagtttctgttggtgtgcatgtgtgtgtttgtggttaaaagccagcattacccagagaccttctggttcatgtggaaattattattattactatgattattgttatttttgcaaatgaataaattgtcattctgatttttttaacctcaacgttcctttaaaaacactgttgatttttatggagaaggttgatttcctggaagtaataatatgatgttagagattactttttaggcaatattttggcatgtttatcagataaatcaaacatcaaataaatagattatggggaatgatttttcagtaatctctttttgcagtttcttccctaaacaaaatgatgtggcctattaggtggattggtttggaggacaattgcttacagggaccctgtccttatggtgtggagaagcagaaaaaactcacagtactccagagtagcccccttattctttttcataaacttcaaactaggtatgaaagacctgtccactttaaagctttcgcctgtgaagataaagcagagattgatttttaaccactatgctcatatggggaaacagaatgcaggagctaagatttaaagaagcagatgggaagaagagaaataacctcctctggcatccacctggaaatgtctcctgagaaagaggatggacatcttctgatattcataagtcaaggaactgcttgaattctgtattccgtgtacagtattctacctatcaagaccctcacccagggaagaaagtcttgtttattcaggagatggggagcaggaggcattgaggactgcatagcttatttaaattaaaaaaaaaagtgcaatgaattgctttttagtgtatttacagagctgtgcagctatcaccacaataaattttagaacattttcatcacccctaaaggaaatcccatacccatcagcaatcacttcccattttcccccaatcctctaccctcagctcctggcaaccacgaagctgtttctctatatatagatttgcttgttctagacattccatataaatagaatcatgcaatatgcggacttctgtgactgacttctttcacttagcataatgctttcaaggatcatccacatttcagcatacatcagtcattcatttcttgttatgatggaataatgtaacattgtatggctataccttattttgtttattcatttatcagttgatggacatttgggttgtctccactctttcactattatgaacagtgctgctatgaacattcctttccaagtttttgtgtagacatagtttcatttctctgtgcagcctacttttaggtagttacaaattaagattgtaagtgatttttttttcattttacacatttgttcgcttcacgatggcctcctctctcttcttacctatctcactctcccaaaaatgatttttcttgagaacatagttgtagaagggtaagaatatcaaccaacttttgctaagtatgaatgcccaggcgctctgctaagcatcatgtatgtgttacaatgtttctcactttatagacgggggctgaggtttagagaggctgctaagcctggaggtcattcagctgaaaaggtagaagagctgggatttggacccacatcctgtttactcagcaaggtccatgctgtctgttgactccctcatgatatgatcccagatcatacacctgttgaaatcttagagaattctctttctattcgtgagcttctcccaattgtatcctaaaaagtaaggaatataaatcagatgctccgtcctaagcccttggacctggagcgggcatttgtgttccccgttgacaaaaagatgatgaaatacttcctctgtgtctgagtgcagcggcgtcatggaccggtgttaagtttaacctgacccttctctctgccctgcagttgcttcatctcctcaccttaagacttcacctttccttcatttcagcttcccagagatactgccacaccccggacctgtgtatcaacttgaaccctcacaccccccaacttggacctttctaaatcttaaaatctcagactctgtagttctctctgggcatagcctcctgacccccttgctttccctctcttcctcagaactcagttgtctccttattgtgagccctgactcatcccccactcttggtcactatagccactttcttcaggctccgtattcctgccccctaaccagcctagacctcatggcttgaaagtttaactgtgcatgcccaatagcttagtgccatgcattcctttccaggcaccaatcctgcatgatccccatcacctgcacagctgcttagaggcccccaaacccaactgatgggtcctgatgtaaattcttactgttaatctgaggagagtcatcattgcttttctagtgggctcatagtcacatttcttatgggatctattccaaacttttccagtctcttcaaaacttaccctcaccctcactttggtagaggaccatttattcatcttgcttttttaaaatcttgaagaatccaggcatgaatccttctactctctttttccctttaattctgtccgttgctcctgtctcacagttgcagacaagtgttgcatgctgtgctcacgcatcccagaggagcaagaagacctcccactccgcaaggctccaagacccctcgttttctggatccctctctaccctgacttctctgaggctttgtcacctaggttatctccctctcctgcttgatctttcattatcttcatcttaaccaaaaccttctcttcagtctatgaatgtgcctagtggtgtggcctgtcttttaaaaactaaaggagcccttattttgaccttgttctcctcaggcaatttccatttctctattctttctttaacctcaacatgttttgaaaacatagtctgtgttctattcatccagattattaccacccactgaagtcttagtcaccagttcttctctgtcatccaagcactggaaacttctcggcccaatgtcttcactggcctaagatggactcaaactagtaagcttttattcagtggttactcctagacctctgggctgtatttcctacggtggctgctgccagccatttcatttcttttcttttctttttcttttgtttcttttcttttctttttcctttcctttcctttcctttcctctcctctcctctcctctcctctcctctccttttctttcttttcttttcttctccttccccttccccattccccttctttcttctttcttcttcttctttttttttttttttgagacaagatctagctctgttgcccaggctggagtacagtggggtgatcttggctcactgcaacctctgcctcccgggctcaagtgatcttcccatctcagcctcccaaatagctgggactacaggtgcaggccaccacacctggctaatttttgtattttttgtagaggcagggttttgctgtgttgcccaggctggtctccaactctgagctcaagcaatccgcctgcctcggcctcccaaagtgctgggattacaggtgtgagccactgcatcagcctatttgtttctgaaaacactctttatctgcctttattttctcttaccctctactgctctgatcatttcttctttatgtcttccttcttttgtcccttttcgtacttattcttaaaagtagattctgcctaagtgtgtataaccacttttcttccttgtttacatcttccaggtcctgagggagtgttgtgacttggttacagcctaccttcctaaccttactcattgcagcccaggcttccccataattatatacatgttcctctcacacctcaagctcccttggttttctgcttctgttgcatctctggtttctttcacctaggatcatcctcctgcctcccctctctgcatttctatatattcttttccaggaccacatcaaattctgtgttctccttatgacataatctcaaatgaccccaggaagttatcttttttttggtccacatttttaatgggacctttcttacttttacttggttttcaaattatttgttgaaacacatttcttttaaactatgtactcatgagacagtatattgagaatttaacccctgtccttaaacacagtaaatattgtgtcaatgtttgctaaatgaaaggagtgaaaagtatggctctatgggaacttgttggtgaatgtcccatttttatttaccaatgaagaaaagcaaaacttagcaaaatgtatctgtggagaggtgggtgggagagggttgttgtatagtctgaaccaaaataattaactcctgtaattgcaaaaatattatcattgctcagtgcaccattttgcagttaatcagatagttttagggaaatattaaatgattctcaagcttggaaaatagcaatgagtgttatggcatcactatacagcccagaatgaactcatggatcctccaatctcttgtatcagatatactgcatactggatacccaaggcatcagggattcagagaaatttttccgaaggtcatctgggtaggaagcctgacttttatagaatatttcataaaattctttttattttatttttcaatagtttctctacattgtatacaaagcacactaattactcactcccattgtctccactaattacatcactcccattttgttctcctatgaacaaagaagaaaggaacaagaggttgttttttcattttgaagaggcaaggttgatatgtttgactaaaataaagttgggattacctgtgaatttcagccagctttgccctccggtccatcaggtggacagtggaaaattgactgtgatgctaaaaatggtcataattgggggaaagtaagctttaccacctcttttgtgatgctgaatgtgtcttcaagggaatcaaaaaagttgtgcttgacaggcaaggtgaaaaacccagggatttgctacaagaatctctgcaggagtggtagaatgagaagcttcattggagtctgggacattttagtgttgctggcccattaccctgaacactcttctaacctcctccaagacgggtgtctgagaggagctgggccctgcagaccaattctagtcttctctctccacccctgccccctttagaacaagcatattaaaggaatgtctgatgagctcactatagtctttgtcaggacattttattttttatttttttatttttatttttgaggtggagtttcgctcttgctatccaaactggagtgcaatggtgtgatctcggtgcactgcaacctccgcctccccgtttaaacgattctcctgcctcagcctcccgagtagctgggattacaagcacctgccaccatgcccagcaaatttttgtatttttagtagagacggggtttcaccatgttggccaggctggtctccagctcctgtcaggacatttttacagctgttttcgttctaaccctaactgatgaccattggaagacctaaaaattcagctacgcagaataagtaaaattggtctttttctttgcatcctgaggataaatctaaacaaacccctctcgttggcatatctccagctacaacagagggcaaatttgaatggattatgaagattgaattatccacttggtcttggaggtggtcccgtctcctgtgatggtggggtggggaggcggtgcagacatgtgtacaggaagcttagccaaatgcctctatttgggaaaagttgaaatcagtttcctgggcagtcaattttgagggtttaaaaaactttattttttttttattaaacatactaaaaataacaaagctatccaaaattagaccacgtactttgctccttttatatttcagtgtccttggtatgcttggtttcttttctttctttttgaagcattaatattgttttgaattgctagatatacagaaggtacgatagatgtacaaggaaaaataagcatctctcttatttctgtgtctaagtcacttgaattctcacctagaagcaagtaccattatcattttcttgtgagtccttttaaggatattttatgattatataagcaaaaatataggttttttaaaacaatgtttacaccccatacactattctgccctttacctcttttcacctaacagtgtgtcctggaaaacctttcttatcggaacatagaacagccttattcttttttagtatctaaatagtattcgattgtatgattttgccataaagtattcagtcccacattgatggactttttttttttttttggttgtttccagtcacttgctactatgaacaatgcttcagtgaacaactctctataaatagcatgttgtatgtcagcaaggatctctggaggagaaattactaaaggggaattgttggatcaaaaggaatatgcagttttaattttggtaaaccttgccaaattgccctccaatttggcattcgtcctattgtatgttcctgctagcactgtttgagtgtgcttttctccacagacgatgtttttaaacttcacgatctttgccaatctgagaggtgaaaactactatattctagtagctttaatatgggtttctgttattatagtggtggttgaatatactttcatatgtttaaaagccgttcctattttcttttctgggaaatgtatattcatcctcgttgcccatttttctactacgtttttggtttatcctgtgaattgacttttttttttaggagcatgtaacagctaaaaagattagtccttttgtcttatgctattttagtttaaatttttccgtttgtcttttgactttatgttttcttcatgcagggttttaaaaaattaaagtcatcttatttatcagatttttattttttggcttttaatttttttacatacttaggtctcttctacgcagtaattataatttttaaattgtctcgtattttttattagtattttaaaaataatagttttggccaggcacaatggttcatgcctgtaatcccagcactttgggaggccaaggcgagagcatcacttgaggccaggagttagagaccagtctggacaacacagggagaccctgtttttacataataataataataaatagccaaacatggtggcgcacgcctgtttgtactcgggaggctgaggtggaaggattgtttgagcccaggagtttgagactgcagtgagttatggtcgtgctactacactccagcctgggtgacagagtgagaccctgtctctaaaagaaaataaaaattaaaaaggttttattgagatatgattcatatatcgtaaaacttaccttttttttttcttttttttttttttttttgacacaggatctcgctctgtcacccaggctggagtgcagtggtgcagtcacagcttactgcaacctggaactcctgggctcaagcagcctcctgccttagccttctaaagtgctaggattacaggtgtgagccactgtgcccagccacaatgcagtcttttaataaatgggtttttaatctattcatagaattatacaatcatcatcaaaacctaattttacattttcattactccaaaaagaaaacctttacccattaagcacccactcccccatttcctctaccttctggcccctggtatccacttaatctatgttttatctctatggatttgcctgtcctagacatctcatataaatggaaccatataatgtgtggccttacacaactgacttttccacttagcgtaatgttttcaaggttctttctcatatttttatgctttcattttttacgttcaaatctttggtcaccttgggatttattttagtgcaggatgtgaattagggatctatatttttttaggtggccgtccaattattggaagtccttcctcccactaaagtgcagtgacacccatatcattcactgaagtccagtattcatttggatcgacctcttttctgttgaccttgctaagtattcctgtgcccatgcacactgttttactttctaaggctttataatatttttaatatcggtatggtattcttttcttatttctttttatatcattgttatggccattctttcctgtttatttttccataggaacttcagaattagctttctaatttgtatttttgacatcatataagtttatagataaatatagaaagaattattctcttgatattgactttctattcaagaagaagatagacctttgcagttgttcctatctcctcctctgtccctcagtagtatttaacattcttctttatgtagatttgttttttttttttttttttttgaaatggggtttcactctgtttcccaggctaaagtgcagtggcacaatcttggctcactgaaacctctggctcccaggttcaagcgattcttgtgccttagcctccccagtaactgggactacaggtgtctgccaccacacctggctaatttttttgtatttttagtagagacggcgttttaccatgtttggttaggctggtctcgaactcctgacctcaagtgatctgcccacctcgccctcccaaagtgctggaataataggcctgagccactgcacccagccctctttatgtagatcttgcatatagtcctccttcagtttatccctaggcattttatatttttgttgttatttaaatatgggatacctttttactggttgtcctttagaaaggttattgatttttgtatattcttttgtttcagttaccctacagaattctctaattaataagttgttcaattgacttgctcagatcatagcatttataaataataatttttctgcctgttataatttttatatcccttatttatttctcttatgcagttaaattggctaagtttaacagatcagtgttaaataacagagatgatggtagacatcctcatgttgttcctatttttaatgggatgcttctcatgttcccccattaacagtgagcctgcctttggggtggagcctgtttattgtccatttggcgtttgtagggcttttataatgagtagaaaacgttttggaaatgctgaatctgacggaattatttgcagaaaggtaaagtatgctgtgttagttctcccgcagtgataaaatagtagtctgatttttcttaccagcattgacaggagtttatgagtgggaagtctgtgctataaaggaagaaggcagcaattgtattttaatctcatgctatttttcttttgccaacgaagtaaaaagactaagaagctataggaatatgtagtaaaggcttttgctaagagagaaaaggaagaaaggtggaagaatgggatggaagaaacgagataaaagtatacctcattttcctcagcgtccccccagatcaagtcacctgataaaccaaatattactagggtagtttttttccccaaaatattattaccaaaaaatgacacaaaacactaattgtcaaccaaaatgataaagagtctccgaaaaggcttgcaagaaaatagtgaaatattttatcatttgtaagcaaaagataataatacagagttccaaatactgagaaaccacaagaggaaaaagaatgcctattgaaacatgtttatatgttgattctttttgatggtgccattaaagaaaaaagaatgttttgatctcttgcaaagaaagccaaactagagaggtattttatgagctaaccccaaacctgacattactctagtaataaataccaggacaggctgtcccttgcattagcagaactggaaaacaaaacaaaagacagtaacaattgaggctttgatgcttgttggaaacatctaacatacagagttagtgtgttgtggtcataaacaaaaggagtttaggctgactccataaattagggaaactgatgcgtcctgttgcttgggacacactacacaattatctgcatgacaggcaggaaagaaagcactggaaggcaaacagactgcagaacaatgtggccacccagttggttttagacacacacacccctggcctgcagaggtgtctatttgacagccggtctcatgtcaaaactttcttttatgtgattttccgattgtaggaaccactgggctctgggtgggtgtcttaggcgagtctgccttagtgttgagtttgacatatggtagcattgttaggtggtgtgtttaggagaagccaaccagggcctcagagccaaaagcatggagctcactggctgtgtgaacttgaccaagctactgaacttttctgagcctagtttgtcatctgcaagtaatgcctacagttcacggcttttgtatgtacttatgagatgttgtacatctagcacctcacatggggcttgtagagagcagttgctcaggcagtgtttgtaagtggagcacaggaagcaagggatggaaagagtatcacatcaggaccaaggatgaaggagtgtttgtaggaaagacctccgagatgatggttgagatggattatgtacaataaacaggaagcatgttcttgggaagtgcttctaagcatagaagggcagcattttcaaaggcatgggtgtggaggaatctttgaaacccagggaactgtagtagagcatggctcagtcccagggtatgagatggggagtttcactcattgagacaggacagatgagccagcgtgggattgagtggggactcgtgtatcctgttcagactatagtcacgatgatggagagtcgttaaaggctgtagacatggccaggcatagtggctcatgcttgtaatctcagcactttgggaggctgaggcgggtgcatcacctgaggtcaggagttcgagaccagcctagccaacatggtgaaaccctatctctactaaaaatacaaaaaaattagccgggcgtggtggcatgtgcctgtaatcccagcactttgggacgctgaggtgggtgcatcacctgaggtcaggagttcgagactagcctggccaacatggtgaaaccccatctctactaaaaatacaaaaaaattagccgggcgtggtggcgggcgcctgtaatctcagctactcaggaggctgaggcaggagaattgcttgaatctgggagctggaggttgcagtgagccaagaccgcaccattgcactccagcctgggcgacaagaaccaaactccatctcaaaaaataaaaaagctgtagacatgagggacagcatttcatttgcattttggaaatgtgacagtaatgtctctcgggtgggtttagagattggggaggaaatgagctctggcccagggtaatgatttcttccatattttccacaaatcttagcacagggctaaacgcatagtagatttttagggaaaacctcttgatggccttgaacaaaagttattgttttgccaggatcatcttttccatgaatcacttgttataccattagtagattattcttgtgtggagttgatcattttagcccccaaattatttttgtccctcgattacatcatcttaaacgattgtgtgttgtggcatagacatatcctaatctacttacaatttatggtgcaagtatctgtgtcataaaagatatcttcttctttaaaatatgctagcctagcactccatgaaaatggagactcacagtgctgccctgtccttcaaagatgtttatgtacaaagggataactgttcccacccctaaatgctttaggctttgcctatactgcctttcaaagctttccctattttaagattttttgaggccccttggatctctggaaggagaaagctataatagcttttggtttctgattgtctttaagcagagaaaactcacagtctcatttaggggcgtgacacattcctagtagggatggtcagtcccaggcaatagctgtggccatgggctgttgagggccatggtgagggcccatgcggtaacagacagtggtatgcatgctggactggggtgagtaaatagccattattcagaaccacggattctattttcaatcagtctgtcaactgatatttttgagagtctgccatgtaccaagcagagtgctaagttctgaagatactaaggtagacaagataaaaatggcccctacccacatggcactacattatagttattataggagagtggatagaacatatctagtcaattaccgtgcactgagaaaggtactgtgagacggaaatacaaagtatggtggaagcatcctggagtgacaactgaccctcacttggaaggccatgcaggacttccatgagggtcaagagtttcctgaacccggacaggagcaagatctaccttagagaggtttggggtgaaataacgccatgaaagggatagtctttaatctagaaggaaaaatggagtattacacatttgtaataagtgttcgagatagcctttgagtcatacagtatttggaatgtatgcttggctgtcagtgatcttataagacccaaaccacagttttctttatgctgtgtcctggcgctgccaatggccagctggaagggccatggcagggtagccacgtagagaggccacctcctagaggcgcatagcctgaacgaaagcggaatttgaacaacacctccgaaaagattggaaagtcatggtatctgtgcgattgcccacaaggaggtctcctgaagtcgaagccctttggttctctggcgttttaatgatttgctattctgtcatcggaaatacgtggagcagccacatccttagacagaagaggcccagccacgttgctctggagtagaatttagtatgagtgtgagtggaagttaaacagatgtggaagcgcagagtgcagctgaacatcattgacatggaccagcaggtaaacagacttcaaggtgatacacccccgtaaggcaatgttctggccagctccgccagtcaaggctgtacagcggatagtaattatttctgtcacagcgaagatagatgctggatgtgggcagatgggggtagacttgtgaaaagtgtgagtatctttgagtatcttttataaatttagtgagtggagtggcaacccacctacacttctaatttttgctgttggaagctatgtccagaaaagagaagagaaatttctctacctgataaattacaccttattcaaaacacactgtgtgaatgaaggtgctgcttcgtcttctctctgctaacgtaacgttgtgcacaatattttttcttttgaagcagcagaaggacattttaatagaaaaatacctttactcctgttaaaggagtatcttggagttcttcacctgtctttatgggggacactccccactacatggcttcataaggatttagggatgacttgctcattagacatagagtgagctggttagaaagacaagtgtgagttggggtacagtggcatagaatgtttaaaatattgagcaatttaggatccttattctggactttaattgtttctagagccagcctctccacgtgtgagtagcatctttgagtggcaagaaaaccattctgggttgtcattgagagcatgtgtccttggagagtgccttagcagtacctcctgtgtcctcccacgacacatatccacctatgcacacgtccaccatcctatacgcacacaggtgcatcttgcagtttcacagcccgagcacagccagagagaaatgactaacatagacttgatttttcgatttaaagacgctcctctttttgctcttcctcttgaatatgacttttcttttccttattttcagtgttttcaagggaaatgtcaaattttcagacccgtaacttctgctagaatcacagaccattagggactgtagagatctaacatgcccagctggaagcgccacagcaggatagctgtgtagagacgtgcagcaggcattcagaaaaacagatctgcatcttggaaagagaggtcagggctcgacttgtggatttcagagtcactcacttagaagcagtagacatagtacacatctaatgaaagcattcccctgctcggaaatcttcagaagtccctcagattttacagaatcaactcaaattactcagcaagacctttgacaccctccaccatgtaacctcttctttcctcctctcccacttctgtctccccacacacatacacctccaaccgcaatggtctcttgaacatattagcacacgtttcttcccactttttctcaagctgttttatttctttagcattagctcagattccacttccttctggaatctttctttcatgaattcagatcgtgaaagaccaaagggaatgttggggcctgtcatgaattagaaaatatattctctgttttcaccaatcacaagtcttgtatgacttgcctagaatagcttcctttatgtgttctaagggatatgggagcccgtctagactggcctccttcacagcgctgggatccgttctgcaaacccatcacagaaatacatgtggcttcttcctgcagtaaaatatgtaggaacttatccaagatttttctttttattcttcatttatgttattttatctccagtgttatgtctccaaggatgttaggttgaattatcccctctgaaaagccatactagtttttgaattaggatgcagtgattctaacttcaggtccactgtcaactcattagtttatttaggcaagttgcataacctctgccttaatttatcatctgtaaaatggggctaggagtaactcatgatttttataaggaaaaataagacctgaagttaaaacattttggaaaatgttttcaaatatggaatacaaacatgaggtgatattattgctaccatattgcttatagtcaagaaaaaaacttaatcctttttgataatctaatacagactgtgtcatactatatgttgcaaaaaatgtatagaacttgacattcgaagagatgagtattttggctctgtggtttattagctgtgtgtccatggctgacttacctaacctttttgagcttcagtttcttttctataaattgggaataattatgttactatttattagggttgttaagtaattatattctgcaactattatgcatgaaaggcacttttaaaactacagaagagcatagtcaacagtaaccatcatggtctcacttatggcctaataattatgcctactgtagaaatagatcaaaatgtatttggattcccttttctaggataccctctcagattgtcccaaatatacaagggatgaaagaagaaggaacaagtgtgggctgaatatgcagaagaggatggaaagttgacaggagcatgtggttggaagaggccatgttgacatgcagattgtgtgatagccacattgccagagctgagagggtgcaggagggaaggcaagagggaagccttggtatccatgtaaaaccagtgaccacttgctagggtgtgtccataagcattgcatgcctattctttttttttttttttttttgtattttatttatttattttactttaagttctggggtacatatgtagaacatgcaggtctgttgcataggtatacatgtgttctggtggtttgctgcacctattaacctgtcatctaggttccctcccctccccaccccagtccccaacagaccccggtgtgtgttgttccccttcctgtgtccatgtgttctcatttttcaactcccacttatgagtgagaatggcatgcctattcctttttttttttttttttttttgagacagagtttcgctcttgttgcccaggctggagtgcaatggtgcgatctcggctcaccacaatctttgctcctgagttcaagttattctactgcctgagcctcctgagtagctgggattacgggcatgcacctccatgccctgctaattttgcatttttagtagagacggggtttcaccatgttggtcaggctggtctcgaactcccagcctcaggtgatccgcccatctctgcctcccaaagtgctgggattacaggcgtaagccgctgcacctggccagcatgcctattcttgaatgtgccctttaagcagtagtggacaacctggggcatcggtggtatcctctgtgggacaacagacacctatatgggagctggttccgcttccctcacttatggctttttacagccatgtgccgcataacgacatttgggtcaacagtgggtcacatatatcatgatagtcccataagattataatgaagctgaagaatttttatcgcctagtaatgttgtagccattgtaatgtcctagtgcaactcattactcatatgtttgctgtgatgctgcaaccctactgtgctgccagtcatgtaagagtagagcacatgcaattcggtacagcacataatgcttgataatggtaataaacaactgttattggtttatgcacttactatactatacttttgatcattgttttagactgtatttcttctacttatttaaaaaaaaaaaagttaactgcaaaccaacttcaggcaggtccttccatagatgtgtaagaagaaggcactgttgtcataggagatgacaggtccatgtgtgttattgccctgaagacctctcagtgggacaagatgtggaggtagaggtgatatgaatgatcctgaccctgtataggcctagactaatgcgtgtttgtttcttagtattttattttgtttgctatttatgtatttatttatttattgagacagccttactttgtcgcccaggctggagtgcagtggtgcaatctctgctcactgcaacctctgcctcctgggttcaagccattctcctgcctcagcctcctgagtagctgggattacaggcatgcaccaccacgccggctaatttttgtatttttagcagagacggagttttactctgttggtcaggctggtctcaaactcctggcctcaagcaatccacccgcctcggcctcccaaagtgctgggattacaggtgtgcaccactgctcctgccttagtattgttttaaaaaaaaaagtttaaaattttttaaaaatgaaaatagaaaaatgtttattgaataaagatataaaagaagaaaatattttcgtacaactttaaagtggatgatgttttaagctaagtattattacaagagtcgaaaagttttaaataatgtgtttataaagtaaaaaagttacagtaagctaagtttaatttattattgaagaaagaaatttcaaaaataaatttggtgcagcctaagtgtatacagtgtttataaagtctgcagtagtgtacagtaatgtcctaggccttcacattcgctcaccacccactcactgactcacccagagcaacttccaatcctgcaagctccattcatgggaagtgccctatacaggtgtaccatattttatcttttctgcttcattttgactgtatcttttctatatttaggtatgtttgaatgcacaaatacttaccattgtaatacatttgcctgcagtattcagtacagtatcatgcagtgtaggtttgtagccgggaagcaatacattgtaccatgtagcctagatgtgtagtaggctgtcccatctaggtttgtgtgagtagactctacgatgttcacacaacagaatcacgtgaagatgcatttctcagagcatagcccaccgctacccaacacatgcctgtaggtgaggatgaggaggtatctgtgttaaactgtgtcccccaccaaaatgttgacaggctaaacctcccagtgtccatgaacaatggctttatttggaaggagattttgcatatgaccaagttcagatgaggttattagagtgggctctaatctgatatgactcatctccttgtaaaaaggggaaacttgggctcagagatagcctccctctgaggctattaccgtgtaaagactggagttatgctgcccaaagccaagaaacaccaaagatatccggaaagccaccagaagctgggagaggggcatggaacagattctcctttgcacctcctggaaggaaccagccctgcagacaccttgatctcggatttctagcctccaggactgtaagacaatgcatttctattgttgaagccccccagtctgtggtactgtgttattgcaaccccaggaaactaacacaggcaggtagaccatccacacacaccaccgcttctctctgacgcctggtgcacagcttgggtcttgtggtgagactccacatggtaggcatttgctggcggtggatgttaaaaatgacaagatttcctctggtttgacttttgaaagcaggtgcattgaaagccaaatctcagggtttggggttggtttagaatgggatttctgaaacattctaattgtctcattgccatcacctccccaaatactgtatctttatgtgcatttggaaggaaaaggagtgcaattgaacagtatatttccgtctgttaggcaaaaccttttatttgcttcttatttttccaggcttggacactttcgtgagaatatttgcagttctgttgtaagtccacttcggtcagggatttggcaagtccacaacaaagagagggaatgtttcttttcccttttcccactttccttgggcttgcctgttctttctctgaaagatgctagaacttccccaaggggagggcctgcctttttcctccttgggaaatgttgatttatattatatgaaacatttgtttttcatagaaacttccatttcagcatgttgaaatagttggttctaatttttatgtgaaaaataaataaacttgtcgtggcaatactctcagggtacagttacataataactatgtatgcctccccaccactcattaacataggagatctcacctcacggaagtcatctcatagtctaagctttatggcttctaacagcttttacgaaactccatgaaaataccttaaacataactgttacaagttgaaagtcaaccctttttataagtatgtcagaagtaattatatcttgtagtagcaatttcatatctctacttatagttgggacaattaaggctcagaaaaatggcaaagctgagattaaaattcaggattttctgatttctagccaatgtcatgctcattttctgtgttaattttatggctcagggtccagttaaaaacgtctgaagggagtggtaagtacaagagagatgggagttgggggtggggcttgaaggagagcacacctggccccaggtgacaagactgggctccagccctgcctcatcacagttggacatgatggccctgggtcatttgacttttgaggacctcaggaaaatgagggagcttaaaaaattctatggttcctaatgaaatacttagggatgaaattacagttctgggatttgcttgaagacacaatcagccatggtttgtcactgttgatgctgagtaatggatatttggtgttctattgtgagtctttggtacatgtttggaattttccatgaaaaaaccttctgcttctaaaatgcacaccttgattcttcccatcgccctcctactggctggtcctgtgcagctcactcatttctcaggaacagcagcagactcactactctgaaggaaagaaagccctttgctttggtctgttcctaatgtacatattattagagacttttccgacaccctccccattttttatttcttaacagctaatacgatagctgtgctttcataataaattcaaaagctgctctctatttctcaccagtttgaattgtagaaaagagtacaaaagattagagtactttaaaataaatctcagctaattatacatacaactgcattcactaaatgtgaatattttcaggctttctttgctaccaagtgccacctgctcatgatttaaatgggcacaaatttagttccattaaacaaaatgcagcaactcttctcctatagcgcaaactcctttaggtcctattttgaaactgagaagctaattccagtgttctcttgttagctctcggtccatgtcaaccaccccacaaggttgtttacttgaatagtttgcagccttgctttaaaagttctagtaggcaaataggtttgttgatgatgaagtggtttgtgttttataagagtccttatggtctagatggcatttgaacttgtggttccagtgattaccaggaccctgaattgaagaatacatgctgtggccttttcagctcaggaaactttttactttctattgccaaaaaaaaaaaagacaagaaatccttcctcaaaatgttatgtgttcttagcccatacaactgtctccccagaagtcactggactcaaacctccactttgctacttgaacatattaaggtcatttaaggagaattcattcatctcctattaatctggaacattcatgatcgctgtaagaccaaagaggacattttggggggtaataagaaagttaaagctgccttcaaatcaaacgtgaattatgaaactcttttccaagaagcttctattagtggcctcatcagctatgtttcaagaaaggaagttgaaaaaaaatcccacaacatggaatgcgtatttgccatgctcttagaaaaatggtttccttgcgaagactcctttgtctctacatacctggacctgaagaccttggtgttgttttataaccctggaagcctggctgtgatcatctattaaggaaggagaaggaagctgcttatctgtcctgaaagtcttatttctactcatcttctcgcctccttccacaccacctccccacctacacacacccttgccctaaattcctttccattttgtcctttcgaaaactcctccctcccttagaaaagctaaaaataatggtaatactttccagtgatcctcccttattaggatctcagatgcaagctgcaggcaaggaggaaagcctgcatggtcgctgctgctcacatctgcatggttacaaatcgtggctcactccagctctcatcttagatgttcatcctcacttgaatcccagtgccataacacgccaacgcgcctggaaaacacctgctgtctataggttgcaagcaccccacagcatcccagatgtagggtcatagactcagagaattgaatacacacccaaatcctctagctgtcattagggggagtttcacatgattgtagctacacccaggattttaagcccccaaaagttatttaggaaggattgcaggctcattcttgtgttcttaggagggtcccgacctgcggataaagacctagaggaagggggaggccttgaggcggagtcccccaagcagagccccaacttgtgtgtgatcctgcgccacaacttggccagccggcctggacagctggctctggttactgtgggaacaatgcaaggaaggccgttgtcacattcctctgaggtcaaaggcacaaccttcgtcacacactcagtccctgctggcaaagagaaagacgaggagcgtggaatcggagacctggagcatgcgagggacttgagaaattcaccaactcccttgttttactgattaggaaactgaggtgcagaggagagctatgacttgctcaggatggcacacccaggactggaattttctcttcatggtccaataccctgatgttcctctcatcatctccagtacttcagacttgatagtaaaaaaggattcttgataacattattatattttgttatgttttcccatgctgcaatcgagtctttaggttcgaagtgacaaccctgttacttttgttgcgagacccttgagtactcccaggacaaatctagccaacaaatagcatctttagtgaccctatgggaagtcattggcttctagccctaaacccagaggttagagttaatttttaagtgctcgcctttaactcaagcatgaagctctaaaagcatcaagtagtaatgcttgaaaacatctaaattcctctgagccctaggcatgcttaaactctctctctctctttttttttttttttttttttaggaaaatagctgaaatggtagtggttagaacacatgcaaacagaattactgaataaaattggtcacgtatcccctggtttaaggcatatttaggagttcaattcacatgtaattgatcattcttttttctcttggcatactttcctgtaagagtcttatgtgccctgcctttagcatatgtgcaagccgataaaggatgttcatttaaaatttttactattttaaaaatacacacagagggggaaaagacttgtcttatccccaaatgaaaagaattagaaataatacttttgcctgtaaacttctatcagttttcctgtcatgggaaagggaaccataaattactttttataaggaaagtggtggtgctagggccacatgtcccctcccgcacagaatgagaggtggtggtggctgcgggacggtgggaaggaatgagcgggacccaggccagagctcagctccctgggctttgcttgtctcgcattttgtaaactcaaatgtcccatcattcccaaaggccatttgtggacatgctgtgattttatgcatcaccttctggaaagaatgtgttccgttccctgtgaacttatccaggttgatacagtagttccccccaccccccatcttcggtgtcattttctgctgtttcaattacccacagtcaagcgtggtacaaaaacaggtgagtgccatgcaataagatattttgagagagagagagagacaccacattcacataacttttagtacagtataatgttatgattgttctattttattattagtttttgttgttaatctcttactgtgacttatttataaattaaactctatcatgggtgtatatgtataggaaaaaacatagtagatatacataaaggtactattcatggttttaggcgtccactggggtcttggaacagatcctccatggatgggaggacaactgtcttttgaatgtgtcagacacaattgtggcatttcttagtgtctttttcctactcgttagttgtatttggctgctgcaaacaccttgggctcccaagtagttgggaatgtggaaagctacatactttccctctagagagagccccagtgtgaaaaactaagatagccgtgtgtttgctgatccttgggacgagccagggaagggctccgggagcactgtgtgaattaaggctgtcaagaccaaagtaacataggagggagaagatgaaaatgcagcagcacgtctcttaatgtgatcgtttctctttccccttactgaagcatagtgctctctgctatttgaagagcgcaatttagatttatattaaggaatgaataaataggatgcggtgatgaaatctcatctggagtgaatgcagattgtggatgctaatgaccgtgtggctgtgcagagaacccattggaagcctgggcgcttctccctcctctgttcacccactaggcactcaagagcaactcaggcagtggggaaaaggttatctttttttaatgtctctcagtgttgcatcttgccttatagcgccttaaagcacttgacaagccttcaagtaattcttggtggtggcgttttcccccagaaggccttaagagatggttttaatagatacacctatcaatttattcccaacttgagcattttgctgtcttgcatcatttgacatcaccagaaagtcctttggttacttctgtagttcacattgtactttctgtcctttgagttttgggtgctcaggggcaagatgtcagaaatcctgagttttagttgtgccactgcgtagctttgaccaagtcactttacgttagcaggatacaatttccgtgttcattaaatgaggagactggactgaaagctcttagaggcctcctctagctcagacgttctgtaacactcagggctttctgcctcctctgatttggcggtgtcaggatacaggtccaagtgcggcactgtgccttgcaaaattgctctctctccctggccagcttttccaccactgtggaatgaagtctgccgcctggaagaatcccagatttctcaaaggcgtccagttctagggagcagcgtgcaaagcccttgagcacactttgacttcttctgccctggctggtgatgaaaaaccaggtcaccagaggttgccctgtttccagtgatcagccctcgggactgaaaaaggaacaaatacagaagagctccaaagaaagaaacagaaagagacgctcaagctgggaagctaagaacaggtccctctgctggggtggaaggagaaagaatcttaatcctctgccttcccccatgggtcagagtcgtaaatgggtgagacttgaaggtgtggttggtcaccctctctcaaagtttcagggctgggtcaggtgtcctagtagtgttgcgtggtgcagtagtgagtccccagcctgcattctgcaaagccccagaggctccccataaactttgaggctgtgggctgccctcagcctctattgaccggggcagcggggcagcttctccttcagctctgtgatattctgaggctatgtaaaatagttttcttagaaaggtcctgtggttaaaaaaaattttttttaaaccactggtttagttacgatgagctcatattcaaagcaatatgaccttagacaagtcatttgattttcccaaacctcattttccttatttcaaaacaagtttagtcatatattctcagcctgtctcccacagcaatttaaggattaattagagtcagttattcataccttcactctatgaacacggtattgaacacctttcagtagaaggctctgttgggagaggaactcataagtaaatacatgagacagccattccaagcagagggaaaaagcatgtgcaaatattttgtaaactgtaaaacacaacacaaacctaacattatgtaatattgctgttcttaaccaggcagtttaatatagtgactctagagcctaactccttggctttgaatcccaactgcagccatttatcagtgtgacttcaggcactttacctaccctcttgtgcctcagtactccaatctgtacaatgggaataataatagaactcatctcactgggctgttgggagagctgaatcagttccgggcgcagtggctcatgcctgtaatcccagcactctgggaggctgaggtgggtggatcacctgaggtcaggagttcgagaccatcctggccaacatggtgaaacccgtctctactaaaaatataaaaaattagccaggcgtggtggcacgcgcctgtagtcccagctacttgggaggctgaggcaggggaatcacttgaacccaggaggcggaggttgcattgagccgagatcatgctactgcactccagcctggtgacagaacaagattccgtctccaaaaataattataataataattaagagactgacacagagtaagcactctataatgtttattattggtgatttcaccaatgcactgtgaaattctgtttcttgattctcagcattgcagtcccctgtcattgcacttccagttttctcttccccagaagatgcatcccgtgttcgagcggaaaggcaagggaaacatcatgtcaagaaaagagttccgaacagtactctgtttctgtggcatggatcctctttcctctccttttctcctttttttgaggttggattggcactcctctcagacttaaacaaaggctttgctttgcagagaggatctttctgccttcggtgtgtcatctgcctctaagggtgtaatttgtttctgatgcatgcagggtgcccccttgagaaggctttgttgatgttgtgcagaggtgtcctgtattgatcggtgatagaactgttctatagtgggtgaatgaggtaattgtcatcaggttactctagtcggtgaccttgaggctgatccgatgactaagccacagaggtggatccctggttatagaatgtccttgtttaaaggtaaatcggtgtgagagtgactaatagttttaaagaaatgatggcaagcaaatggcatgccctttggtgagagacacagtctatatcaataagctctgaggccacccatatctgggtgagatattggggctgattttcaagggttcctttatctctctgctcctctcttatctcttttcattagattccaattctccataacttccatgaccgtgtataatacagtcactgccatgactgtgtataatatcgtcagtgtgaagttcagagcaaaatacataggcctctgagctagttggctgggtttcttttttcttttttaaaaaattcagcagtggggtgggacagagctgaagatgaaaagatgcttgatacaagagaagagagaaagcaagcgtcatgataaaatctgcatgcaaaaaaacccttgttataaaatgaaaagtggaatgaatcattagctatacatttaagctggatcaacacattagccctgtgattaagagtttctaaaacctacctgccagcatccctgctgttgctgaactggtcctttctgcatgggaatgggtagaagtctaaatgaacagacttagagtgggttggcaggtgaaggatagtgggggtaagtagtgaggagaggataggttagaatagttattttgggctgggcgcagtgactcatgcctgtaatcccagcactttgggaggccgaggcaggtggatcacctgaggtcaggagttcgagaccatcctggacaacatggtgaaaccctgtctctactgaaaaaacaagaattagccaggtgtggtggctcatgcctgtagtcccagctacttgggaggctgaggcgagaggattgcttgaacctgggaggcgtaggttgcagtgagccgagatagtgccattgcactccatcctgggtgacagagcgagactatctcaatcgcaaggacaaaaaaccaaacaccccatgttctcactcataggtgggaattgaacaatgagaacacatggacacaggaaggggaacatcacacaccggggcctgttgtggggtggggggaggggggaaggatagcattaggagatatacctaatgttaaatgacaagttaatgggtgcagcacgccaacctggcacatctatacatatgtaacaaacctgcatgttgtgcacatgtaccctaaaacttaaagtataattaaaaacaaaaaaaagattaaaaaaataaaaagaacaattattttggaatcattgaataacagtcagctctttgtatgttggtcaataaaagcaaacacctataatactgctctaagtgctttgtgctatattaaccctttaatcctcacaacttttgttatgtaaattttatatctgaaaacagtgaggttaagtgatttgcccaaggtcatttaaacccagatattggctctgccccggtgcccttaacacttatagcctctcactgtcctgggtggtgaaggtcttgagggcaaagagagaaaggaaattcctattttcagtggacatatttcttgtgccggtggaaggaatttaattattacaaggggtttcatcaagtgcactaatctgggaagttgccagcaagctgacctgggtttaagtgattctcctgctttgacctcccaagtagctgagattacaggcatctgccaccatgcctggctaatttttgtatttttagtagagatggggtatcaccatgatggccaggctggtctcaaactcctgacctcaggtgatccgcccaccttggcctcccaaagtgctggtattacaggtgtgagccaccgcacctggccaagacaccttttttagcttccaaatcgaagtctgtttttgcctgtatcatggttgtatttcagttagaacatcatttctttttttttttctttttttctttttttcttttttttgagacagagtttcactcttgttgcccagactggagtgcagtggtgcagtctcggctcactgcaacctctacctcctgggttcaagcgattctcctgccccagcctgccgactagcagggattacaggcacctgccaccacgtccagctaattttgcgtctttttagtagtgacagtgtttcactgtgctgaccaagcccatcttgaactcttgacctcaggtgatccatctgccccagcctcccaaagtgctgggattacatgcgtgagccaccgcgcccggccagaacatcccaatacataggcagccacttatgcactagagtccttctcggagggtgagcagagttggctctccctgtcggtggcatcacgttggcagaatacacacacttttatcctgtggcggttggcgaggccattgatttgctgcgtagaatagcaaggaaatactctagacaggtttaacatttgttattgctaatgaatttgtcaagcatcggaattcagggacggttgatgcacacttaaaatgctctgaaatagattttaccttttataaaagataataataatctcatgtttgaatcacaagaggtacgttttccttaaatcttttaattaactcctatttcaagaaaaacctcttatcaaaaaaaaaaaaaagattttacatttcctaaggccaagtaagagttgaaggtagaatgagtaaataaccaagtttatggaaattgtaaaataaatacatgtgttataaatgtgctatttaatgaaaatgtgtattgactagagcaataatgatgtatctttgaccatgataagtaccagtgctgaaatccatccaagccacaaaaatgattggagggtccatgtggaatataaagctctgcagagtctagagctcatatcctatatggctttttgctaattaataaacattggccttttgtctattatttaatagcctaattgcattgcacattgcagtagcacattgcaatagcacattggcaaaagtgctgcctttcactgctaaggggggcagttttctgtaaaagaggttaaaaggagaaatcagaagcctaatttttgttaaatgagatgtcccccaaaagtcagatacatgcatatttgggctaaataaatctttcctgggaaactcttctatgactgggcagagttgttcacgagagactttccccccaacattttattaggaaaaattgcaaacatacaagtaaattgtaagaattgtacagtgaacacccataaacttgccacctagattttgcaaataatattttgctatatttgctttgtcaggtatcaagccatctgtccatcctgcagtccatcatgttttagttgatgcccttcaagactagttattgtgtatcattactcaatcaaaataaaatattggctttagttcttgcttttaggtaaattttattttattttattattactattattattattattgttgagacagggtctcactctgtcgcccaggttggagtgcagtggtacgatctcagctcactgcagactggaccttcggggcttaagcaatcctcccatcttagccccctgagtagctgggactacaggcataggctaccacatccagctaatttggtttttggtttttggtttttttttggtagagtcagggttttgccaggctggtgtcaaacttctgggctcaagtgatccaccctctttggccccacaaagtgctgggattacaggcgtgagccaaccatgcctggccagaaaaacccaaattgagggacagtccacaaaatgattagtctgtactccttaaaattggcagattgtcacttttatcacatcatatgtgacctatcatgggctgttgatcttgatgacctcagccgaggttgtgtcagggtttgtcaactttaaagttactctttgtacacagacacactcacacacacccttttccatactgtactactcgttggaaggaagtcactgtgcacagcccacacttaaggggtgggcagttacgctctacctttacaagggcagaacatctgcatgaattatttagaactcctttgctcaagagatgcgtgttttcttcctcttttaaaatttatttatatcaatatgaactcatgggtgtttattttattctttaggttctaatccagtactatgttgtttattttgttgctctggttgttttagttctggccattggcagctctttgagaaatattaggaatattgtctcttgtcccccttttatatgcccccatcactgtggggtattgatttatctatttagcattttcccactttctgatactacaagatgctccatgctcatcttggatattccctgtcacagtactagaatcagccatttctccaaagacccctggtttgttttattggagaatggtgttaggaactaagttctgggtgctggggcttgcagaaattttatgcccaacacatattagctccccctcttccttttgtgggagtttggtgtgtgcagtagtgagtgccctgtgaaatcttcatgctacagattgactttagtccctcactgatcctagttcacttcaggaggagcctagctcactgtggcagactagacagaaggcagcccagccagtcaactcaacagatttcatttattcagctcaatccaagtcagacttggtgctgtgcttattcctgtgggcagatgccctgccctcacagacccctgccctctagaatcaaatgacaggacagtaacagagaagtgctgtagaaaatcagaatacagaagggctggtgcgacctagcctaagagcattcaaagaaagctgtttatacaagagcagacttaggaaggtttattccagatgaggaggctagaagcaaagacatggaagtgggaacagatagtctcttaaatatctatggataagaagaaagccgaaaataatgaaggactttgcttcttgggtttattttaggtaggaagtagggtttactgatcttggtgggatgaggaaatggaccagtggtgtagtggagccagcttgcacttttatgagccaagtgttaaatgttcagaaatttggggagcatgttgacatcatgttattaccttgaaattggccatggtgggagtgtttacactacagaagtctgcaaatgctacacatcaggggtcctctctcccctcccacttttattaaacatttctgcacacaccactggcttcagctgtctaaatatctagtatgtacccttaccctgaatttatttttttttcctctagtagtctttttcaggtacacatttttatttggtgctttgaattctctaacaaaactgtcaaaaaatggttacagtagagatgtgtgcccctgattgaaaactgcattttactgcatattggttaaaactcttaacggtcagaaaattttttggttaactgggttatttgggaccctctaatggccattctcaataactgagttggaaaagtgcatgattcaaatgtactaaaccattacccagccttctactttattttggcagcatggggaaacctgttgtcacctgaaggtagtcatcagtgtcatatatatgtggtcataggatttatggttgggctggcttggaggtatcttctgattcttaccaagaatataggaaaaaacgatatcattttctttcagctgagaaaccatgactcaacgttattctgcttgtagtaggcaatgcaaccctgtatcagtttgacttttgcaaggatgatacctgagtaatccagggaatagtgctatgcaaatagggacagtttccatgaagtcacctcttgtgcatggtatatggtgttaagtgttatgccgaattagactcagagcagcttacatttcaaacgagtcacctaaaagcagttatatgcgtgacgaaggagaatggttagggaaagaagaagacttctcttactcataactggagattgtgagttttcactgtgatcctgaaagataggttggctttgccttaattacagggatttcttttacctctttgccctttcctatgtccctccatcaggtatggtaaattttcctagcttttgttcctattagtgactttactcctgatccactgccaaattgggtctctgaggttgtaaaactcagaaaaggatattgcaagcattctggccatattacaaatctcatgtgagagctcactctgaatcaaaggagctctcacattcttttttagtccaagtgattcctagatgtggaagccgatttcctggaacactcaaacgaggtcacagttcatcagctgcctcccataaaccaaccctctcaagtttcaactctcatttgaaacttcttgggatatcttgatccaaacagatcacctgaaaagctcccttataaggtcaagtgatcacaggggtcttcttcttcttcttctttttattgtgataaaattcatcatttttcccatttttaagtgtacagttcagtggcattaagtacattcacattatattgcagtcatcaccacgatccatcttcagaacgttttcatcttcccaaagcaaaactgcatatccatgttgtagcatgtgtcagaatctccttcctctttagggctgaataatattgcacatatgtatcacattttgtatctattcatccattgatggacacttaggttgcttccactttaggttattgtgaattatgtggctatgaacactggtatacaaatatctgttcaagtgcctcctttcagtttttttgggtatatacctagaagtggaattggtgaatcatgtagtattttttaaattttttgaggaaccatcatggtatttttcacagcagctgtaccattttgcatttctatcagtaatgtacacagagttccaatttgtccacatccttgccaacatttgttattttcttgttttgggggttgttttttttgttgttaatcagagccatcttaatgtgagtgaaatggtatgtcattgtggttttgatttgcattttcctaatgattagtgatgttgagtgtcttttcgtgtgcttaatggtcatttgcatattttctttgaagaaatgtcaattcaagtcctttgcccattttttaatcaaggtatttgttttttgttgttgctcaagagtcttcttgcatgcctagatagtacactacttcaagaggctatttagcatttatctggggttccatggggcagcctgttccctttgcacatatgtaatgcagagatgaatatgtagagacttaccactggaaaactgcacctggaattctcagatttgcccatatctgcttatcatggacgaggttcagtggtggatgctgcagaatataccaccgactgcttttggctactgtgtgacattgtcatctaacttttcactaagaaaaataatctctttagaggaaaggaaggaagttgagagtccatcttataatttttcagtgtaataatattctagaccaggtattgacaaactggaccatgggccaaatatcaccccagcctgtttctgtaaattaagttttattggaacaccgacatgcctgtttgtatgagtatcttcaattgctgcttttgcacgacaatgacagattgagtagttgcaatggagatgtctggcccacacagcctaaagcatttgctccctggtcctttatagaaaaagtttgccaacctttggctgttctaggtgtttaagaaatactatttttagaaccgtatatataatgtagtgatgttgactgcaagctattcactttgaaaacaataaagcttatgtagtagatattactgttttaagtatttactgaataagatagacccctgttacattactgcttttaagtatttactgaattccaattttgtgtccagagctgtgttctttgcctttgttttttgattggggcaatggctttcatgtccttagcaccactggggctgttaccagatgtgaccaaaaggtttctaacatgggtagcactttttttttttttttttttgagacacagtttcgctcttgtttcccaggctggagtgcaatggcatgatctcggctcactgcaacctccacatcccaggttcaagcaattctcctgcctcagcctcctgagtagctgagattacaggtgtctgccaccacgcccagctcatttttgtatatttagtagagacagggtttcgccatgttggccaggctggtcttgaacttctgacctcaggtgatccactggcctcggcctcccaaagtgttaggattacaggtgtgagccactgcgtcctgcctgggttgcactttttaaagtcacagaatctgaattctgcctttcctctgtgatatttcctattcgtactaaactttggtgaagtagctctgatctttagctgtggtgagaggagttatggaagagggacctgccccgaaacgtagaccacaggcaacttgctgcctggcaccctaaagatggtttcctgcttctcttcccctctatctccaggtcagagatgcagctttgctaaggcagtgattgccaatttgggaattttgagatactgtggatgtgctgattgttttgtacaaattctcttcaataccttgaccatgtatacagtaaacttatgctagctgttagaggacttattaaggtgtatggacactgtctttgaagagtttatatggtatgttttggcagttgaagagtattaagcattgacttaaaaaattatgtataataagcattgagataatgggaaagaaatgctacacatacacacacacgcatacccacccgtgaacacagacacccaggaaatcataaaacctgattgacttctatgtgtggatgttttctttttttattcatttaacttatattttaagttcagatgtacgtgtgcaggttcgttatataggtaaacttgtgtcatgggggtttgttttacagattattttgtcaccaggtactaagcctagtaaccattagttatttttcccgatcttctttgtcctcccacctccaccctccagtagattccagtgtagatgttctcttaagtaaaacgatggggtagtcgttttgtacagtccaaataagattccgacaatggatgaatctgctaagaggttaccttttgctccagatacaatatttatctaaaaggaaaatgaacccttaacccttccatggaatcgtactgcttcactaactttttgagtgaagtgatgggcattgatacagtattgaaaactttcaggcccttttctttactttttgacaatttgaccttttttcacccctgaaatatagcaatcagtatttctcttctggatctggttctacaacctacgttgattttaattactttccttgaaaaccattctcaaaatactctctgccccttacattttaagctttaatgttgaaaatagagctttggtaagagtctccttgaaaatgattttcttcagccaatatcagaggagtatttccttatttttatatttatatgttttaattccttaagaacagatatctaccaaatttcatggtatagatttataatcatcttttcaattttagacaaattttggaattcagatgttgctctttgaaatgctggtgacttctccaacttggggacattcacggactcaataagcatgccttttatttatgattctctgaggattcattcatttctgcatattttgaatgtctgctacacagagataaatgatgtaaaatccaggctatcagagctgggtcacaatttagtggagaagatgagtacgacaaaaatttaccatggagtgtgaaaagtgctcctcatagagacatgtacatcatgccatagtaagtttagggaatttggaaactcacttaagtcctaactcaatttaaattgtgttagactgtggataaatttatccgacgagaaacacataataatatgtatctactctgaggtaataaatgaaaaaagttggataaaataaaatacatctgttataaccaatggcccccagcaaggccagtgctcttgagccattattattcctgcacattctttgtgtttgggttattaacattgcgcttaggtcagatgagcgggtgttcaatctgccacactttgataactaaagtaaaatgctgatggagatcatttaagactgtctctatgctgttgattgcatgcttgtggctcataatcagaatgatgcaaagtaattgttagactgacttgccaaggctacattttgtgtcgttgccactgtcagcactttggtcccgctgtgctgcctgaagaacgcttgcctggcacctgttgggcactaatacacaactttccactgaatgtcatgggtaacttttgttctcatatcctcgcttgctatcttcacaaaaaaaaaaaaaaaacaaaaaaccctgacaaagatttttttttttttgacagagtcttgatgtgttgtccaggctggagtgcagtggcacagtctcagcttactgcaacctccacctcccaggtttaagcaattctcctgcctcagcctcccaagtagctgggattacaggcacacaccgccatgcccagctaatttctgtatttttagtagagatggggtttcaccatgttgcccaggctggtctcgaactcctgacctcaggtgatccacctccctcggcttcccaaagtgctgagattacaggtgtgagccactgtgcccggctgcaagtgcttattttttgtttgtcagaatgcttatgtattgagactttaatctctcgtgcatgttgccagggagctcatcttttctctttgaccgtgaaacccagacaaacctagctttgtcacttactggtgaccttggttaggttacttttcttgagccttattttcctcatctgtacaatgaggccaataaaacctattttacagagattttgtcaggattaaagataatagataaaaatgtgtccatacaaattagccactcagcaaatggttgtggcaaatattaaggaatttaatacttactcaggatgatacaatacaacgacaagacaacatttccaaaagttagtccgaaaatataatgataacgtaactgtggaacatgtagtatcagcacggttttactgggcaagtcatgtttaccagagacacacaattggatttggatgttaaaatctaaaccgcatggttttatggctagatctggaatacatgatatgttatgggccctcccatgtataccttcagaggatatggagctacctttggaagcaatgtatgatttagtgtttttctttttttttttttttttgagagggagtctcactctgttgcccaggttggagtgcagtggtgcgatctcagctatctgcaacctccacctcccgggttaaagagattctgctgcctcagcctcccgagtagctgggattacaggcgtgcaccaggacacctggctaatttttgtatttttagtagagacggggttttgccatgttgcccaggcttgtcttgaactcctgacctcaagtgatcttcctgccttggcctccgaaagtgctgggattacaggcatgagccacagcacccagcagatttagtcttgatggtgtaaaaaagccattgtatagcacacaacacagcctgaccatctaatgctcactcatgtaaaagcggtgaccacgagagagttgggcaaagcaaaaactctgtccctataagaagtgcattgttagatctggaaacatctcaccaggtcctgaattgtactatgaaaagagatttgttaaaagtagctcagttcatattccatgatattgcaaatgcctagagtgaattgtcaaagaaatgctctctctgactccatccactgctgacatttaaggtctgtgttcttagttcccaacattgattctatttcacatggtcaaaatgtaatagacatgttttttctaagagcatgacccccaccacaaattaccactccccttaaaaattgcatcggctggaccagggatgaagcatttagggagcatttgttgtaagggactgtcacctgccattggttatggaccttggtttcacagatcagactctgtgttgctctactttgcatctccgcctttgatctcgctgggattttgcagccagtatctatctcctttggcatttctttgctgctgctatgtgttctttctccctctgctgctctctgccagccccatctcctgcctgattcatggagcagtgttggatacttagaaaaggttaactgcattcgtgtctccatggctggagacacgatttccacacactctgcccattgcggggatatgctcacttccccagcctcccctcaaaagtgagattttcctggaatgtcactagtcgcggggggaggtatggcacccttaattgagggcaaggatgtgtcatgtgacttcagcaaatcctatcacatatatttttaccaaaccaaccattctctttgagaaggaacttagattagaaatattaacactgaatgaatattttaatttttgataccttctaaagaaatatggtaagtcctgattttttttttttttttttaggttttcaccttcaaatagtgatttaatttctaggatcactcaagatcatacagttttttcagttaactttcctctgtatcattaagtaactctaccatgattgggctgaaacaaggacatttgcttgacttcagacttagcgatttaatacttgatctagccatccctattcacccattatcccgagtctttaaaattgagtcctttttcgatatgttgaacacccactgaatattcttttttttttttttttgagatgaagttttgctcttgttgcccaggctggagtgcagtggtgcattctcgactcactgcagcttccacctcccgggttcaagtgatcctcctgcctcagcctcccgagtagctgggattacaggcacctgccaccaagcccagctaatttttgtatttttagtagagacagggtttcaccattttggccaggctggtcttgacctcctgacctcaggtaatccacccgccttggcctcccaaagtgctgggattacaggcgtgagccaccgcgtccggccacctactgaatattctaatgtgtgattctattccctgtggtatatgtgttagtttgtgttcttctatgctacacccactcaaaccaaaacaactttttgctgttaaggctttttatatttattcagcctgcctttctcaatcttgaaaaatgtagaagaaaaagaaccacatgctaccacaatatgtagtcacttcttataaacttgggacactttggtagactctgtaaattcaacaaataaatatgtattggttcattccttcaatgtaatactctttcagtcctcaaatgttatgatgttgatacatctattgatgttaaaggaggttttcaatataattaataagtaaaaaaaatgagacagcaaaatactatgaatactatcatagtacattataaatagattgtatgtatgtatatatatatatatatatatatagatttatttctatatgtatgtgtacaatatactctgtatacttgggcataggagagagtctggggtcatataaccagactgttaatagtgattattagtgggacttctgtggatttgtattacttgggtttttctatttatctaattattatacagtgaacagttttattttgttctcatttgtctcatccactttttttgactgcatagtcctgtaatttttttttaatttttaatttttttgtgggtacataggtgtgtatatgtatggggtacatgagatgttttgatacagacatgtaaaataaacacatcatgaagaatggggtatccatccactcaagcatttatccattacaacaaacactccagttatactctttattttaaaatgtacagttattattgactatagtcactctgttgtgctatcaaatagtagatcttatttattctaactactttttttgtacccattaaccatccccacctcccctccagccccctactacccttcccagcctttggtagccatcctcctactctctgtgtccatgagttcagtaggtttgatttttgaatcccacagataagtgagaacatgctaagtttgtctttctgtgcctggcttttttcacttaacataatgatctctcgttccatccatgttgttgcaaatgactggatctcattcttttttatggctgaataatattccattgtgtgtatatactatactttctttatccattcatctgttggtagacatttagattgcttccaaatcttagctattgtaaacagtgctgtaacaaacagaggaagtgcagatttttcctcaatatactgatttcctttcttttgagtatatacccagtcgtgggatttctggatcatatggcaacttgtctcatttacttgtgaggggtgaggaaaaagggaatacagtacaggtactcacattctggtaatttttgttgttgttgttgttgtttttgttttgctcttgttgcccaggctggagtacagtggcatgatcttggctcactgcaacttctgcctcccgagttcaagcaattttcctgcctcagcttcccaaatagctgggattacaggtgcatgccaccatgcccggctaattttgtatttttagtagagatggggttttaccatggtggccaggctggtcttgaactcctgacttcaggtgatccacctggcttggcctcccaaagtgctgggattataggagtgagccaccacgcccagtcacattctggcaaattattaagtcaccaaagtctctcctgtgtctttcctccattgttacagatatatgaacatgttgtgtgccaaatggtgataatgcctttttgttttattcagtctcttctgtgtaccaagcgccacactaaaaactagaaacattctatgaagtcgatattgttattgccattatacaaatgaggaaagggttcagagagtttaagtaactggaaccacacagctcctctgtgactcagctgaggctcagactgaggtctgactttgaaatcagttttcgtggtctcaagaattcgtactgtagacgtctcgtctgttgttaggatgaaaaggtcaatgcgtgtgagtggattataaagtgttgctttaaaacgaagaagatactcagagattttgccagtatctaccatttttcaatgtttgcatggctttctggcagtttttttcaattggagcataacctttgtctttgcagccccacctagcctaggatagtctgactgcatagtaagtgtcatgttaaacacttgtgggctgctctgtgggacttggaggagtgcccttcagattctgaggaactgagtctgggaatcttcctgcaggctggtgggccatcctgaaaaagctctatcctgccctggtggccggccacatgccgtccacgtcctctgatgaaaagggcgggaaagctgtggccttccacagctcatagaatgaatcccaaagatgctggaatcctgggaaacttgcccacagaacatcaggagctggaatagctttgcctcacagcctctcttaaacctgcaaaggcgtctttaaaatagtctctggagattattgttgagttggatcttgaacttagttccttgtgtggtgtagattaaatagtctgttgccgtcgctcccttatctccctttctttcaggcttcctctgtccaacattcacatcatctctgttctttcccacactttgtttggcccgtcagtatctcagacactgtggcttcctcacgggattactcagtcagcctgatatgtggcctccagcgcccctctgccaagtccacattcccatatgagcctaattacatacagatcactgcagggagtgaagctgtgggtataccattttgggaaagagcaaagtgcaggaatggggtactttggttatttattaagacttcttcacagcctggcaatgtagcaaaactccatctccgcaaataaagaaaaaacacaacattttaatccaggtgtggtggcacatgcctgtagtcccagctacttggcggctaaggcaggagtttgagtctaggagttggaggctgcagtgagctatgatggcatccccatccacggtcactgaattcccccatgagagggactttggagggaggatcccagggtctgagctcagctctgccactcacagccatgtgcacgtgagcaagtggctcagtcccctgggcctcagggtttccagctataaaatgggcacggatctatgacaaacccgggtaacaaagcaagaccctatctcaaaaaaataaaacacggctgggtacgatggctcaaacctgtaatcccaacactttgggaggctgaggtggaaggagcgcttgaggccaggagttcaagaccagcctgggcaacatagtgagaccccatctctacagaaacattacttcaaaaaaatacaaaaaaagacttcttcaataagcatcatggtgggcatggaggacatgacattttaagaaaggcacctaaaaaattgatttcttgggcaccacaatatggactccttgtcacaaggaccatacatctcatgataaatgaatcatgcctgtgattgttctctacatattgattgttcaaagctctgcttttaaaattcatatagtcagccaaataatcacgcatctattgttcttcagacatttattgtgcacctaataaaggccaaagtgctaggggctggaatttcttatcacctctaggcctgctcatttggactgatttagagaatggagttattaatttttttaaaaaatctttttttctattccagttttccaaagaaattagaccattttcttcgtgagaaagaaatcgacgtgctgttttcatagggtgagtgatcctttgaatctttcatgtatttttacccacatcaaaatattatccaattactatgatgcaccaagaaaaagtgtgtgacagcatgcactctctagttttctcctgcttggaaccaaggtatttttcctattctttgactctcctcatcactgggtcctttggagaggatggtttcccttgtagatttttctgcgatttcttttttgccgttcacatgctttgcctcgtgcgaggtcatcattgttgctattaccttgtccagctcacagaaaggaagtttctttccctcagcaactggtgcacagagatacagctgtaggcaagggggaaccatccagtttcaagtgactgtgatgtcttttgaattccatgaccaagaataacaggatatgagcaccagatgagacctgagagcttgtctggcaaaggccctatgtacagatggggcatctgaggcccagaggctcacatcacctttatggggcttcatggagagtagcagagctaggattttgatactggtgtgtttggctcctagctgcatgatgtttgccctgcacaagtctggttttggaatctgcagattctttttgaggctgtagagttataggtagtttaacttaatgtggtcttggtaatctaataatgatcacccctaaggcaagggtcaagactgatactgatagactatttgactttctcataatcctagttggctactaagtaaaggggttggcagagtgagtgcacccagaacacttctgttatggatgtcatctgagaaagcttattttcttctgcgccctttccaaaccactgcatctgcaatgccacgttgtcatgtgctgagacttggtggtacatctgctttgcagctagaagtcatggtacacctgcaggtgtgtgcagtccagctgcagacccacacacccgactcgcggttgtctgcacctgcagaagaatggctaacagggttcctatattgaagtacaaatctgaccttcatagagacttttgagaaacatttattcttttattttatttgtttatttatttactttgagacggatctccctctgtcgcccaggctggagtgcagtggcacgatctcggctcactgcaagctccgcctcccgggttcacgccattctcctgcctcagcctcctgagtagctgggactacaggtgcctgccaccatgcctggctaattttttgtatttttagtagagatgggtttcactgtgttaccaaggatggtctccatctcctgacctcgtgatccgcctcggcctcccaaagtgctgggattacaggcgtgagccaccgcgcccggccccatttattcgttttttttaaagttatgttggtttttacataagagtgcagttgtgcaataagatggagagaagttaagaatatgattctcagttagaatcccagaaggtaaacttgactgtgtgtgtggtttgtttgtttgtttgtttgtttttttagacatcctaggttaaatctggcttcaaattgtgttcatttaggttggtgaactaagtgcacttatttccaaaacatttcatctcacctagggagtggtcaaagggtagtattaagagcttgtgtttattattttatccaacttgtcagcttaatcactttgtcttcttccctaactagagtcattattgcggaacttgatcatctccttatgtacatacagacgtaattggtgtctaccaacatactgaatggaatgtagaacatagattgctgatttgtgagggatcatctgctgagttaccctaacattgatcgctcctgtccacagagctgggtctacacgagttagcattcattagaactgtgaaggtttccattttcctgtcttatctgagaaaagcccaaaaagtttattctcagagcacaccacagtacaatgtgggtcactgacacctgttgctctctggggactgtaaaggtctctttagagtcaagagattaattagactaaaagaagggggcaattaagggccttgagaaagtgaagaaatgtccatttccatgcttacatcataggattctttgggtaaagaataaactggtagagaagggtctgaggcaagaaatggtgaaggaatgaaagaaggactgcctgaacccatgtagaccacttgtggctactttggtttccttctggggtcatgagcactttgatgttgacattcaagagggcatcaaattattatccaaaatattacaagccgtaatttttttattttaccaaatgagaaaaaactaaacacagatagaagccatgagtatttttctccctaaaaagaagctcagaagctggcccccacatgcatatataccttgtaaaacgtgagtccctgggctcagtttcatggtatgcaatggggctgggtcttgggaacaatgctgctgttgtttctaagctcaaacagcactcaccatcaatggtatctctttaagggaaatccagggaaatgctcttgccagcgctgtgattttatttgctagaggccaggtggcaatgacatgcattggttccatagcaacgtgactgtgctgccagaaaacatataatgactgtgacagccagtgtatcctgggcaggatgagggcagccctgataccctcttttatttcccaccttatcctctcttgcctttcccctcctggggcctgtgatatgcggagaatgtggttttcgtaatggttactatctactcttgctattaacacttgcctcctgtctcggtccatcttggaacttgatgagagacaaggcaatgcctgtaggagtgttctgcaggcctctgaatgggtcagcagggttggcagcacctgcctgtcttagcaattgaaaggaggtggagagtctgtgcttttcatcctccctgtgtgtggcacagcggctctgtcagaatgacctggtggggagggtacttcctgggcatcgtggtcagctgctcctggctgaaatgtgtgggtagtgacatggagcaatgtgaaatccagggaaacagagtgctcatttaatatgctgcagattgaggagacacctaccagtggagcctgcaatgccaggcccagtaggactgcacagagaaatgcaatacccatttctcatcttctgggagctcttaccagagaggcagtttctaattgcagtttctctactgatgtgtggttggggctttcacatttctctaatgtttcctcatctatataatccttgatgaaagaattgtaagaactcttagttccaacggatactttttttcccctctgaactcctgaagcatttttaaaaatctttaccatccatttgacattgctcttgtatttccttttttcatatatattgctttgggggcctgagtgttttctaggtcgaggctaagcccttcaaggatacgaaacatgtatcttcttcttcctcttaaaaaaatttctctaatgctcacaactgagttctgcagatagtaaccatgacattaatatttgttcacgacaacgttatattctcactccatctcccaaggaaattgtgaggcaagtgtgtaaatatattgaaaatgttgttcagttcttcaaagaaaagataaactcaagaaattattttcctaatgtggtttttttaatgcagatataaagtcacaaggtaagaatatctaaaggcttcatatttcctcatcttcctctttctggctactgaccatagcatatacccctgggttttatactggcaccaaaatcatcctttttcccacctcactcccaatattcactgtattgaatttgtctttgggatcagacttctcagtctagcgttttggactattaagtaagagatttgagggatttttccattaagatgacagatagattaggtttgatagattaggatagtgattcctaatttggttttgaggtctgtttaggggagggaaggtttttatcttatggaaacttttatcttacaagagttctcttcccgtcccaagttctgagcccactgagaaataagacaagagtattgaggcagacgggggccagaatgcaactatgtgactgagggcaatgagctaacttgacacctgcctgttccccagtctagcctggtcgcaggccacctgcaggaaagttttgagtctacaggcacctgtctgtgtgaagagggaaggagaaagaggcccaaatccctgctaaccctgctcaaaattatatagattcaccctatccaaggagggggcataggccacgttggctttagccccagccgggttactcattccacacccttggggaagaaaaggttggagcaagaggtcagagggcataagggaaatcctcccccatagaaagctggggtggggcgtggcgtttccttcctgctctggccatatttctgctccctgcaccccatcaggcctacccgcccccagctcactcaagccttcttacctgttgttttcttcgtggcgcttgggcttctgcatccgactgctggtttattgttagtctcctctattagaattagctcagtggaagcaaaagccttgtcggtctcatggactgcatgtatcccagtatttaaaactgtgccaagcacataggaggcatttgatcaatatttgttgaatgaataaacacatagatgttgtttgatgcctctgctcacactctttaattacctggacatccctggtgccctgtcttgtctggcaagtctgtaggagctagttcagcaatcgtggtctcttcttgctctgtatgtagctcatcagttggcagtagttggcatgtgtgcatgtgtgtgctctcatgtaggtgagtgtgcatgtgtgtatctttgtatgcatgtgtgtgcacctacatacctgtatccttttgtgcatatgtatttgtatgtacttgtgttctctctctctctggctctgtaatacttcacttatttgtttacatatcttttacccttactagattgcaaatgcttgaagaactggggaacctgttaatcattcttgttcctctaatatctgccatgtagtaggtgctcagtatatgataatattagcattctaagcacttacaacatgcccagtactgctttattttaaaatttaaaataacttttatgtatcttgcatatattaacttgtgtaattctcacaacaaccttacaagatacattttaaactcgttttgtgggaaaggaaactggggacatgaagaggtcaagtggctggcccacagtctcacagctagcctgactccatagctttttttctctgctacctctcagaaactgactactgtatttgtgtgaatgaacaaatgactgaatgagaattttagaagcccagaccaaaatcattaaatagacctaaagacattagggtcaacacaaataagtaaaaatgatgagccatggttgacacagaatcaaggccatggctaagataaattcacagatgaatagctaatgccttcttgtagccattgcacttaattcctgatgatccatgcctgcatggtggtattggttaatgcaaatgaataattgttattacgtattgggaattatttcctagtgggaaaatatcaagtcatcagttatgagttaagcagctactgcttgcgaggctcacaactaaattttggggaaaatgatgagaggaaggaaaatgtgagttggagggtgaaaaggtaagccctgaaagtacaagccaaggtcactgtcttcaagaggctcttgtctcattaagtggcaaggagtgagtaaaagtgacattaaggcaattaaaagatactgagggcagtaaatataaagcctagcacaaggcattgttagacatgattcattaccaaatggtaataatagagaaaataaaagctattgtattagtcaggataggataagcttttgttgcagaaaggtcaaccctaaactttcagtagcttagcaaaataaaagtttatttctcattcatacagtgaccgctgtggatgcagtatctctccaggacaactgtcctccatgcataactccatgatgcagtctgctttgatctttttatccagccatctaggggcctctttcatgatcactggaagagagaaaaattggaaaattgcaccagcaattcaatgcttcaaagctttggcctagaagggacacttgtcacctgctatgtcctaagcatggcttttagctttttgtataactcccaacgtcccagtcctctcacacagcacacagtaggtgctcgataacgtgtagggtaaaagaatgaatgaacttaagaatgcattgtgacttgctcctgatggtgttgtagcagtaatatacctggcagcccccaaagcccaggcttggaacagtcagatctggctcaaaaatatttactaaaattaaaagagcattaataaaaataacaacatagttaacattaattagctatggtgatgggacaatcataaggacacgggcaaattaaactcaatttagcaggtggctaaacttacgctaaagccccggcctgccagacattggccttgtcttagacacatcactgtctaacagtccagagctcaactcacagttcacaagtcatctggtcccatcttgtctttctgaccttgttcctcctgaatgagatggagatcattaggcttgttaaaaattaagaagctttattaaggcaaagttaacctgtctgggatgcttccatgattccatcccaggtgtatggaccaccctataccatccccctcctgcatccgcttctctcatgctttcatctttcatctggggtcctggtgaacagaccacaattcagctccagatcaacgaagaggggcttccagacaggggccacgcatatgctgaggaaaacacagcaatctaacatgtaaagtaagtgggaagctccgtgtaggactcaacacggagaatggacagctcatagagagaaagggggagactgccttggacagggagataggggtcacaccacatgtgtcagaccaaagaatggggacccctcaaccacattcgctacgtgtgtattatgtggtgaagagaaacctgcctgcgaggaggactgagtcccagccactgacagattcccaggacacggtgcttcttgttggtttgtggtttgggggtggtagtggtagggagggaggagtggtcactgtgtaaatgggcagtgctgtggggaggggtcctgaactgggggttggcagtcactggagatttttcaacaagttggggatgtgaagaaccatgttttagtgagatgagctttacagctgtgtccatatcccgtgagatggtggagaaaaaagagactggggtcccagagggaaggcagttgcaggcgtaaggagataaggttttgagaactactgtgggcgtgttacaaagggaccgatgtggaggacactacaaagaaagagttgaacaaactgagcaactgggtattagaaacaatgaaaggaatggagtcagagataacccaatttttgagcctaggtggctaccgaaggtgtcctgtgttgtactttatggatattattattattaattattattattattattattttgagacagagcctcgctctgtcgccaggctggagtgcagtggcgtgatctcggctcactgcaacctctgcctcccgggttcaagtgattcacctgcctcagcctcccaagtagctgggattacagcctcccaccaccacgcctggctaattttttgtatttttagtagagatggggtttcaccatgttggccaggctggtctcgatctcttgacctcgtgatctgcccaccttggcctcccaaagtgccgtggatattattttaataacagtgtcatcccatgagatagagagcctgtggcagaacccagggattgcctgggacccagatatgcccacgtgagtatctgagttgccttaaccccacctcccttccttcgagccctccctccccaaggtttaggatcaaatcttaaatcagcagcaaaactgccaggctgaaatttcatctccatcctggccctctagtggagataaaatggtttgaatgtgggcgagaaagtaaaacggaatgtgtggttgctgagtctagctgttgataagagagggttcaccatccacccatgagaactgtctctctcctgctggtgtgcctcgctctcagacgcagcctccctatggctctgggacatgaggggtaatgtcttgccggttggtaaaattcttgcaagctgacagtctttttttgtttttcttttttttaagctccacaaggctactgcacattgcgttcttgctctttgtgatccaacaagagggagtcagttttgatttgggagaaaggaggaagaaagctgtttgatgggcgagaggaggcatgtattgattgcattcccgttttgctttctggggctggctggtcatgtcactcttcatagctgcctggctctagtggtagaagagagtctaatgagagacgctacggctgtgtgcagcttgcacacagcaactcttcagctccaaggaatcagagtgagctcctgagctccctgggattcagaggtgcctcagccccaaatctttttcccctgcatttaggctagaacaggaaagatgctactgggagagaagagaattcctgacatcttgcctttcttgtctgctttctgcttgggtctgtggagcagccacctctgggcagaggtgcaggaagtgtgacagaacaggaaagctttaaagtcactgtctccctccctcccatgccctaggctacccttgctggtcagaacctcctgcttactctggtggacagacacctgagttgctgctcttgatgaagtttctcccacttcttcaaaccagcaaggcataggaccccacttggcttggaagacacgtgacgctcttgatcatttcagtcccttttacatccccataatatcaccgtggcctgttagattgatttgtgagtaagattccttgcaaatagcaagatgatcggaagcctctatcttttccgggggaggtgcatatttaaacagacagcctaagctatttatagattgtaatgtattgtgttacagggaaaaggtggaagtcaacagtaatgttctgttccccatttcctatagtttcaagcatattttcttgctagtcctagagactttaaacatttagaatctccagtgatatctatattcttttgatgtactttgtgtagaaactcaagcacgagcaggcttcagagtcagctaaccaaagaatcttggggcttttgatcactttccattagcacaaacagtgatctctgccctgttgtatattgtttgaaaggacatttgctgtttaatgaagataaacatgttgctgggtttttaatatgtcttctcaactcaggagctgaaaaatgcatacatgagattagttctgttggcgtagaagggattctgcgtgccccaaacattttcctagccgttggctgaacttttgaaatgtgctttgcactgcaagaacagatactgaacagatattttacttagaaagccttctgtttcaatggtgattcccaggggccactcaaccacatcttactaaataatatttggtcaaaagagaaacgtgagtgcaagaaggacacatgatcacagccactaacaaattcctagaaagtgctgcttgttgtcatttctggttaggaggtgatggtgatggcaggtagagggtctaagccattctcctgtctctcttttaaagtacattcttctgttgctgtagctcctggcattggctgtcaccctcacttgcaggagggagggaatgactgtttgttgctgttggtgtctgaaaatctgtgggcagaacttttagaaaaagcagaccacagagcctgctatatattttgttcagcccattctatttctcttcactttttaaccgattgcgacaaaaaaaggggcctgccttctaaacttgtctttatctttaaaagagaataccttttataaatgcttagaacttggagatgctgttgtttttatttagtatttgaaaagctaagtatgctgacactgtcctgggagtgcaggcccctcattgagagagaacagtaaacacagcaatgactttgcttttaatttgaaatgcgttactcttcttagagctgaggggtgatttgagatgttcctgttttcacattcagctatttcctggttctgtgatcataataaattccatagctccaaaacattagagcaaattgtgtcttctgtaggagttatttacggatactcaaacaaatggtgctttctgaggaagaagaactgtgtatgaaaactatgtggtaaagcctttcatatctgccgtggtggcagaacttctgaggagctggctttgagggtaatgatatctttatcaccctgacgctgaatggaggcggggaggcctttgtgtgttctgttgccaactaacacctggctgcctcagggcatcctgcctggtaattgaacccatgagtatgtacaaagattagagggaccgtttgaggagaaagatgggggctggagaggcaaggttagtcttgccattataagcttaggtgcagaaggaagccaagctacctggaaggccacctcgtggcaaagacacccactaaggcagggcggtggcctgggactgaccatcaatcacttcccgctcattctcctcagaactgaggactgttgtcttcagtcttccccagcctcgcttatcttcctcctgcttcctgaaggaaatatccttttgcaatgggtggactatcaacttgaatttttagcaagcaggctggagaagtttttggaagttttggagacatggctggtcttgaattcctgggctcaagcaatcctctcactttggcttcccaaagtgctaggattacaggtatgagaagtttttggaggtttcggacttgttgctaggttgattctgagggagaaaagacctctgttattcagaaggttgtggacttctgaagaatggaaatcgggcaccctgaaggaaacatatgtcaatcctagtcctggagctagcatggctcaagtttattcccttaaatgtctattgtgttaaaacataaaaagagtttagatatacttccacatctttgcagttgttagctctctggacatttataaagggaaaggaagagtgaagcagagccccattaattcccatgcatggtgtctgctgtttgaatcctggaaatcaggatgattttattcacatgttaatgccctctagtggctagtgaggtgccctctaagcaggactttccccagcttccaccccttcctctccctaactaaattaagcacccactttacagtagttgagtatgtgtcatatcaagtctgtattttcttactaagattcatctaccacgtgggaaaaaaaaaatcaaaagctttgttacagttcaaagaacgtagtgctgttgctacatcaagtgaggataaatcttccatctgtagcaatctgtattataagtctactggatgtgacagaaaactctttaaaactttgatgcacatattttcacagccaaccgatttcattaaagtgggagaagtgtactattggcaagcagtttttctgctgacttcccacccttaaatagacaagctttataaaaagacaaaatcttcccagatctatttggttggccaaggtgacatttgtcttcctccctcagaaggttggtaaaattaaccttctgctttctgtatacctttactgtatttttatttctatttatttatttatttatgagacagggcctcactctgtcacccaggctggagtgcagtggtgcactcacagctcattgcagcctcaacctcctggggttcaagcagtcctcccaccttagcctcccaagtagcttgggactacaggtgtgtgccaccatgcccagctaatttttgtatttttggtagagatggggtttcactgtgctcctctggttggtcttgaactcctggactcaagtgattctcccacctctgcctcccacagtgctaggtataagccactgtgcctggccctagttttatataggtaaagcattagtcactcacaatgatctttgaatgagttatgtaagttatgtttggtttctcctactttgttttcctagtcagttcaaccagtcaagtatgagatgagtggctgctgtgagcttgatcaagtgggtcggaatcccctgggaatattgttaaaatgcaggttctgatcctgtcggtctgagatagggcctgagatgctgctggtcccaggaagacactttgaggaacaagttgctaggtgatgcagaagacagaagccatatttgattttcaaaaatcctatgatctgaaaaggaactaggagaagtatacaaataagtatggcataagacagaaggtgataaactgtatataaaagtaaaaacacgcttcagagggttaaagatagaagtgatcacttctgattgggaagatcaggccaatttccacagagaaggtgatttgggaatgggattttagtttgcaacagggattgcggggaggcgtgcgagggccattgagaccagagacgcagattctggaaagtgaagagtacgttctggaacaaggggccacccgtatgcctgtgatggggaaaagtgggagataacagttgggaaggtaagtggaagccatattgtagactgtcagacagtctgggatggaaactctggacttaattcaggaagcgaagaggaaccagcaacaagagattttgaaacgagaaagaagattgaaactgcagtttagaaagattcatctggcatgtatatgtaggatagacgggagtggggagtgacagcccattccaagagaaggagtagtagataggacagatagcatgattactcttagcaatggggaaaatagagactagatgcgatacagagagagaaggatcagaaggtgtccaggggctgtcagagtttcagtcctgaatggctacagaattaccataaataggacagtcagaatgagctatcgaatgcttttgaatggaaaaatgacctgaatgagtgcacaaatgtcacctccaagaggccttccttgtccatcctatctaacatagtatgccggtcttcttaccctgctttgctattttcatgacactttttactgtgacattaaaaggatggcaagaaaaacagggaggccaggtaagaaacctgtagttgacaggatagaaaatgacagtggcttgggcttgaatggtggcagtggcatcagagagaggtagctgggttcaagatacagcctgatagtatccagtatattctcgttgtgcatccagtctcagctgtttgtgtcttgcaaaactctgtacccattagacaataaattcccccttcccccttccccctccctcctggtaatcaccattctactttctgcctctatgaatttgactgctctagggacctcctatgagtagaatcacacagggtttgtccttttgtgactttttgtttagcataatgtcctcaaggtcatccatgttgtaacatgtgtcagaatttctttttttaaggctgatgaatattccactcttgtatatatcacattttgtttattcattcatctgtccataaacacttgggttgtttccaccttttggttactgtgaataatgctgctatgaatgtgggtgtacaaatttgaggttctcctttcagttcttttgggtatatacctggaaatggaattgctggatcacgtggcaattctatttttaaattttttatgaactgctgtatcgttttccacagtggctgcaccactttgcatttctaccaacagtgcacaagggttccagtttctctatgtcctcaccaacagttgttattttctggttaaaaaaatgtatttgatagtagccatcctaataggttggaggtttgagacctttttttaggggatatttcagatagacagttgagtcttcaggcctgcagctcaagaagtctgggcctgcattataccatagaagttcatatttatgccatcctttatcctttcaatgaattttttggccagtttgtctataagcatttaaggatttagagatttctattaaaccatcagatttgtgcttaaattatttaatctcaaagacattttaaataatatatacattaatttagacatactgctttcttccactttcatattatatgaaataattttacttacaacttttatctactatatcagtatcttcctcacgttttgaactacatggcaggtcatgtagtatcgttttccaaagcacatcatcttgacgttcatctactctgtgtttgatgctattaccagaaatttcatcctaagccgcaagtgcccattcctatattcgttggttacatttgttgagaccccattggccaaaaaaagacatatagccaagcccacagttaatgtgagcatggctatagggaggcatcctacattggggaccattattgtcacaatatcctaaaccatattattaagagatgtttttcttcattcttcctgtgagtgtattttgatgaactctgcaacttaaccacttactgtgttgcttttaaaagtaatctttaaaatgcttttttatttatagtgacatccagtgcttgcaactaggaaagtcatacttccaagaataattactagtcaaatttgttttcttccattaaaaaacaaaaggaaaaacagttctgttaggtggctgttatataaacatgccaaactagcatttatcaaggtagttttaaggtaatatgtcttccataaagactactttatttaagagaccaatagatacaataaactttgtaagaactcaaaaattaagggtacttaggcttttctgagggctttctttggagaaaaattaccttatattatattaccttttattcaggcatacataataattgtaaatttggctttggagacttcagtcaaagaaagagcttctatacaggaaaagcccttaaacactaatatagtgattgagcccattgctcataaatgtttgctaagaaaaatacttgtctggcgtattcaaaggtcagtctttcctagaggcatgaggaacgtttcagagttccttcggacattgcagtgctgtggctggatgatgccacttacccatctatttatccatttatttattcattaacttcaaacaccttctatagtgcagagaatttctaaataccatatattagaaaatctttattttatgagtttggctgacaagggtaggaataacaacagatattaaaccaaaaagttttgcattactgaaaaaattggacaaattcatattaaaagttcctaaccaaaaatctcacagatatgatgcagtaattgaaatccatcatattctaaggcttaaagcatgatgatctgcttctacagtgataatttgggtaagaaggacagtgttctaaaaaagcagccttaatatataacacggaggagtatatgtattttggtcaccggccatttgtctgtccatccatccatctgtccattcatccatccagctgtacatacatccctacatcctttggtttatttcagtggtgtcaactcattacatggcgttgaatgatgttatcaataatcattggcatgccctttactcccttagggtagaagagaattaggtaaaaggtagtactgaaaaaatgttttcccctcttgctgcaaagttataagcttttgtttcctaatcaggcccactagaccacattttgccagtgagcctccactgaaacaaataatgataatgttcatttcacatctttgacctgggaattgcagagtgatttaccaacattaactcatcaattctcctaacacttctgaacaagacattataatatatcattgaattcatcatgtaaatggattctgtgttttccagagaatttcaatatcctggccaccaattacatagggagtgaggagaaaaattaaaacaaaaattacccttttctgaactactgtcttgtggcctgatctccatcagaatgtcttattttctggaaattttaaaagggggaggtcagaggagacatcagctttgcttatgtaaaactattaaataaaatcatactagagaaaaatcattagaaaatgaccatttcccttaaaccactttcttcatttgactcattgcttaataaaatgatgaacttgaaacgatgctgcctgctccatgtcacccaaatgatgagtcacatcatgtgaacaaatggaaataaatcaccagcgaaaaggccaaacttctgtgctaccctagaaatattttctatttttccagggcttccaatgatcttccattcctgtttaactcagcttatagtaagccctgatgccaagattttctgagttccctgccaaaaccatgatgctctcagcctgggcctctcttctaggagggaagacactgccctccagatgaagtgaaaaggagaatcacaaaaagaggattattccttatgggaggaaatgggacacgtgctgcttattgtaacatcattcgccattcgttgggtatatggaggcttttatgagaaagcagaggtttttataactcatttactctggcaagtgaagcaacactaaaattacttaagtgtttaaaagatagacgcatagtagtttatgttctcagtcatcttattactgagaccctaatttgctttcgttaaactgtcggttctccctgagagtgctattgttatcggagcctcataaccgtgtacacgggtcagtgatggtacaatatttccggaaatttaagtcctccataagtagtcaattgcaggttgttttaaggaacaaagactgcttttccagcaagcctggcttgtgttcctattaaggccccttcttttttattgcaaggggaaatttcaaaatctcattgctgtatttaactttctattttagtaggctgccagtgcacttaaccttccatataaagcttatatgcgtttatgcgttctttcccttattaactttttaaggtttgggatgtcagcctgacctaatgatagaatatgcaaaaatagtcctgataccagcaccctgagcccacctaataagggacctttttcatactgtttacttatttctgagtaacagaaagtctgatggtttggtgctggctggttaaattcaacacatggtaagcttgcctgttagtgaagaaggttgagatttgggctgccggtatgttttcttctttcaggcaaggactgagtggcttccccatgtgtgcctaggtgtccagctgaccacagctgagagggataagcagggattgtgtccagctgagtttgggcccctcactcagtggcctacgttcctcggagggtgtgtgtaattagctgctgagtagtagaaggcagtagccatgatcccagttggaaaatagaagtagagctaaagctaaaaaaaaaaaaaaaaaggaaacaggagagctgattgcaggaggaggaggaggtgggctcttgctattttctagagcctgaaccaaccatgcaaagtagaatagcaggtgttgcagctctttcccccaggaggactcctgagcctcgtaagaaggtcagagagctggttgaatgttggtgcaggaagcacgtcaggaacagcttaacactggtttaattttcatttcccctgtgttattttacacatgaggggagtctgaggctgagcgccgtggagaggtctttgtggggagcagttcacgtcagatccaggcctggtcacctcctggcctcatcccattcacctgagtgacttgtcacccttttcaagtccttttccttctttgctttttgcttctccaagtgtgagattggcaatgtgatcattatatgaaaaacatttaaaattaaaaacgattctgtgcaaatatgaaatagataccagttttctttgatttctgtagtgtcactgatgataatatgcactgtagattaaatgattagtttctgggggtgggggtgctaccactcttttatgtaccaatcatatataaaataagtcctgagttcagaaatgttaaaatgacaaaaatcacatggttgtcatatataagctatgtgtgttgtatacaggctgtttgacacacaggccctgttctttacaaggcatgctttctggaagcccaaaccagtcccaggagtgaaagctggctcctagcaatacatgcgagtaggagtcagtgagggcttaggaaaattatccaggaaattcattttgagcagcccaaactgctagctagtagctaagctagtaggcaggagtttcattgaccacatgtctcaaccacatttaccacatttcttgctaaagatgccctaagtggggctgaaaggcacaagatatatagcaggtgggggcaagggggaagtgaagaacctgggtaccccacaccctagatcattcaattacatttttaagaattttttaaatgtacgtatgttaaaaagtttcagttttgcaaaatgaagagtttggggggtggatggtggtaatggttgtgcatcattgtgaacgtacttaatgccactgactgtatagttaaaaatgtttaagatggtacattttatatttgtgtagtttaccacaatttttagaagtatatatgtaatatatatgtatatttacataaatatttttccctagtttgatgaaagtatattgtcatgtcatccactcacccatccatctttattcattcattcaacaaatatttatgaagccactgttaggtcaacatctgtgttccaagctggaatataactatgaatacattttctgtgcttgtgttactctgaggttagtttaagtgaaagccatatgaacaataattaccagccagcgtggtgagccaaaaatgaatgtgtatgtggagttaagactgtgtccagctgtgcagagttgtggggtgtcttggcatctgtcaaagagaagatggacataaagagatcacctgccaagggacagcatggacaaagcacagggaacaaacagcatggtgcagtgtgtgcagggaacagtcagtactccattggtggtaacttgtcatgaggccaggagcaaaccatagagggtctcataggccatgttaaggagtacagactcctcagctcggtggaggtcagaccacattctccagtagcctgaggatttctcagtctcccaacctctgccctgtgaacctctgtggggctgccttcagaagtacttggtggtgatggatgaggagtaggaggaaccgataaaactagatagtgtaagtagcctcaattttatttatcttgtgtattagatttctatataagattttgtttgaaggcagagttctggcttttaaaaaacacatttgaaaatcattgctgttggcaatgaggaatcataaaaaattattatagttggtgacgattagcttagtgttttaaaaatcaatattctgcattcaaagcaataaaccttctttctccatttctgaacctcacctcacagtactttgcacatactaagcattcaatgaaatgttcagtgggaattgttttagggctatgacttagggatattttcattatactactgtcataagggtccacttaaatagaatgttgcccagtaactcaaaaggaatttgtagaaatataaactatataacttgccttttattctcacttttctttgtgtgcgattggactgtaataattattttttctgagttttcttgtctatttctgagacatcaggttttataatttgatgctttggacctggttgacaattccgattctgtatgtaggattgaactttgtgggaaatagcagttaattgtattttttaatgcttaaaatgatattctgggcaagttttgtttctttacggtctatagccagaatcctactgtttttcaatttgtttaaatgcaacagcttatacagcatatgtacatgttcagttgaagataaaggatatcattatttttagcctattacaaagaaaaccacattttctcttaaatgtcttgatataaagtaatttgaacacaatttctgcacaaatcattttcaagagattggctgtcaagtgtatttttttaagtagcactttcataagaaccaatgaaactttgcaaatttagatagattctaagcctgaaatgtggttgaagatgtcagtttttaaacagcactttgagaagtagttaacttaaaagtatagcaattcagagcatactgagaatgattttgaagagtaaagtcttgatacactgaaaagaaagttgacagattcactacaattaggagacaaggaggtacaactcccacttgtgaaaacttttctcatctaaccaacttctaatacttgcctaagaaaatcttcagcaaatccttactcctttgcagctcctaaatctattgtatagaattcttccagtttcctaatagatgctggcgaggctgtggagaaataggaatgcttttatgctgttgggggactgtaaattagttcaaccattgtggaagacagtgtggcgattcctcaaggatctagaaccagaaataccatttgacccagcaatcccgttactggttatatacccaaaggattataaatcattctgttataaagacacatgcacacatatgtttactgcagcagtatttacaatagtaaagactggaaaccaacccaaatgcccatcaatgatagactggataaagaaaatgtggtaaatatacaccatggaatactatgcagccataaaaaagaatgagctcatgtcctttacagggacatggatgaagctggaagcctcattctcagcaaactaacacaggaacagaaaaccaaacaccgcatgttctcactcatagtaggagttgaataatgagaacacatggacacagggaggggaacatcacacaccagggcctatcggtgagtggggggcaaggggagggagagaattaggacaaatacctaatgcatgaggggcttaaaacctagatgatgggttgataggtgcagcaaaccaccatggcacatgtatacctatgtaacaaacctgcatgttctgcacatgtatcccagaacttaaagtaaaatttaaaaatattttaaaaataaagaattcttccagtttccttatggcataataatggaaacagaataataacatgacaaccctcctttccttgttttaaggaaaagtaagttgttaggcctgtgaacaatggcagaactgaaatggagtcttcactcaagccttgtgtgtgattgtgtgtatgcatgtgtgcatgcgtgcatatgtgcacactcacgcacatgcacaaacctacacatttgagtgcaccagtttaaaataagagaaaaaagtgacatgaaactcacttcccaatttctaccatcattaataatacattttaccaattctgatttgttctactattgtgtcaaggctagttaatgtgccccatgcattggcagacaagatgatattatgtggaaattgtgtcttgtctattataagaacctgaatatttaagtatgggagatttttgcctgatattcttcagtcttgtcactcactactgattaagctttgtaatctatatatgggcattagatgaatccataaatgaatgaattggtagtttcctcaatgttttttttttttttttttttttatcataatgaagatatttcatgaccttttaccagtcttatcacatcttggaaagaattactacatctctgaaaaccctacccaggtaccttcttgtagttgggccatatgtttctcaattcagatatacccttgaggtccactttccttaggtggacatacacttatgtacactcacacacccacatgcatacaatatagagaaagaaaggtaaatagtaaccgacagaggtagtgcctgctattctcttcagcgagttgttatcccctcgtcccattccacaagatgggtgccacattgaagatgcaaccaaattacatgcccacactcacagtggttggcccttttgaaattactgggagattataatgatacagactgtggggttgaaacaattgtattaaaatcaattttctgccacttccaagttctgtgatctagggctgtcgcttaattaatctctcagagtttgtttcctcgtgtgtcatatgggaacaataaacttactttcacacggttgttgagaagagtgaatgataactgatacaagaaattcaagttttgttagttttaatcggacatcataagacttttaaaatcatgtaaatgtacatccctaattgcttgcaagtggtgcaaggtgacaagaggagccacctttgtgggaggagtaggtggcaacctctgatgacttcaggacagtgactctccaccttggctgcatagtagaatcacttggggagctttccaaaattctattgcctgagccataccccagaccagttaagtaaggatctctgtgggtggaacccagacattagtactttctaaatctctctgggtggtcacaatgtgtagccaagttggagaactgatgctttagggggatttaaaagtcttcactccttgcattggctgaattgatgatagccagaattctacaacctacactgtattctttttgcttaagataaacagagtcttaggtatcatgccaaaagtctattatttctcttggttatacacgatttggcatgaattagtttattaagttttctccaaagagccaatcttaatgggtgggtgtcgggcttggaaagagaacagaggtctgtggatatctgaagacaggggctgttcactagaggggcacaaacacagaggcaaatgcaacccaaagtcagcaatttcaagctactgttgcttttgaaaattagttcttgcaaaagcaccacctcaagaggtggttggcttccctgaaagctcagcatcatggctctggtgggtcatcattcatgaaaacttgctgcatctttaaaatgtgggatgaggaaaaacatttaaatagtggctgaatacagtcatagtgtaaccaaaagccagaaaattaatttttaaaataatgtatatttttaaagttttgttttttcaagagaaaagactaaaatcacttcatactcaaaatctctcttacctcttttcaacaattggtgctgagacaatggaaaaagtcacctgggacacatgccagagaaagaagttgaacccttacctcacaccatatacaaaaatgaactaaaaatggatcaataccctaaatgtaggaactgaaactataaaacttttaaatgaaaacaggagtaaatcttcatgaccatggatttggcaatagattcttagatgtgacaccaaaagcacaaacaacaaaagaaaaaaatagatgcattggacttcatcagtatcaaagcctttgtgaaccaaagggcactgtcaagaaagtcaaaagacagcccacagaatgggagaaaatatttgcaagtcagtatctcataagggtctagtttctggaatatataaagaactcttacaattcaaagagaaaaagactaacaacccagtttaaagatggacaaaggcattggatagagatttctccaaagaagatatataaatagccaataagcttatgaaaagatgtccaacatcattagtgtttaggggaatgcaaatcaaaaccacaatgagataccactttattatggtcacccattatgatggccataatttttttaaaaaaggaaaataacaagtgttggcaagcttgtggaaaaaatggtaatcttcctacctggctggtgggaatgtagtatggtgcaatcactatagaaaacaatttggcaagtcctcaaatagctaaatacagaattaacatatgactcagtagttctgctcttaggtatacactgaagagatttgcaaacaggtattcaaacaaaaacatgtacatgaatgttcatagcagcatgattcatagtagcccaaatatggaatcatcccaaatgtccatcaactgacgaataaataacaaaatgtggtatagcctacaatagagtattattgaaccaaaacaagaatgaagtactggtacatgttacaatatgaatgagccttgaaaacattatgccaagagaaagcagccagacacaaaaggccacatattgtatgattcagtttatacacaacatccagaatagacaactccttagagtcagaaagtagattagtctttgccaggggctgagaggagtgggggacagggagtgactgtttcatggataagggggatgatgacaatcttctggaattagatagtgatgatggttgttcaacatgtggatggagtaaaagccactgacttacacactttaaaaacagttaaaatgctgaattttgttttatgtgaattttatcttcattaaaaaatacccctttgaccccatctcttctctaatcctgcacatatagccttaaaccagtcattttaccctttgtgattccattttcatcttattctgttttttcctctaatgttcaacttctgcaaagagacatctacactggtcttcatttcctttccagcccttccattcatcactccagattctacacctgacctggaaaggtctgtgttaactcaaacagaagcttgggcacctcttccttactagaagggcattccagtgattgacattagaaatcaagttcccagcatggccctgccaccaggctggactcgtccattgcactgtcaccaaggaatgttaagtcttggaaacagatggaggaacttgcacggcgtttcccagcaggcacaggcgattcctgcaaacttaggagagtgaaagtcacacgaacaagaatgtaaatttgtgtgagaagacgtgatgctgttactagcagagttaaagtgcttttaactttggataatggatagtctgctctgattgcctcgaaggtggatctccaagcccacagaacggtctaaaagtggaaggaagctgtattaatcatttatttaattttctttctttctctctttttctgctggggtcagcaggaatgggaatcttttttttttttctttttacatcagtcttattatgattatgattatactgaaagacctggatgggaggaatgctgcaatctgaattaaaaatagcattttctgtcctcccacacacaacacttgagtgctctgaatgccttttataaatgcagactttctgcctggctagataaaagaagctgtcacttcatttccataacgaagtcattcccgggagaattccattgttttagcaatagaatttttgtaaaaggcctcttattttgcctgaaaaaggtaacaaaaatgaacttttgagagcttattcgacaaaacaattaagcagtgaagagagattttctccttttttgatatattaggagttgtaagtgtgagaatcccctgagccatgatactaggataaacccctaaatctgcaagatgaaggaggaggggagaaatcctgttattctttctcctaatagaaatggggatatgctcttccccgagaatatgtgtcctagagccaagtgacacatagatgatgctaattctaaagagttttaaatatttagtcttaaagagaggtaggaaacttgtagaatgctcatggtgtaaagaaattccttggggtttttaatgaaacgcgatcatcaggtattttaactgagtttcaggactcttaagacaaaccacggctgcatcttgccagcgtcctttactcataaaatagtagttgatatttttctttatttgcattgaaattgcagcaagtggagtacagggtccttcatgatgcagtgtgacctgtagcgagctcagacaggcctgtggacatgtggtcacactcagcacccctctcctgtgtttccccatccctccacacgatggatctgtgctccaaatatggtatcaaatcttcagcgccacattcatagaaagaaagaataattgtatttcttgttacttacccggccctgcgtaacccacatcaaagtatacctgtctttggtgtttcaacaggtaatccctagatataatgccaagtggcatttctgctacatggtattcacagttaagaccattgaaatcccagttttaagctagaatgcttttatgaagcctcctccaaaaaaagagaagttttcaatagcacctttgtcttgcaatactttgttctgattgagtcagaaaattgtaatatttaaacaaggaggcagttactcggaatagtattaaaaaaggagtttaaagtatggagttgttgtatctgttggcttttaatttagtaaaacaagtagaccaaaaagaaaatgagtgctgttgacgtaatattattatggaaagttctgtgggggcaaacattatgcaaaagtagttaaatctggcactgattttgaatttcagaaaataattctgttgtttttgagctttgaatggcttttactaatataccaataataactttttttttttttttgagagagagagagagagtctcactctgtcacccaggctagagtgcagtggcatgatctcggctcactgcaacctccgcttcctgggttcaagtgattctcctgcctcagcctcgtgagtagctgggactacaggcgcctgccaccatacctggctcatttttgtatttttagtagagacagggtttcaccatgttggccaggctggtcttgaactcctgacctcaaatgatccacctgccttggcctcccaaagtacagggattataggcgtaagccaccacgcctagccccaatactaattttttaaagcatgatttgatgtcccagctgtagccatgcaattttgcatggtagtagttcataaaaagaaaaggaagttgtggctttgataggatgcttccaaggtcgtgtttttaatacttttggtaaattctgttacttgtgtctgttcaaaaggacagaggttgggagatgcatatgtggattctgtctcttcattttatcttcactccccgtttggtactttgtgaagtcaggccaaataaaatagttgaagatactatcatataactctcaatattatggcaaaaagagaatgagaggaaaatatttagctatttcttttttaggatttttactaattgtgttattaaaaaggagcaaatagagcaggaactgaaacagacttaaagtcagaggactggactgcacacattagcatcttgcagaccttagctgctcatgatttataaatgcttcagaaattatcaaagcatgaggcacaggctgtgtttcagccttccccattttcaccaagcacttctgcaacacctaaacactgaccttttcaagcaggcatgaataaaactctcctctgggcagaaggtgcgtgatgactcatggcaaccagaaaggggatgtgtaactcgggatgtggagtctctgggcttctagacccagacctccctgtcttctggcccactgttctttctgttgtgctacagcaatacctgaaggacctgcgtgttgaacaaataaggccaggaataagttgtcaataggagcacatgacatcttgtctttaaaatactaatttcctgagacgtcgttctacagctgctcagcacagattgggtatttatcatctatatgttcaacttacattttattttcattttattcttgatatgcagacatacttttctccaatgtataattatatttcatagcaaactttgcactacgtccataaggagatgtaacctgcatacaaatacacacagcagcagtctctgtatgaataaatccttacctttatgtgataagccatgctaatgataagaagcagtgacatggatcaacatgaaatataatttttttaaaaaacctttgaggatagacatttttccagcatatttatctctgataatgtgttctttaggccggtactaattttggattttattccttgaacacaaaccagttaatatacacagagaatattctgagtgcatgctaggtatccaaggactgccagtttgtaagaaattttacaatggataactcccataaatgatcaaatgttgactgaacagggaacgcatgatattgtgaataaatcatattcttcagaataccttgagttttggcctacctcccacgctgacctccctccaactcttcttgaggtctaactggactctcagtccagccctgcactggagatgcctctcagtccagccctgcactggagatgcctctcagtccagccctgcactggagatgcctctccatgggaaaggggtgtttttggcccagtttgcctgccacttaagctccttggtgggcagggtggagacagggctctgcaccctgctgggctgagtgtgctcattcagaggaagcatttctgaactctgcaattgccagcagccctggcagcttctctttattcctcagaaaggaaatacaaagagttacctttagttctgagttggaaaaagaggctgttgtggaacatttcattgagggactgcacagtttccttagagacttatgtgatgatttttctccaagtcacccaaaagggtgttcttccatttgaacacctgtcctcttccatggaggacagagactcaaagacatataacgtcttcaagtataatgtaatataataccatgttatcaatcagttaatcaacaaatattgatcaaagagttatcatttgcgaaagccccgtgaagcttacaaaaagaagacagacataaaccctacctttacggaagttaccacattccacttggggagatgacacctattgtaggataaggaataaaatggttagtaacataaggaaaatgaattttaaaaccataggcattcacatgcaaaaacaaaacaaccaaaaaaaaaaaaaaaaaaacttctgattgagaaagttgtagaataagaggataaaagagttgtagaaaaagtgggatttgagctggtcttgggaggtctggcttacattttgacacgtggagtagaaatgcgggctctcagagaggaagtgagaagctcactgtggctgcttcagtgtgcatgaggggagaagtagaaatgaagttggaaaagcatgctggggccagattgtgaagatcttcagcatcaaataaagaatttcgaagatgttcagtaagctgtaggaaccaatgaaggtatggatggcacggggaagttgtgttatatctactttaggaagttcgatccaacagggatgactcaaatggtttagagagagaaagcattgacaagaagaccaatgagcaggctgctgtgagaggaattcagtctgagctagcatggggcggtgaagatagaaagggtgcagaattggtaggacttggaaaccgatggaatgtgggagaaagagtagaagatgatgatgctgtcagcttccatcagaaattaaagaggaggagctgggtttggagcaagggactgggaaagtttgaaataaacataatttgtttccactgcatatatccaggagtttgtagggggagataccagggaccaggatacagatttaagaacgataaacagtagaaggaaatcattatagaaagtgaatagaactgagcagatagccttaggaaatctgtcccctagagttagaaagaacagagagagcaaaaaactgcagaggggccataaggagtaatataaggaacccaagaaagtaccatctcagagaaattaagaatatttgtttattttggttacaatagacaaattaaactcaaagtgattcaagcaaaaaaaaaaagaaatgtattgtattatatgtggattggttttctattgctgtatgacaaactacaaatatagtgacttaaacaacacctatttatttttttttgtgtgtgcatcttttctttttttattttttatgttattattattatactttaggttttagggtacatgtgcacaatgtgcaggttagttacatatgtatacatgtgccatgctggtgtgctgcacccattaactcgtcatctagcattaggtatatctcctaatgctatccctccccgctccccccaccccactacagtccccagagtgtgatgttccccttcctgtgtccatgtgttctcattgttcaattcccacctataacaatacctatttattatctcacagtttctggaggtgcgaagtccaggcatggcttagttgaattatctgttggaggtccgaagtccaggcatggcttagctgaattatctgttcagggtttcataagactgaaattgaggtgtcaacagggctgccttattatctggagctcatggtcctttttcaagctcacatggttttttgtatttagtttcttgtggtcgtaggaccaaggtcccgttccattgctggctgtgagctgggggccactctcaggtcctggcattcaccttcagttccttgccatatgacttgcctcctccatcaacatgtcctctctcactttgaatctcattcctggtaaagccccatcccttttagggttctcttaattagatcaggctcaccaagataatctctctattttaaggttggttgactttggacctcacttatatttgcaaaatcccttcacaacagcagaaccttgattactgtcccactgactaactgggaagaggtgtgtgtctggcaggggacatggcaatcttgtgggctacgttagaatttggtctatcataatataactaaaaattccagggatcaggccgggcgccatggctcacacctgtaatcccggcactttgggaggctgaggcaggtggatcacttgaggccaggagttcaagaccagcctgtcttgaacatggccaacatggtgaaaccctgtctctactaaaaataccaaaaattagccgggcgtagtggctggtgcctgcagtcccagctactcaggaggctgagacaggagaattgcttgaacctgggaggcagaggttgcagtgagctgagattgcgccattgcactccagcctgggcaacaagagcgaaaccttgtatcaaaaaaaaaaaaaaaaaaaaaaaataataataataataataattagccaggtgtggtggcatatgcctataatcccagctactcgggaggctgagtcaggagtattgcttgaactcggagtcagaggttgcagtgagtgagaccgtgccactgctctgtctgggtgatggagcaagacttcgtctcaaaaaaaaaaaaaaaaaaaaaaaaatccagggatccgtctaacttctggcatggctaaatccaagggactttactgtcatcaggactcagattttctgtctttcagcttttctctgtactgggaagcttccttctccagtgggctttctgtaagaggtggctaaagaaaccagctgttagtagcatcatgctcccgtggtctcactaggaaagagtgtgttgctcctcttagttccaggtagtctgagagaggcctttgattggcttgccttgggtacatgcctacccctaggccagtcactgtggctggagggttgttgtattacgattgcccagacctgggtcatatgtccatcttccaggccaatgtgtgaagtcatcccagcccagataacagccaaggggagagatcattccagaaaagatgctgttcaggcaaaaatgctagtctactaaataaaaggaaaagaaaatggaaggaactattactagtgaactgtatcagacattgttagagaagttaagaggaggactcagcaaaggtcactgcatttagaaggcaggaaaccattcttgacctttggaggagaaggaaggttactaacacagagaaaagtggtggaaatcaagctccagagttttaagatgtaggcggtgaaatactggcattgaatgtatagtacaactgtttgttggtaaacagaagagagaggacagccatttgggactgtattagggtatggataaattcttttaggaatagcagtgactgagtatgcttggagtgtgagaaatttccagtagagaggaaaaagactgaagggaagttgggagcagagttgaccccagcaggatctggaaccagtaggaggagaatggattcagactccaagtagagaggccacacacagtgtaataacctgggtaatatagtgtgtgaagttttttgttgtttggtttttggtttttttttttttttttggtcatttgtcgcttctttgaaatagacaggtatcattgctttcaatgtagctatcaaatggtgattaaatgtactcaaaagatcctcagcatctctctggccctgtaattgacagaaacatttaaccttagagaagtggttctcaaagtctggtccctggaccagcagtatcagcatcacctgggaacttgtcagaaatacaaattatctgaccccaccccaagcctactgaatcagaaattctacagatgggtcttagcattctctgatttaacaagaccctctagccatttctattcgtttctttcctttttttgagtcggagtcttgttctttcgcccaggctggggtacagtggcgtgatcatagtgcattgcagccttgaactcctgagctcaagccaccttcctgcctcagcctcccaaagtgctgggattacaggtgtgagccactgcacctggccttctccagccatttctgatgctgcttcaagtttgaatatcactgcctcagaggtctgcatctcccctccacatgccatgaaggtttccttaatagtggctttgagaagctatgagagctagtgatgtaagctgctggtgatgaggaaatgggggagtttgtaaatcttgaaaggagatgacaactgttcaaattccactaatgacttaagatgtaatggattggaagaacagaatagaaaggctaagttgtaatttaattttttttgagtttgtggagggctgacacatgatgatgataggcatcatcagactttcaagtccctggaagacagagaaaggtgaaatgggcttaaagcatagctgtagactggtgattcttttggagtaagggttaagtcctagaacaggttttggatatggatcatttaagttaaatccaggctcttccactagatgctgttaggaggttgcaaaagaagggcatggcaaggtttctttcatcagagagcttagaaactttttgagccttcaagacttaaataaatccagtggagtataaaaagacagtataacaaagtgctgaactgaaaaggaccttgggtcagaatgtgtggtagagactgtaagtgctgtgggcagtcaggggaaggagaaattggcattgtgtcattttctcctctaggcagaggatgaaactgacagcctggcgtaatttcccaggtccgatggcaagatattggacaccttggcttcaggaagtgctttttcttgttctctctctcctttctgagtgtgtcaaagttgccaggtcaaagtgaaggtttatactctgagactttgaatgtggaatattgttaatatttttgtttgtataagaagcttgtaggataaattacattttatcttggacattttaaatggaaagagactcaaatagaagtttggcatatttgtttcagacaggctttcagacttactccattcatggggagaacatgaatgagcctgttggatgatgctttaatgttgtaggatgaagaaagcaaactactgattttccttagtggaagaattaagttgagccagatgtgggatgatagggaagaagaaaacacttcagatgaacatgacatttccactgcttttaatttctttgcaccttgcttgcggctcatgtgggtaagtaaacagaccactgaaccaagaaccaagagagaaggttgacggaacactgttaacggtgggcataaaagctgtttaagtccaagagagaaatagtaaaaataccgtaatcatcaaggggaagccagaaatctggtacctgatccaaggtcctaaagatgtttttcagaagtctacaagtaatgtgatctgttttcagtcctttttgggggagggttttcttaacttcagctgtggcatgcaggtgtcaacaagagagcttccttttacttcactgtgataacggagtgacttggggtgcattagagagcagggtcattatttgctgtcacatcaagaataatacctgcatcaggggtgttcctctcaccgaaattaatcacagagaaggtgtgtgttgctctgatggcctagcagtcagaaagatgaatcatctcttatttcaaggtatggagaacagttgtgtcactcatttctttttcaaggagactcagttgaaatggcaaaataaaaaagagagaaataacagaacacagttgtacatcactagatcagttcgtataatacagactgtttcctctacctggaaacctgatgcctggctaacttctgctcatttttgactttcctgttcgaatgttagttttgtaagagaagccttcctgagaccctccttctaagtgaggtacccccatcatgactacaaatcacaatgttcatttttccttcatattgcctatccagttttcaaattttatgcatctcctaaaactcatataattatttaattctgtccctcttgaggcagtgagctccttgggtgcagggtcctgggctattttgtttaccatgtattccccagttgaacacagagcctggtggatttagcaagtaccaagtaaaattgtatcaagcgaatgatttaattaatgagaaagcacttggtaaactgtattcattatgaaagtgatggttaattatgtgagtagcagacacctcctttctctcttctgtcccaattttgtctctccattttttattagttctttattttgagatatacttgtcagtgtgttaccaattccaaatctaagatttgttattattcattcttgcctttttttagagataaaggaccactcttttttgttttttttcctcagaaatgctattaatgacacccacaatgctaatactacaactgttttttctgtgcatgctcatgatttgaaaggaaaaacatgactggcctttgtcgatgatgtatttgggaagcaacaagattctagtgtagcacttaaattctgtttcttgtcatcctcaaagctgctaatacaagttcctttgcctcaagtgtgcttctcaaaagtatacaaggcgaaataagttgatagtatcgttccaggagaagctgttcctgggtcagccttgaaagggggaaaaaaatcaagaaatccaggtgtggaaaatattaatgatcaggatatgaataagtcttttcattaaaagcaacagcaaataaacaaaaagttatccaatccttttccagcagggcctcgctgtgccactctggtgggtgtaagtgttgtcttcggtgggcggaaatggcagacagccaagtggaaaatttcacagtgtcgcaaacattcagtgcacgaaacgctgcaaaccagcaatctgagggagccgtgtaccaaataaccacgctcctgcatgtgccctactgcccaccttacactctttctcctagcttcctgcgtgatgccttcactttctttttcccggagattccagattcttcgtttctgttcctattctttcctgaaactcagcacagtagggcatgcagacgtttggatgctcccgggatagttgatgattggtgccttaccagtgctggcttttgtattctggctccagagctcaggaacaggcttatgaccaccaacaacgctttgcattaacatagtggatttcttctcgggaactgtgtgtgctttgcaagaatgatcttcttgatcttctccatgacccagtaagatatgacagtggcagaaggtgctagtccttgcctccttttgcagaagagtaaagccaagtggcctgttttgaggcttttgcaagtttgcatctcagctaagattgtgtctgaagtctcccagaaatggcttcaactttggggtgaggagaggctggctgtaccatgttgtgttctttttgggaaaagagcaagaacattgaacttcttttttaagaaaatggtctttggtgaactatcaattcgtctaattggtcgtgagactgtatttgttcagataacaagtgatttgatgatgtgtttacctttttctttttcttctgttctatttccatgctaggtatttctcacttctctgtgaaaggaagaaagaacacgcctgagcccaagagccctcaggagccctccagagcctgtgggaagtctccatggtgaagtataggctgaggctacctgtgaacagtacgcagtgaatgttgtaagttaacaaccaagaacaatatgtgtagtggcttgccttgtaggattcatgaatcacttgatgtaaccgagccaggtgttgaaggggtattagcatgagctctaggtgatcgtccaattaatttctttttttaattggaagggaatttaattttttaagggaagaggtcctgtttgtatttgctggaacttgcctttctctcggcttctatggcatgctgcaaactatctacttcaggaataaaaggatggaatacagtgattctttcattgtaggaacaccttttctactggtacagtcaaatagtatcagatttagagcagcccctttaaactgggctgttgcagttcttttaggttggtgagtagggggtaaaattctccaggctaaggattagcaatcagagtttccatccagcaattattcttctgtatgtgcagttgatgaaaatgacatttttctctctggcttgtaaaatcttgaggtatgcaagttacaagcagttatgtttggtgcttcccttacttaaaatgagctgatttactggttttgatcagttactggcttgggattttgagattagtaaagtttgttcccacatgtcacctgatggccgccttgcatgagaagttttagtgtcaggtaatggaagagatgacatagtgtgacttcagggagcccttccactaggaaataatgcaaaggtgctcagccctcctactttctagagaatttaccttgttgctggactgtgtcacaaaacacagttaggagattttgaccaggaaagaaaatagctacatgaaacccaggatggcctatgaatacctctgaggacgagaagatattatcttcaaattttaggaaatgacaagccaatttcttctaggtttttgttgttgtttttgtgtatatataaatacatatatttctgtaatatatatgtatactcttgtttatgtatgtgtgtgcgtgtacacacacacacacacacacacacacacacacacacacacacacatatatatttaggtttccagcttcttaactcagccagaaaacttttttgaacatgtattacctattttttttgcagttgcctacaagatttgtaaagagcaaagtgtagcatatatcagggagaaaagtattgacaaggaaaaaaaatgttcctaatttttttggtttcatagatttctaaacatttgtattaaaatatgcatatgtatccatatcatctcctcagggttaaataatcagtaatattaatatgagcttattaaattcaaattttcccagtgcttcattgaaagcagacagtgggagacactgaagcttcattgtgtttccattctgtacacgttgggtctagtggaaatcagtcagcctggaatcagctgacctgaatcctattcctactgttgagatcaagtacactggcaaccttgggcaagtcgcgagcccccataaaacaatattttgcaagtctgtgtattgcttcatactaccttattttcatttttttctttttaattgaggtggtgccttactctgtcacccaggctggagtgcaatggcaagatctcgattcactgcaacctctgcctcccaagctcaagtgaccctcccacctcagccttcagagtagctgggaccacaggtgcacaccaccatgcctggctaattttttgtatttttggtagagacagagtttcaccatgttgctcaggctggtcttgaactactgagctcaagtgatcctcccgcctctgcttcccaaaatgttttgattacaggcatgagccaccatccccagcccatactacctttttattaagcaatcagcatcttggtttagggtcctcataaggggaagagcattgtgaaagcactattttacttatttttttaaaaaaaaccttattgtaaaagtttctgtcactatcaaggaataattgtgggccatgttagatttgggtactccagttacagtgtgttttactagaaatcattttcccaatcaggtaactgttagaatgcacttctggtggtattttttaaagcatttttatcctaggaaacaagtgtcttatgtaaaactgctttaggtttcaggctctatttaaataactcatgcagttaccataatcaagatagcttttgtttcaaatctagtgggggttttttgttgttgttttaaccgttgctttgaactgttcatgtgacaccctgtcagacctcaaagattgagtgaggttttcaaaggacttctgaagtgtacactttaagatgccacatggcagacttgaagtaattttaaaatccttctgtaaatggagtgtgttgagagagcaaggaaataccaaattctagtgaactctttgtgcatgctaagtactttcttttcaaaaccgcatttgcttggtaggggcagtggggggttcctagttttcttagtaaactgtgatgttggtaacctttcattatctgggcacatgtttacaacactggttttctgtcttcctgggtttagtgtcctgcatgccccaaagcctgtgccatggagaactgttgcagtagagaaggcaggcaattttcaaagaatgcatgtttgcacataaacagggtctaggagtgggtgtataaatgtgtgagtgataatcacagcagccattggaagtagtggttcccatgctcagcagtccttgcagatgttactcctggcattcattcctgtgcatgtcccattaactgcctctcaaatctgccaccacttgccagcagatggcctttgcccctgaagatgtttcagactggctgtaagggctggggggaggggggatcttgtacaagaagagaatgatgctgacactgaactcagagttagcagacctggattttatgcacaatgctgttgttagccatataaccttgggtcctctctaccatggggactcattttatgatggacaacttgagaaaattgagttaaatcacctccagtggtggtttttaccctaagtgtctcaagttgcataaagtatcagccttagatgaggccaattgaacgtttattttaccttcttgggttcctaaaaatcaatgatttggcactacctcatttacaactgtttttaaaacattgagcacagtcttagggttaaaagaaaaaaagagttattacatctttcactaccatgaaaccctttccacaagaccctcctgggcaccatatgacaattcaaaggtatttatttgagactgtccttagactatagctttagctgtttaaatttagggtccacactcattggtccttttgaaaataaacaggaacgatttttgaacttgagttttctaaaaccacctctgtgctcaaatattggttagagtctaagcaaggagaaagtgatccatatttcattcctaagcttctctgcttccttaagtaggaattcttgagttaccttatcaaagcagccttccctgatctacataaaatagcatccaccccatccctctcagtcctctagccttctgtgtttttcttttaagcaccttacatattatatatttatttgttaatcatcagtctcctcaactagtctgcaagctctgcaaaaggagggatggtattcttatccttattctcattcttattcttccctggtgaatgaatagtacctaaaatactgcttgttcccataatgggcagtcagtaaatattcattgagtgaatgcctaaatgacattcactaagtgaatgcctctcatgtgtgggcctgagccattaggaaaaggaacatacatgctgttctgatgagaatgcttgaatctgatagcagtttaagggtgtggggaagggatggagagtctagactattttccttagaagtggatacttgatgtgtataaagaaatgtgaggagggaacaatttgtgtaaaaaaaaaaaaattctagacctatcagtagagtttggggattttctaatactttttttaaaagtctgcactgtctgtatttcctctccttttccatttgagtggtttgctttgtcacttgtttgtgagcatcctgccctggctttctgtgaacggcggtggttttgtctcttatcatcacatcatttcatcactgcttacgttcatatttcttttcaaagtagggatgggcctgaagtgctgtatctccctagaaaggggctgactgaataacacttcattctagtgcacaccttagaatgaaaaaatggtgtgctggtacaaatgaaacccatttaatgtctctgtggtgtgtgatgggaagttcacaaaagctttcttagggaggcattgtgctagttagcttttgaggacagcaataataaaggtttctggaattttgtgtgtctatggactcccttttcagaataactgctctgagtgcaggcattactttattcctaggaagaaatggagagactaaaataaatacctctgtacctgtgtaaacagcattatgctgtctgtgtaagtcttaaaaaatgggagctgaatttctcttactctgaatctccagactaagagaattgcacacacacgcacactctaataagagcaatctgggaatttccctctgtgtctgtcagtttgtaccttttagatttgccatctgtgataccaaattctccagcgttacaaaaaaaaaatctgaagtagataagagggtcaggagagaaggggagattccaccacttttggacaagtgagggagaacaatctcctttttcttaaatccttgcttgtaatgctcctgcagattgacctacagattgtaaaggcagagaggttatgactgagctcattccatccaagtgcactggggatagcttcaagtcttctagagttttctctttcacccatttctctctcttcctcagacttccttgaatggcttctgattgacagcttcactagttcctggccattgcccctggtgtgttatttgggatgggcacctttggcagggtctttgcaggagtcactgcttctaagaagtggtgtcagagctacctcctgaggcaactgacaaagcgtagcccatcccaggcacaccctttcccctcagcaccttcttcctcaagtactcagctcctcctctcagcatcttggagaggaggaggaaaatgcaaagaacacccagacgttgtggaaggaaaaaagttcatggatcttttacaacatttgtgttctatggggtgaaacaacatcaacagcctggtcaggctgctttgtaactgaatagtgccaaggtaaaatgcttttgtgtcctctttaagtttagagttcactcaattacatgatatttattaaaagagtgttgtgtgccaggatgttcttgagtctatcagggatccagggctgagtaatctgtacttactgccctttgagactctaggaaggtgctatgggaaggatgtacttggtggcggagtcaggtgtaccgaaagggacgatgggtaagagttgtcagcgctggaatttcagggaagacatctaaattgagccttcaagcagaggtggaatttcaacccaatatatatgtgtatttagagaagacaaaggatgctttgagaagagactaggaatagtattttatgtactacttctgtgtctgggcatgtgagagctcagagccagagctttccttccatcagaaattgtttggtttgaacactgacaaaaacatagcatgaggatttgtagcacatggccaccaggccaccattttcttcaggatcattttagatatttttttttttttttttttttttgcagatgaagtctcttgctgtgttgcccaggctggagggcagtggcacgatcttaactcactgcaacctccaccttctgggttcaagcgattctcctgcctcagcctcccaagtagctgggattacaggtgtgcctcacaatgcccggctaatttttgtattttttgtagagacaaggtttcaccatgttggccaggctgatctcaaactcttgagctcaagtgatctgcccacctcggcttcccaaaatgctgggattataggcatcagccactacgcctggcacattttggatctttatatgtaaaagttgaagcaagaacttgggatgcctaaagaatgatgcctcccagcattagtaagggcagtgtttccaactgaactttgtacagaaaaacccaaacaaaactaaagatgtattttttaggtggtataaattcgaagtgctcaatgttcaagaatccacaataaagaagggcagggatgactgaatagtgataagaactagttgacattgtttagtcatagaacccaaacaaaatctattggttcttaacaacacataaattactccttaggactaatgtaaacagacaaatagaaaggtaacttcattttttaattatctaaatttttcacttttgtaaaagaatcatattataccataaaaatattaaccatgtctccaacttaaattcatgttaaatttccagtggtagctatgtaataaattattgctaagtagaattgtagactgaaagaattaatccatcttctataaatcctgaagattatgttaaccttttccagacacctaaacaagtatgttacatgattcagaaaaagtcatttttgacaagtataaaatgattttgaggtgtgatagcaaattagctgtttcaaacctatgttagagaaattaagttttcagagcaatttttttttgtatttgtgcttatattcctgaaacaacttgcttaaggagagtctccttaaatggaaacataaatggtatacaaatggctatcctctatcataatcttttatttccaaaactcagacaggtttttatcatcatgctctttggactcttaaccatcttcttctacttttaaattctacttctttctcaatacatttttaaacagcatcttgtgatcatttcccagtcttgagtgcctggcactgggaggtgacctgcccacattgctgtcagaattcgctgctggacccctgcacaggtcccaggctgttggttacgtgtttcaatctgcacatcagccatcctcaccagccttcctttgtgcatctggaaataaaaatgctcttgataaaatggttttctaaagtttccattaggttgctcttcatttcatttttcctttcttcttcccaagcctttgtggcttgcatagaattgaaaaaaaaaatgtaatttctccagggctaaaatccaagactttgataggcagtcttaatgcatggggctcctacgagttgctacccgttataagcattgtaaaactcaccctgcagaacaaagagaactgggcacaaagattattctcttcttcaaccatggcaagccctagttttccggtttcctttgccttttccttctttgatctctaaaagaaggtagaagagtagaacgctattgttcagaaaggagaaagctattgcttgtccaaacagattgttttttccttctgtttggcaacctcaatggctctacctgtttctggctgtcatacttcggcttgtgaacagccttcctccctaattttcaggaaactaacaaattaaaggtgcaaatgtcaggtggttactacatatctactggctcacataattcaaaacagagtcatgcagctcctatctaaagctagttccttgccccttctcagtcactaccacatcaagcacaaatgtagatgaaagggtagtgtgtcaaggtgagagctgcccactgggtagtgttactcggtcacttgctataggggacagattagctgccaatcagtatctcatcactgtcattggcgtttataatccaggttcctagccccactggtgatctatttctgtgcctccgcagtgacgccagttgtcctagcaacgtgctggctggcacttcgttaaaggcaagtaagggagtggtggtggaagagggtggcctcgagagggtcagaagggagttggcagtcaccttgctcaaagaggattttccatttccctcatctgggcaggcctccaggaggaaaacgtcacttactaagtgtatcatgggagtgtcacttactaaggatcatggaccacatggtctttctggtacagatagaatcccacggagaataacaaatgaattaatgggtagtccaggcagaatgtggggactgccgggccaagatgttaggcgatctcaaagcatctgatggtatcagtttttcttgtgaattaggttaatgttttgcttgtttatcagcactggcatgcagagttggagacatgagtagatgtttgggaggaatcagaggtcaagggaggcagaaggaagggaaacaccatgacagtccctcttggccccttttcctgttgacaggtctggcctgaaagccatccagtgtaacgagagccttcttactgagctctggtaatttatccatgcacccagccttgaagaggaatatggctcactttgtaatcttcttaattgctctcctctcattatgccacattgaattggcactaaatgactttttctgccattttccgatttggatccaaagaacatagaaatactgtggattgtatcttaaagtccctgtccaaagtggccttgcctagatgaaatctaaaatggacagtcaagtgacattggcagagctgggggcttccctccatggccacttctctgtggaagcccctaggcaatgggtttgggtgacattttctcctgagagtgcttcgtctgtgtggccctggagatgccaagacatttttcacgaagaaagagactcaaggtgggtctttgcaaggaaatggggaacaagggagactgatgaaagggtgtccccagagcattgaagacccacagatgacaggaagtatgacgtatgcattgttgcctttcccttcacgactaaaagagtttttgtagtctcaatgaccgttgtcatttgttccactgaatgaccacactcaagtcgagataattgcatgaaactgtgtgcttatgatgggaaagacatttagggtgtaactgaccatttctagcacgttttgtatactcaacagaaggtatattcactccttctaccatagctgaaataagggctggtagtgaagatctgggactggaattgaaagaaataatttttggaaaaagaaaaactccaagggtagctgttggcactttcagagcatcccatattttcaggatgttttgtatgagataaagtaaatcagttttgtttgacagggtgtagtgtgcccagccaggtcattattttaaattgacaaaatgatttaaatgatagaagacattgtatattcctgaaacaataaatacctattaagtacattttgatacagtggagaagtacagtttttgttttttgtttttttttttggattattatataactgttaattcaacacttagtgtttaaatactcatcattctttatagtgcacaggtcataaagatagttctctcatatgaataagaaatacaactaatgtgaatggcattaaagttagaagcttcaaattcttctctgggtttgatggttgcttttttagaagaaatttggtaaagtagatgatagaccagttaggtttcatgaacttcgtgcttcatattcttttcttttcacaacctagctagatacacagtaaataactggaagcatactagagtagaaagaacccttcttcctgaataagttgtcgttgatcacaggggtaggcgttaatcaaaatattaatgactaggccaggcacagtaattccagcactttgggaagccaaggcgggtggatcacctgaggtcaggagttcaagaccagcctggccaacatggtgaaaccttatctctactaaaaatatatataaaattagctgggcatggtggtgcatgcctgtagtcccagctactcgggaggctgaggcaggagaatcacttggacccgggaggtggaggttgcagtgagccaagatcatgccactgcactccagtctgggtaacagagtgagactccatctcaaaaaaaaaaaaaaaagtaatgactaaggagaagatagggacaccttgggctctgtccagtagcaggaacctcaggctaagaagggacacctgggttctcttcccatccctgcccttttagaccagtggcaagctactctctatctgggtgcctctatttccttatcttccaaaggaagatcattatcactgccacttaacagcatcagatttaaagtattagttcatataagagactctttgaatcacatttgggttcagatttcagacctgccacccagtagctgtgtgtcctttgggaaattgcccaacttctctgagccttatttacttcatctataaagaaggtctgaccacacctaccctgatgacctgttaagagagttaaatgcgataaagtctgttaagtttttagcccagtgattgctccctaataactgtggcagccatgatgctgttatgataaatttcacacaacaaaatctatcatgatgcgttgctgaagtgaacaggtgagcagttgcaacttgctcatctctttgttgtagagacatttctgctataataggagttgtcattaactgtcattgtcattacactgacagtgaattcggttatgtattgttaagaccttctgcttccttgacatgtatatagtagaataattatgacagtgaaggtgacacatttgtcagaattatccatgtgcatatgctgagggcccttggaattttaggtgaattttatagtattagtcaaactgaaaggcacagtgagtttggaaactataatagtctcatctataaaaggagtagggagattcccaaaggctgttgatatgagtagaactctgaaaaagtaaaacattaaaatacattttgatgtggttaccgtgtctaggtggtgataggtaaaaacagtctagtctaattctttgaaatttaggatagaagaaagcctgaagatggatatctacattcttgtatcttctttcagcaaatatttacagaaagagagagagagtgtgtgtgtgtgtgtgtgtgtgtgtgtgtatgcacacacatatgctacaggctaggcacctacagtagttaaaggagctttcagtcactggggaaagaaatgagaaaacaggcaattcctttacaccatgaccagctctctcctaatggtacccacaggttgccatggatgcagaccagcatggcatcttctgggatcagggaagctttcatcctcagacttgaatgaggagtagatgttaaccagaaaacaaagtggatgtatcagttagcatatactgtgtaacaagccatcccaacagttaagggccaagaccacaatcttatgattgtgggtcacctggactattttagtctgggccagcttggctgggactggttaatccagcatggtctcactcacatagctactagaaggctggtttgcctgagagatgggtgatcttcagctgggacagcttgtctctgcttcaggtggcctctcatcctccagtagactagtctgagcttcttcactttgcaggctaagggttcccaaaagcagcaagaaagggcaagccccagtgcatgagtgcttttcaagctctgcttcaagatgcttgctaatttccctttaaccaaagcaaattacttaatttgttcagttcaaaggatggggaaactccagctctagtcacatgaggacaacatgagcaaagctcaaaggtaagagagaacatggcatgttggaagacagcaagtagtttggagtggctggagtcaggcatatgtgaagtctcatgaagaaaaagccagatcataaagtgtcttttcagtaagttctgctgaggagtttagagtttatcttgaagacaggggagtggtcattgaaagagtttaagcaggatgttgacatgatcaatgagatgtgtagagacatggttaggtggtagaagcctaaaaacactcgttagcctagacaattcaggaagtttccaaagagatgacccagggatagcataggagaagatggaaggacttgactgagaggtggctcaaagctgacgtgtactttcagaacaatgtgaccagaaaagaggttggaggcccttcaaggtagagcagaaaagacagaggctcaggtcatcagcaatatccgtatgaatctggtgggagaactccaccagtgttcctcacctcgctcctttgtgggatcctgccagactccaatgtccttgggttctaaataaacacctaccaaggggctgagtcaaagagattccagtctctggaagtgtcttcttgtcattgtcatcacccagccaaagactcttttccttccaacatgtttttccctttgacctcaaaataaacaatgtgttctaaaggctctggggcactctcaaaatgcttctctgacctcggataggaccatgcttacccattaatttccagatctgaccttttcactacacctttaagcataactctttcaaaaggcaaaaatagaaatgactgtttcatttcaccaaattcaagtcgccaagagtgagaacgtgtggttttcaccggtacgtttggggaccagtttgttgtcactgaaactgcctgatatcgggtcggagtggctgggtatttttcagtccttggggttataactcaaatgttggaagtggtatcttttataggtaaaattgagggaggggagcatcaaaatgtgtgcgatgcagataataatttgccaagttttctaatttttttcattaaaaaagaacatacagaagagtctacaagtagggcaggcagccttcattcctatgctcttttccttgagggacaccttccctaaccaaataattgaaaataaatgggaattgtgggaacagaggaagacaagaaggaaaactaaaaacccaggacctaatcttccaggggcaggcaggccacttttgtagctcagattctgaccttttctccaatcaaagagttcgaacagactgactgattggagtgctctgtcagcattaaactcaatgcagggttctgctctggcacctttaggggtggtggtttagaccctctgcgtgccatgtcttatcaccagcactgctaactgaatgggatgcattttcaaagacaggagagggtttgaaaaaccccagggcatgctcggagcctgcaggcatttgtttgctgctgagaaccatggcaagcatttttgacatttttatcagagtcttagttaaacaattatgtggaggactgataaagaagtgtgtgataggagacttcataatttaaagtgcccaaatttggtgagctttatactcatgtgaaatggaaatgaaaacatggcatgttttggaattcctgattctgcttatttgctttaatagcagatcattgcataaacactgactcattgcattctatactgaaaggaagatatggtttgctgtgttcaatctggtctggcttccagaacacagtatagaacaagtgccagaagaagggatgagctcagctttataggtgactggagagatacccaattccatgttttgtgctgtacaaacacatgaccttacatgaagttttgcataaaatattgaaacaatacatttctctttataaatatgtatgtaatctgttctagagtgtatggagtagacagtaaaaaaaaatagaatcttcttatttttggaagtggggtgaagacgcaggtgtgcatatgctgccacctgcgtgttatttcactgagttttgtcaggttcttttcttactcatctgcactttgtatgttaccttaagcgctgtaaccattctaagctgccagggacatgggtatgcaatcaaagtcaacactgtgattaaaaccacctcctgttgtttacctttttagaaattttaataatacagtcaagtctgaaagagcagaacttttctcaaagctacacacttggttgcctcttcttgattaatgcatgggggtggtcactgtaacctaaggtctgacagatggtgcggagattgatgaagttaaggcctgttaggtattccgagtgtcttataaagaaaaataggctaccttaattcaaattgttgttgctcttccaaccttctcttatgtaaactccctgtatattacaatgacagactctctctctttctgtctcacacacacacacacacacacacgcatgcatgcacacatacgcacactcctgacatgctctactgaaagctgcccagctacagagaggtgcgaatctaatccagggcacatggctgctttgcatttcactggctgtctagtgtcactctatgatataggcataaggtcatgactgtgagctatcattgtcacttatcttaatattaaaacccctctgatccaatctgtctgccttatctattacatcattcacatatctagattcttcaaacttaactactcattgcagcaaactcaggaatgccgagctctaaggcatctccatttacttcgttcatctcaatctcaaattactaaccatagttcagtttcaggatgacactgaaaattcaaaattacttcctgtgattaacttacattgtgatggttgggaattatttcgcagaagacctgttcatcttctgatgaagcccttttcaagttttgaattgtgtgtgtgtgtgtgtgtgtgtgtgtgtgttttaattgccagaagtctttcagatagcagggagattattggaatgagaaagcaaagcttgtatgaaaacttgtggcaaaaggtcatctgtgctgtgggggaaatttcaaagtaggcgcagtttgtttccagtggttcctgcctgtcctttcagtggctggtcactctctgttccctttccagacgaatctttcccctcttccaaatgcctcacatcagtctaggtaccttggttggcctgtggagaaaaacagtcttgttgagacactcacattaagctgatagagaccttggctaggataattgcatttttcaaaggctaagggttggaaggatttaatttttctcttaattattttttatagagatgaagtctcactatgttgcccaggctggactcacactccctggcctcaagtgatcctcctgtcttgacctcccaaagtgctgaaattacaagcatggcctgaatttttttaatggtgatttcagctgatcccaggggagatcttttgggtgtcatttttcaaacagattaggaagcaagcagctgtctacctaatcagtctaaactacccattctgacttctgtccaataactttccatataaaatagctaacataataataatcagataactttgcatgtaagtttcaaagctatggtatagttcaccaacataattttccagttttttttattatagtaaagtacacataacataaaatttactgtcttagccatttttaagtgtatagttgtacattcatattgatgtgaagccatctccattgtcttgtcttcacacctctttttttctggcaaaactgaatctagacccataaaatactaatgctctaccctccaccctagcccccggcagccaccattctacttgctgtctattattttgactactgtaagtggctcatataagtggaatcatgtagtatttgtccttttgtgcctggctcatttcactgagcataatgtccttcaggtctgtctgtgctatagcatgtcagaatttccttcctttttagactgaataatattctgttgtatgtgtagaccacatttagcttatccttcatctatcagtgggcacttgggttgcttccacctttagtttattgttaataatgctgctatggatatgagtgtgcaaatatctctttgaaactctttgaaaccattcatcaactctctctttttcttttttttttttttgagacagagttttgctcttgttgcccaggctggagtgcagtggtgtgatctcggctcaaaacctctgcctcccaggttcaagcaattctgttgcctcagcctcccaagtagctgggattacaggtgcccgccaccacaccaggctaattttgtatttttagtagggtcagggttttgccatgttggtcaggctggtctcaaattcctgacctcaggtgatctgcctgcctcggcctcccaaagcactgggattacaggcatgagccaccgcacccagtcttcaccaactctctttcacgtctttattagatacaagtgtttgaagaagccttgcatctacccactttgaaccttttttcatgatagaactgtaggtagactttctgcctagtagtgttatttgaagcatcctttctgctgacctctttcctgaggcctgaaatgctactaatagtagttcagtcctcaagtatcaagcaaagccatcagctagttttctattaaaatgcaaatgatcctggggcagaggccacagataagatattagcaccttggtgtgaatttgtttaattagatcctatcttagaagctttctttaaccccttgcctagttcttcactaattgctccctgataaggtcttgcattattactgcaagtatcacactgtattaaacttatttatatttttgcttctcctgatagaatagaagcttcttaagggcaagactcttgtataattgctgttggtttttcaggccctaatagaatgtcacagacaactttcaataagctactcactcattctttcatgcattcattcattcatttcactcatttattcatcaagcatttattgggtgcccacggtgtaagtgcattttaaaactctgcctttctagaaggtttggacagccaagggccagctctgttgcacagttttggcagattttagaaaccttaaaatctaacttcctgtatttttaggtgcagggacttggtccagatgagtggatcaacctctgaaatagttttctatcacagtcctaccttttttttttttctgcttctattcagaagaagcatcgatctaagtaagtttgtgttctgttcaaaagtaaggtgatgtttcaatgtatattctcaagcatctgaaaacttctctagttgctctaaatctcaatatttccaatatcagccatgtacagtttttaaatgcttgcattctcttaggacattgttaacaatctgcttagaaaggggagtgacttttgcctcttttggctaatttgctttgcattgatttgtaactgtgtacttcagtatataccagcaactcctagcccagggatagcatatactcgcttactggttccagtgactgttcattcatcccacagtggcttccctggaaacaagttactctgataacaatttgatggtacttccctttataaggtaataaccagtccgggccaggcatggtggctcacgcctgtaatcccagcactttaggaggccgaggcgggcagatcacgatgtcaggaaatcaagaccatcctgactaacacagtgaaaccccgtctctactaaaaatacaaaaaccaaattagccacgcgtggtggcatgcgcctgtagtcccagctactcaggaggctgaggcgggagaatggcgtgaacctgggaagtggagcttgcagtgagccaagatcgtgccactgcactccagcctgggcgacagagtgagactccgtctcaaaataaaataaaataaaaataaaaataataataaaaaccagtcctaaaccaaattcttactttagtctctagcctcagagtttattagttcttagtaatgttactatgaaggcaaataggagacaaattattattctggtttttattgttactgccactgcaattcctatgattattgctataattccctatttaataggtaaacaagttacaacatattcgatggtcactagatagaaatagaaatggaatgtctttaccaagagaatatccgtgttttacagagaacaggaaacaagtactaaatggaatcttcagacaatcttttggtcttcttgtaggcagtggttcagcttttttacctactaaaattttggacagggttgttaacaggcaatacagtttaaaatgaactgttttaagttttcctttctgactttttcatactcctacattaatgcaataggattgaaggctacaacaatgataattgcaatatgctgaaataatgaactacagtaaatagctatagtgaatgtatgcccatagaaaagaatggaaaacaaatggcttttgattaaaggtacttattgtaacagatttcaaggtgaaattgttagttcagaaaagatggtagatagagtctttaaaaatactgtcactgggatgcgtgttcttctataatgctccctccatcccccacccgaagaaacacacactcctccctcctctgcatgtaaagcagtagttttgacaaataaaaccaaacagtaaaacctgacactggtgattggaccgtgcgtccctctggtttgtggatgaggagcatatctccgtgatagaataaccacgcttcatgctaactcccggccacatcgctgcatcctcttcatacataatttgcatcatggggtgtttctgcatatgttgtgcattttgatgttatttttagctacaatttttaaaacaataacatttttttaaatagactaatcaagaaagcgcctccagagtcaagaaaacaagtgctggggatgtgtgggtgggggtctgtctccccgcccagggcatttccctttgctgctgttgttactactccttccattactttttgtgactttagctttttgaaatttccattcctttgttttcccttgtgcatcaggatgtggctgttgaagtcatttatgttatgcgaggctgcaccacagtcatttaatgcaaacactggcttttgtgtaaggcactgactattctaccctcagcgaggaagacgttattggaaacttgagttatgagatggaaagaacattaatcctttcattgaaaacattagtcttttacatggattctctgtaatagcttgaagagaaattaaggaaatacaaactagtaatattaaaaatctgccatgtcattattatctacctgcccatagatgttcaccaccgttagcatttgagtgtgttttcttccagaagattttctatggatatatatatatacaaataaatacatgtagctttacagaaatagaatcgtgcttgatctacttttccgaaatttcttctctcacattgcaaaagttgtgaatgtctttccatctgaattattacagattttcaaaatatttttctggctactgacttttccagtatatgaatgtaagagtgaaagttcttcgatttcaccagttggatatgcccccttttctcttttctgccaatatcaattgtactgccctcttgcgctatcctaaatatgatcagatgagaattctgaaagagaagaaatctaggaaccctacttgatagagagttatcctcttgggttccctcctgacatttaggcctttttttttttttttttttttttttttttttttgagatggggtctgactctgtcacccagactggagtgcagtggcgcaatctcggctcactgcaatctctgcccccgcctgggtacaagcgattctcctgcctcagcctccctagtagctgggattacaggcacctgccactgcgcccagctaatttttgtatttttagtagagatggggtttcactgtgttagccaggatgttctcgatctcctgaccttgtggtccacccgccttggcctcccaaagtgctgggattacaggcatgagccaccgcgcctggccacatttagtacttttaagaagttattcctcttccatctcagcttcctggacacagttcgctatgacttttcttggaaattatgcattcccttagaatccttgtattttctgtttactttccctcaaagcaaggactcatgacctcacctgtagtgggcctccccatctctcatgtctttatgtggcccggacttagcagagacacctcttggtacatcattttgattgcatcatgagctttcccagagtctggagtgactctgtctttcagatttcattttaacctcctaatcacaggctatctttgatgcacctatctttacctccagttcttctgctaaagaactggaggcttgtggctcttgtcttccggtcaaacatgatgctctgctgactactcttccccatgcattcatcccaccccagaccctgcccttgccctcatccccatctgaatcattgcatcctcctagttcttggccaaaaaactggctctcctctagcccttcaaaccttgcctgggagtcatctttatggcaccttccctgattttttgttttgttttgttttgtttttggaaatggaatttcactcttgtcacccaggctggagtgcagtggcacgatcttggctcacggcaacctccgtctcctgggttcaagcaattctcctgcctcagcctcccaagtagctgggactacagacacctgccaccatgcccagctaatttttctatttttagtagagacggggtttcaccatgttggccaggctggtctcctgccctttggtgatcaacctgccttggcctcccaaagtgctgggattacaggcatcagctaccacacccagccgttgcaccttgcctgattaattccacttggctctagctagtatctggaaggacacctgggaggaacacttcaaacagctgtcagtgcagtgttgttgttgtttttgttttttaattaataggcttttttatagaacagttttaggtttacagaaaaattgatttgaaagtacaaagagttcctatattcctagcctccccgacccctgacaaacagtgtccctactgctaacatcttgcatcttacatttgttgaaattgaactaatatggatacattattattaactaaagtctatagttcatgttagagttcattcttcctgttgtacattctgtgtttgacaaatagatgacatgtgtcctaacaactctttgtgctctgcttatttgttcctcccaatccccaaaacccctgatttttttttttttttttactatccctgtagctttgccttttccaaaatgtcataaagttggaatcatacagtatgtacccttttcacattggcttctttcatgtggcaatatgcgtgtaagtttcctctatgtctttttgtgtctggagttggttcctaccggtgggtttatggtctcgctgacttcaagaatggagctgcggaccttcatggtgagtgttacagctcttaaagatggcatggacccaaagagtgagcagtagcaaggtttattgtgaagagcaaaaggacaaagcttccacagcgtggaaggggacccaagtgggttgctgctgctggctgtggtggccagcttttattcccttatttgtccctgcccatgttccatttctgttctgtcagagtgccctttttttcaatcctccctgcgattggctacctttagaatcctgctgattgatgcattttacagagcactaattggtgcgttttacagagcacttattggtgcattttacaaagtgctgattggtgcattttacgaacctcttgtaagacaggaaagttcctgattggtgcattttacatcctcttgtaagacaggaaagttcctcaagtccctacttgacccaggaagtccagctggcctcacctctcaatcccccctctaaacaggacaccccagctgctgttgggaactgggtgatgactgctctagctacttcctgctggataggggtgaagaaggggccctgcagttgtagtgccctccagaggggaacactctaggccaaagggctggtgggtcagtccaggggtccttggtagaagttgtgagttgagctcatttggggttccatttgtaagaccatctgtagcttgatggtatcgatcctggaggaaacaaatttgacaaagaggttaaaaacacagggcccgaaggtgagtaatagcaagatggctgtcatgggacgtagaaaggggagaaaccatgttgcccaactctagaggttggtataagagtttgaaaggcattgtctgatttcagaagccttttcctgtaactgctgggcagcatcttgtactatccctgagtggttagtgtaaaaacaacagtcttctcctaagaaggtgcagagtcttcctttctcagcagtgaggaggtctaggccttggcggttttggatattcactactgccaaagagtctatttgggattgcagagtaaggatagattttgttatttcttgcaaactgtcttgagaaatcctttgagagtgtgtggtagtaggataatgaagtagataaactggctattctggttcctgtagcagtggctattcttaaccgtataagtaggggtattagttgtatggccctgtactgacggacctgagctttgaggggcactgatagggtctgatttcctgcggtaatgttaatgttgggacttaggaagactaaggtacaggtgcctgtccagttagtggggaggcagatgtaagttgaagttccacataagaatatgccttggctgggtagacagaactggttgtgtatgttaaaaaggtgtgtgagtttgttgttttcattttcccatactcctagagtacttgccaaggtagtctggtgagtggctggaaaggggtgttgggagcaaactgagtgactccctgtgctctattttcccattggagaaaaaactgttttgtatctactaggaaccattcaagagagtgattgaaagagaggatgagaaggtattccttagtggtgggggtgctgctgcagggggtccaggggtgaatagtcatacagggagtatgtttgccattacaaaacctggactgtttgttaagcagggaggaggtgatgatttttgggggccctgagaagcggacaagccatctgaatagagcggtttgggtgccttggaagttactatgatcatttggggcttgaagttggagagtgtaattacactgatgggatagtaggtgccccaggggcaggcctgataacaggttgcgttggatgcataacggggcttggaaagttaagatggtattcacggttacagggcttttcattgctcatgtaataggtgaggttggaaatgtaagagcgtaaaagctggattgcatgtaaaaaaggttgatgtgattaggatttttgtcccggcaggagctacagtatatagtcctgctgcaaagagaatggttagtatactgcttaataatgtgatgaaactgtaaaaggattccattaaaggggcaaggagtggtgttaaagattatgtaggttttcacttatcctttttaaataggaaagagtttttccttaggatcagctataggggcctttttagtctgggatgtttccttctgaaataggagacacaaatcttccaatggttcacaggtttatcgaggctggtctggctgatcttgggactcctgagctgatggtcctacaggttcttcagggggtgtccaaagtttaactcgcatgtagtgaatccaagattccactcctgccaccttaactgcagtgggggtagagaggattactgagtatggtccttcccacaaggaatccatagatgaggaggaagaggggagggacttgaccaacagtaaatctcctggttggaacaactctgttcccttgtctctgtgacatcctttgggtaggtttttaacgttttgttggtattttgccaaagaagttatatctttgaccaacttggccgtttcctgatcaagtaggaggtcatttgtgagaaaaggtcatccatacagcacttcatatggactgagccccattttgtgaggagaattttggattctcaacaaggccatgggcaagagagtaggccatgggagatgagtttcttgtgttcgtttccttaagtgcctcttgagtgtttcgtttgccttctcagccttccctgaggattgtggcctccaggcacagtgaaagtgatattgtatccctagtgccctggaaattccctgagttaccgtggctttaagagccggaccattgtcgttttgtaagctttggggaagcccaaatctgggaattatttcatgagttagtactttaaccacttcctgagccttctccgtcttgcaggggaaggcttctatccaatttggttggtcaacacagaccaacaagtattgaaatccccttgacttaggcatatgggtgaagtctaactgccagtcctctccaggatagtgacctattctttgttccccaaaaggggccttacgatggaccaagagatttttcctttggcacacctcacaggctttgactacttgttggatggtctggaggagatatggccccataaatagggatttggccatttgatgagtgttctcaaacccatgtgaaaagtttggcagggggtcttaagtattttccactggctggcttcggatatgagtacctttccctcttctgccgttaaccaccccaaggggagaaaactatgcccccgtgaaagtccccattctgtttcgatcagggagtactggggcttaatctcttggagggggttgttccataccatgggtccttccataggtatttctaatgggaggttctgcctggcagcaattttggcctcagcatctgcccagtggtttccttctgccttttctccttcacctttttgatggcttcagcagtgtaacactgccacctccttgggtttttgcactgtgtgcaataactccataatttccttgtggtatttaatgggggttcccccagaggttaggaactccctttctttccatattgcagcatgggcatgtaggattagataagcatacttgctatctgtatacacatttattcttttttcctttcccggttctaaggcttgggtaagttctgctaactaggcgctggtccgtggggggaagagacttactttcaagtactgttacatcactaactatggcataacctgcccttcatatcccattctccacaaatgaacttccatcggtatataggttaaggtcaggattagctaagggtacttctaagagatcctgttgggaagcataagtctgggctacaatttgttggcagtcatactcgattggttctccatcctctgggagaaaagtagcagggttgagggctgcacacgtgtgtatttcaagcaccagtccctgaatgagtagcgcctggtacctgagtaggtggttttctgatagccataaatttcctttggcacctggtatgccatttacatcatgagtagtctagatggtgagatcctttccttgtattattttgatagcctctgacactaagatagccactgccacaactacccgtaaacagtgaggccagccttttgctactacatcaatttccttacttaggttgtggggttccttccttactggttgtggggttgtcctacaagtctgagtaaggactccaagagctattcccgctctctctgtgaggtataaagagaagttttgtcctggggaaggcttaagtcttgagtttgtactagggcctgctttaaggttttgaaggctgtttctgcctctggttcccattctactagatgaatatttgccctctcggtctccttgattagagtatagagtggcctggccatctcgctgtatccggggatccatagtcggtaaaagccagtgatcccaaggaacccccacaactgttttaatgtgttagggcaaggacaagccagtataggctgtatttgttctttgctgagggccctggttcctctggctaggattaggcttagatatttgacttgttgtaggcagagctgggccttcgatttagatgccttgtacccttgattagctagaaagttcaagagatctagagtagcctgctggcatgaagcttccgaactggtagccaaaagtaaatcatccacatactgaaggaccagcatgcctggacttgagaagtggcctagatcttgggacagtgcctgaccaaacagatgagggctatccctaaacccttgaggcaagaccgtccatgtaagttgggttttgtggtctgtgggatcctcaaaggcaaagagaaactgggagtccaagtgcagaggaacgcagaaggcagcatccttgaggtccagaacagtgaaaccattctgcttcctttggtatttgagagagcagggtataggggttgggtacaaccggatatagaggaattacttcctcactgatgagtctaggatcttgcactagtctccactgacgattcagtttttgtactcctagaattggggtgttgcaggggctactgcattttcttactaagcctcgaacttttaaatgtataacaatatcctgtaatcctttatgagcttcaggccttaagagatattgcctttgataaggaaaagtggtggggtcttatagcctgatttggactgggtgggcattttttgcctttccgaattgtccttccaatgcccagacttcagggttgattccctcctcaagtaggggacaacaaatgggtaacttgttccccatattcatatagttaatggctccagctttggctaatatgtccctccctaataagggtgtggggctttcaggcataagaaaagcatgtgaaaagagcaaagtctcccaattacaactgaggaggtgggagaaatacctggttacaggctgtcccaggattccttggatggtaatggatcttgaggacagctgtctggggcaggagattaacactgagaaggccatgccagtgtccaggaggaagtcaatttcctggccctcaatggctaaacttgcccagggctcagtgagggtgatgacatgagctggtgcttgcaccaggcaccctcagtcctgttgttggatcatctggttgggggcttctggcccggagaacctttgtcctctggggcagtaccccgtctagtgattgccttggcatagtggacatgggtgagggagtagcttgtttcttgttggacagtcttttttaaggtgtccttgcaaaccacactgataacaagccctactgggtgattggcctgctccattttctgtcctctctgaaccaccaaggtttgtttgtctgagggccatgactgaggctgcggcctttctcttatctcgcttttccttttctgcctgttcctcttggttcctattagagaacaccgcggttgccaggtttaataatgcctccagattttgttcagggccaagggctcgcttttggagctttctcctgatatctcagctgattgggtaataaacatcttttaggatcaattgaccctcgagggagttgggtgacaggggagtatattttcttaaggcctcccatagctgcttgaggaaggcagtaggattttcttcctttccctgagttatggtggacatcattgaataattcatgggctttttcctaattctccttagtccttctggaatacaggtcaacagatgtttgcgactccagttcccatgatctgagtctaggtcccagtggggatccataatggggatggcttgctgcccattagggaatttgtccctttcttcggctgtcattttgtcatttacttgactaagataccaggtatctccaaattctcgggctgcagctaaagctgcattcttttcattaaaggccagggtttgatctaacaatagcatgacatctctccaagtgaggtcgaaggtttgccctggaccctgtaggacatctatatacctaccaggatcatctgaaaactttcccaggtctaccttgatctgctttaattcagagagagagaaggtcccatgttgggccaaattcccctccccctacagcttaaaggagacataactgatagcctgaggggtttggtggtcctttggaaatttctttgcttgtttccttctggatggaggagattagaggaggctcatcattaataggaaggggagctgtagggaggctaggatatggaggtaatctgagaggtcctcctgtggaatgtaaatcgccagctttgcatagttgtggattatccttcagtaaaaagaaagcttggacataaggtatttcactccatttcccttccctcttacagaaaaggtcaacctgcagaatagtgttgtaatttatacttccctcaggtgaccatttttccctattagagagataatattaaggccagaccgtagtgcagaaaaaataagccgcttctttttcagggtttgcgggacaaattggtcccaatggcttaggatgcgtttcaagggtgagcttgttgatgcctgggtgtttcccatctgaaagaaaaaaccgcctgcagttttttttttttttctcttctccctgcccaagaacccacaacagtccctggatcctgctgttcggaatagctgtgctcaccaaagcagcagcggaaacactagttttcctcctagaccacaaaaaggactgaggaaggtcagatttagtggcccttaccaatggattctcaaaaacctgcacccttgcctttcgtctttagaccacaaagaggactgagaaaagtcagatttagtggcccttaccaatgcattcttgaaaacctgttagagtcctaagtgttttctcctgttgttattaggaccttacccttgtactataaagataatatgcctcaaaatggagtggagggccataccctgagggaaggaagggatctccagggttggaagagtgatgcgttttgtcctcacttatcatatgaataggaaggatataatttctgagtctcctcctatcctagctttgggaatagcctttgttaggtctgctagtctgaggagggatcctaaaattccagatagtcccccacaacagggctttggacaaaaattatgtctttctgattggtgagcctgggtgcctaaagaagggagcagagtcctgaaatttatattagaaatcatccttataggagaaactggaagagcaccagggacagggagtggtttttagaagcaagactaaccttggagaagagaggcgggagaaagtttgtctgacaggtgttaggacccaggaggcaagggtcaggatagataggatagatgggtgagtcttgtttgggctatgtaactttgagagttctgctcatggctgcagggccaaccaactttttgttgagaccccggagctgaatggctttcctctctgtcgaccctaggcttagcccggaagtgcaggaaaagcagaagctggttccaggcaaaccaatgctcctgactccaaacagtcgggggttgttagtgagccctttcccagagagcctgacatccatgtccttagtcctgtggccatgctagttgcttttaactggctgacaggtgcctagttttagcccctgaattctaaggaaaaataggacagaatagcaagcaaaaggggtctgatggtactcaccacgttgcaatatctgggaggatcccccaagatgtgtccagagttggttccagccggtggattcatggtctcgctgacttcaagaatggaggcacggaccttcacggtgagtgttacagctcttaaagatggcacagacccaaagagtgagcagtagcaaggttaactgtgaagagcgacaggacaaagcttccccagcgtggaaggggacccaaatgggttgccactgctggctggggtggcccgcttttattcccttatttgtcccctcccatattctgtttctgtcctatcagagtgccatttttttcaatcctccctgcgattggctacttttatactcctgctgattggtgcattttacagagcgttgattggtgcattttacagagcgttgattggtgcattttaccaagtgctgattggtgcgctttacaaacctcttataagacaggaaagttcctgattggtgtgttttacaatccttttgtaggacgggaaatttccccaagtccccactcaacccaggaagtccagctggcttcacctctcatttttatggcctgaaagcttatttgtttttagtgctgaataatattctattgtatggatgtaccacagttcatgtacccattcacgattatgaatgaagctgctataaacatttgagtgcaggtttttgtgtggacttaagtttttagtttatttgtgtagataccaaggagcatgcttgccacattgcatgttaagagtatgtttagctttgtaggaaactgccaaactgttttcccaagtagcttactatttgcattcccacccgcaatgacttgagagttcctatggctctgcatccttgccagcatctgctgttggcagtgtgttggattttggccattttcataggtggtatcttgtgtttgttttaattcacagttccctagtgattcataatgtggagcatctttttatgtgcttacttgccatctctatgtctaatttggtaaggtgtctggtcaggtcttttgtccattttaaaaactgggttgtttgttttctaatagtgaagttttctacagctctgttgtgtggttacttcttttttacatcaagatgagtcttactacctggttagattgggtgttacttgtagagatgctctccttccttccttctgtctcctagagcatttgccacacttcagatcctcagtaaatacagtcttcccaacccaatgcctgccacatgtttcctgacctcaagttcatatatcctctcgcattccctttactcctttccatacataacagtggtggtcactgctgagtccccctgaaggtgagcttatctacctctttttatatccaagctgcttaattgctataatatccaagctcccagatcacagcttttagttctttttctgaatctgaactggtgataagattaagaaatctcttggttcttttgcattaatttcttggttttgctgtctactataataatttaatagcatattttaaaaatgtttctgatggctgtttagttttgtctgctgactacaaaggttgttttgacctcatcttgctgacctgccaaaagcactaagtctatggcagtaagagagtggaaagtctgttccagtctctgtataatacaattacatgtactgtgtagcaataataattaacatgggaggaaatcagtacaaattagggatattcctgaatcattggctacactgtagataatgcagcttctcaagccagtttgttacaaatgggctacaggtatatccaagtatggattgcctcagccctcaggcagccttgacccctgaggctacagagcccctagcagggggggttaaccatttatgcaattatgctgctgcccagatgttattttctatacaagtagttcctttagagagagcaagtgcaagccccaagcactggcacaatatggagtggggaaaacaatgattttgaattcagaagaattcagttcctggtcagctctctgatggcagggattttgtctgctcagctcactgctctatccctgtacctaaatcagtacttggcacactgtaagcactcagtaaatatttatcgatctaattcttctgtttttttttttttttttttttttttttttgagacagagtctcgctcttattgcccaggctggagtccagccatctcagctcactgcaacctccacttcctgggttcaagcgattgtctgagtagctggaattacaggcacgtgccaccatgcctggctaaccttttttgtagttttagtagagacggggttttgccatgttggccaggctggtcttgaactcctgacctcaagtgatccgcctgactcagcctcccaaagtgctgggattacaagtgtgagccatctcgcccagcttcgatttaattattgaagcatacttgaattcaagcatgttacttaatcctctctgcacctcattttccagaattagaaatatagtttattcctatacagcagatataaatttatgtgtagacagttgggctgttgttgtaacctaaaagtgacatatgcacaacctgtagcacaatgccaggtacagagtaggggatccagtgggttctttcttaccctctttcatttgaagtttttaaagtatcaggtgaagatgatgatgatgatgataatgataatgaaagtgatattttttgcatacatttcagtaaagttcattaccttacactgatgtaatcctcagagcaattcttagacaattatggttttttaccccctctttattttattttatttttgagacggagtctcactctgtcgcccaggctggagtgcagtggcgcaatcttggctcacttcaacctctgcctcccgggttcaagcgattctcctgcctcagcctcctgagtagctgggactacaggcacctgccactacgcccagctaatttttttgtatttttagtagagacggggtttcaccgtgttagccaggatggtctcgatctcctgaccttgtgatccacccgcctcggcatcccaaagtgctgagagtgtaccccctctatcaatgatgagactgatgctgagaaaagtaacatgattatgtaagattacacaagtgaaacacaccaaaaacagaccttgaacccagtttttttattttctcacgtcaacttttcctccacaccaaatctaataaaattttataaagaattactttaaagactaaatcactttcgactagcatgttgtctggatgcaaatgatggtgataaagtaagtttaataatgcttaaaggaggtaaacaattcctaaaccttttaaaaaatctagtcagctaaagtaggtttacgctaaactttcatcagaatccttaaattctaaatcttgaacttttaaatcagtaatagagttttaatgtgaattaattgtctgtaacattttcaaaagataaaagtgataaatgcacaaacctacctgctattataaaacttgttgtggtggaatgagacaagaatagatgtactataagaacaagagggatatgaagaggcaggtttatgtcgatacttaaaatacatttgacgccatccttttgacaggaaggaatgtctttaaaatctcacaccagtgagagtgggaaaaaaatcagccatatttctgctttttttaccctttcattggaatgctcagtcacttggtctactctggttttgattcacaaatgagttttcagaaatgactgtcccactggctttttaaaagaaaaattcagtttttcctctgaagactgacacacaatcactcagagatggataatcctaaatgttttccttttccagctgaatttaatcttatgctatcaacaaaatctggaaaggtttactttctcatatcattcattactagttatgaattctgaaccgtatttgtaacctgttcatcacatattcatccctgcatgtattcattccctaaatatttattgaatgccagcaatacaccctgaactcggagaaaacataatctttaccctcaaaaagctcacagtctggtgctcagttgaccaaacatcgtgtttcttttctaccgagttgcaggtcttctctctgtggatgtcattgaatgtcgtttgcagaattctacttgctatagtaggcatctgtcttgttcatgagccacattacaacctcgtgtgttataggcaaaaaggcaatctaagaacggcctgacattcggacgcctaaggggacttccctagtgagggcacaagacagacaaatcccagaatattttctatatgcagaggaaacttctctggcatcttagaaagacaaagacagcaagactgaagatagaaacaggaggatagcaaccttttaaacaacttgtttttgtgaaatttgtttctgtttgctttgagaatgggggaaaagagaactctaattacaaactccacgtttctttcaactatactattttctttctttttttttttttgagacggagttttgctcttgttgcccacgctggagagcaatggcacgatcttggctcactgcaacctccgcctcctgggttcaagtggttctcctgcctcagccttctgagtagctgggattacaggcatgtgccaccacgcccggctaattttacatttttagcagagatgaggttcctccatgttggtcgggctggtctccaactcccgacctcaggtgatctgccggccttggcctcccaaagtgctgggattacaggcatgaggcactgcacctggcctttttttttgagacggagtctcgctctgtcgcccaggctggagtgcagtggtgtgatcttggctcactgcaaactctggccctcgggttcaagtgattcttctgcctcagcctcctgagtagctaactaatttttgtattttcagtagagactaatttttgtatttttagtagagacagtgtttcactgtgttggccaggcttgtctcgaattcctgacctttggtgatccacccacctgggcatcccaaagttctgggattacaggcgtgagcaactgtgcccaaccagttatactattttcaatcctatataatttgtacagctgaagtggcaactgcttgcttttaaatgggaagagaagatgtccccatttaatgcttagaaaagattgacttcggtttaagccaaaggagcatcctggagaaccgaatgattcatgattagtaattctcaaggaatggccatgtggctcttcatagcgttggcccttgggggggtctactttaatctttgttctaacccccgccgcccctgttgtccttttaatcctcatggatcaggtgcgttcacagataaccactaaagtgaggctgaaagaggttaggatggggatggacacctgtatttctgagaggacctctccatgatgtttaggaatggggttgacatccttcacctagaaggtcctttcccaagattggacattgattttggtcgctggagcagcctcatcagcatttctacaaggtccccagaagggaggaagctattcattgaatacttcatatggaggtggttttatgttatttttatgagatattaaggaatcttcagaaactcatagcatctccatgttgcagataaaagaggctcgatggaatgggagtgagtcagttcagagttactctgctaataataaacgtgctggctttgaacctacgtctctctgagtaataagcccctgccctctcttccaaagcacattccttcccttgaatcagagagcactagatgggaagggtgatgggagctacattatcactggcagatggaactattcagctcctgtccttccattctctaagaaccatgcatgtgtgtaaacacatgttgcatcagtgattgttccaggctttgcctacttgctcccaaacatgtgaaaaagaagaggaagattaagtaagtcattcatatattacttatatctgagtgtttgcaatcatataggggagcatagttcccacaaggaccggtttttgtaaacttttgcttctctttcctgtatttaggcattatatagctatggcagtgatcacccacaggtacaaattctgtatcattcattgcctttacttggaggtttacaaatatttttagtctctacttctttttcaaacacaatcttgaaacctcaacatatgaaacgaataaaggaaaattttgttagcataatgtatgttagatttcagcgtgtaatgctgacttataaaatcaagaagaaagaacaatgaagctttgtgatgaacacagaaatttgaaagcagtgttagagatgacagctgcaatcttctttaacttcagtttccaatttattgccttttgttgttaggtatattttttatgttgttgtgcagtattgagaaaaccctgattccctaaaataaggagttgcaaataataatgagttgttttatttttttaaacagttaccttgcaagctcaggatatgttttcctttaaacttatccacttaaaacgtgttcacttaaaacaaaaggaagaaaagaaatggcttctttcaaagctgatatcgctaacaatgtgaaaccatttacattttttaattggtaagcctgcgatttggaggaccaatgatagcttcctctagcctaaatcttccattagagggagaaaacactttttaaattataacattaatgagatgctcattgatgtacttaaaaaacaagaagaagaagaaactcataagcctgagggagggctcatctctttcaattttagaaggaagaaattgtctttgctttgcatggtgggtccaatcttgaactttagatttaatctctgacattggctaccataagcatggtatgtctgacagtttaatgccaataatttaattttattacaccattttatactacatgtttatttattacataccaaaattcactgaggacaagaactcagggtgttttgtctggtcttggccgttaattgtccatgatacactcatgctgtactagggtgctcacttgtgaaatttcatgcaagtggacgtagggagaacttaagtttatatgtttaaaaaaagcaatggtagcgctacaacctttctacctgagaaacaggatgtcactgagatgacgggatacctttattttgagatctacacaagcctggcagtatggtctggcccattagtagttgtggcaatgccaggatggaagttacatttgattaacggggtaactaagaatctaacttcagaagaactcttgctatcccctttaaccctcacaacaacagcaacaaataaatcagttggcaaatcttgaagatgtagagccttactaacaaaatggagttaagaaaacccttcatgcaagcaaaaaagcttgatctctgctagggacatcaaaggtgcagtggtgtggacgtccagacacagatctgatgtaggctttcctcttgggccttagcctagctcagtggttttcaaattccactgtatgtgagcattgttgcacagggtggtataaacaaaaactgtatatagtgtccttgttgggcaatgtaagacacttttatttattgagccaatacttacagagtgccttctctgtgctaagactcataggtgctgcagtttgagcaaggatgaagagaagtcagttaatgggtgatacaaaaatacagttaaatagaaggagtaagttttaggattcaatagtacatatcacttgtacccccaaaatatgtacacctgtgatatatcagtaatgaataaataaggagcatcattctagcgcaggaaacaaaccaacaaggactttgtggtgtaacatcagctgtgatgaatgaagagaagaatcagaggggcgagggaagagggggcctgctcttttagacaaggcgaccagggagggacacatcacagcagagacctgaatgaagagaactcatttgccagaggagcattctaggtaggaccaggattgtgcctggatgtggaagggagtgtggaggccactatgctggagcagaacatagggaggagatgggcaggaaaaaagaggaggagggtttcacatagttggggtcagatcatgtagggccttctaagtcttgacatggaccaggactgtggtttttaccataaatgtaataggaagcattgaaaggtttgagtggaatggtattaggatctgatttgcaccttacaatttcaaggatacttttgaacccacacactctgcattgggtgggaactttagaccctagcccctgaattaagtgttattctactatatggcacatggagagcttttctgaaactacagttacttaataatgagaaattcaatttaaaaataaaacgcagatgctctgaagcccgttggtagaatctttggggcttttaaataagtttaaaagctacaagcttcaataaagattaaattagaaatcctatataaagcttctaagagtgtaactagcattttagtaatgcttactaagtgctggttctgtccctttctgctctcctattttttttatcagcgcctttgctattaggccaggcgcagtagctcacacctgtaatcccagcactttgggaggccgaggtgggaggatcacttgacgccagaagttcaaaaccagcctgggcaacatagtgcgattctgccttgataaaaaataaaaataggcagggtgtggtggctaacacttctaatcctagcactttgggaggctgaggcaggtggatcacttgaggccaggagtttgagacaaacctggccaacatggtgaaaccccatccctactaaaaatacaaaaattagctgggtgggtggtgggcacctgtaataccagctactcaggaggctgaggcaggagaatagtttgaacccaagaggccaaggttgcagtatgctgagatcatgccactgcactctaacgtgggtgacagaacgagaccctgtctcaaaaaaattaattaattaaaaatttttaaaaaatacaattaaaaaatacctttgctattgatgtctgtttctgattgtctgtcatcccggtacactatatttactttccagggaaactgagtcattcaacaagcctctggcttctagtgataagcactatcattagaaagaattatgttctgtgtgttaaggataagggacacattctttttggaaaatagtgcttgtgagtctaggaatagttgtataatctgggaatatatgctaatgctatagctgagttcaaatcacttttttaaaaatgcaaacttatcttctctgtcaccaagcatgtcttccatacaaaaggcacatttctgtagcttcatccatgttactctaggctatttcctctagtttattaaccacacgctcagcaaactgtagagagtatggtctgatccctttctcccataataaaaattttaagactatgtacttgttgatagatgacaccaacaggatatattttacagaaatgaaacaacaacatgtgaagaatattttaggtcactgtaaagttcctttaatagaaaaaaaactttagatttaactgttaaaccctttgaaaaagaaataatttatttcatgcaaatgactaaagcaaaatggagtgtgcagaagacctacctgcatactgtatgtaaaatacagttttctgggcttcactcccaggaattctgattcacaaatctggggttgggcagctttcaattttgagaagtgccccgagtaagctgatgtcaggaatgtgaattttaacaggcaccccaaaggaaggctgtgggaaaccacatttgagaaacactgccaaattaccaaaggaactttaactttgtgttatagaaatatcaaacacatttaacagacacttctcaaaagaagacatttatgcagccaaaagacacgtgaaaaaatgctcatcatcactggccatcagagaaatgcaaatcaaaaccacaatgagataccatctcacaccagttagaatggcaatcattaaaaagtcaggaaacaacaggtgctggagaggatgtggagaaataggaacacttttacactgttggtgggactgtaaactagttcaaccattgtggaagtcagtgtggcgattcctcagggatctagaactagaaataccatttgacccagccatcccattactgggtatatacccaaaggactataaatcatgctgcaataaagacacatgcacatgtatgtttatggcggcactattcacaatagcaaagacttggaaccaacccaaatgtccaacaatgatagactggattaagaaaatgtggcacatatacaccatggaatactatgcagccataaaaaatgatgagttcacgtcctttgtagggacatggatgaaattggaaatcatcattctcagtaaactatcacaaggacaaaaaaccaaacaccgcatgttctcactcatagatgggaattgaacaatgagaacacatggacacaggaaggggaacatcacactctggggactgttgtggggtggggggaggggggagggatagcattaggagatacacctaatgctagatgacgaggtaatgggtgcagcacaccagcatggcacatgtatacatatgtaactaacctgcacattgtgcacatgtaccctaaaacttaaagtataataataatataaaaacttaaaaaaaaaagaaatatcaaacacatttgaaagcagagaggtggtaaatgaacgcttttgccccaccaccccattcagcagcagagccaacatcgttttctctactccacctctgcacctggattattttgaagcaaattccaaataacagtattccctggaccttgcatcttcataacagattgctgttgactcaaaatatctataaaatattttactatttctataaatgattaggattcttcttctcatacacaactacaacatcatcatcacaccaaaaaatgcattaacagtcatttctcaatatcatcaaatatcccgtcagtattcatattttcctaattgacttattaataagttttattttatgttgtaggattttttaatagtttatttgaaccaagatccaaataaaggtcatttcggtctcctaaacctcttttacactactcggtatcacctatgtcttttttttattttgcagttttttctgttgagaaaccagaccatttgtctggtagaatttcccacccgtctgggtttggatgattgcctccatgtggtgttgctaagcatgtccctctgtctcctgaatttcttgggaattgctaggaagttctagaggcattgttttgtttgctttgctttgcctgactgcttcatagttggtgttgtgttgtgtatttccttcaggaggtaatggttggtggcatctctttttgcagtgagactgtcatctgaattcataaatttatcagggattgcaaatagtggtagtctaattctattattatttgttcatttgttagcaggaattattgttcatgaagagaaactccttgcatctgtaatttatctacccggtgcttcaggttttgtaggaaaagcaggataatatactagattctgtctatttaccaatttgcacgatacagctagttcacagtgtcaaaccaagtcactgtgttttgaaagcatgactgtaaattcatagattgcagcatatctgttgtgtttcagtccatgacagtgattaccctttttcatgttcagatggtcccctgtctgagcattgggatcctattcagtttggctactgagtccttttaatccaatactggctgtctttgatagttttcttgctttctagtataacactatgttccaggctcatcttgtacatttcttgccttagctctgggatcagcttttttccaaggagacctggtttctttcagtgagaaatgatatttggagaccaaagactgggccccaggggaactgttctcactgggttgaatattgtttttcctttccagtggacacagccagtgataggaaatctgtgtctctctagatatagatatagatcgattgtgtgtactttttttttttttttttgagacggagcctcgctctgtcgcccaggctggaatgcagtggcgcaatctcggctcactgcaagctccacctcccaggttcacgccattctcctgcctcagcctcccgagtagctgggactacaggcgcccgccaccacgcctggctaatcttttctgtttttagtagagacggggtttcactgtgttagccaggatggtctcgatctcctgaccttgtgatcggccctccttggcctcccaaagtgctgggattacaggcatgagccatcgtgcctggccgtgtgtacgtattttttaaggtaaaatacctcatgagtttatactgatgtgccacaaggcttttacttaacttcattcattttacatcagtattttctttctctcaaactgaaaatagcagttctcactcacaccaacacaatttactcatttactttctcccacactacacttgcaataatttccgaacaaaaatgccagtgacattgcaacaatatgcttactgaaaatgtttaaggttttttttattttgattgtttagttttgtattggtttttagtccactgggctagagatggacaattacattacaatatgttagggtcatttggaatagttacagtctgtgtgtttatgccaataactggatatacatttgagttcacttactttaatttgagacttcctaagaggcttttgaaaagtgattcttgttcaataattatataaaaatatttaaattttcctgaaacaaaacccacaaaacaaggtgaagtcgttgaagtctgtctttcatgcctgtctgctttattttctcctttttaccatttttaggcatatctttcatttttattataagcaatcatactatttaggtaggtttttttttttttttttttttttttgctccaatagatttatttatttatttagagacagggtctcactttgtcacccaggctggagtacagtggtacagtcttggctcactgcagccttgaactcttaggcttaagcaatccttctgcctcagccccccaagtagctgggactacaggtgtgccccaccatgcccgctattttttttgtttgtttgtttttccagaccaagccttgctctgtcacccgggctggagagcagtggcaccatcttggctcactgcagcctcaccctcctgggtttaagcaattctcgtgcctcagcctcctgagtagatgggattacaggtgtgcgccaccacgaccaggtaatttttggatttttggtagagacggggttttgccatgttggccaggctagtctcaagttcctggcctcaagtgatccacccgccttggcctcccaaagtgttgggattacaggtgtgagccaccatgcccagccttccagtaaaaatgtttagaataattccttaatatggtacccttcttatcccccaaacttttcttagctgttgtttattggtttccaactctgagtgattttgaaattcttagtaccctttctttcttattttcttctctggctataatttgatttaaggtaatatccttttactcccacttaacatctatgttagtgagattattttcgttcctttcatattcttcccgcgtgtttttttttaatcattatactatctatattgtcagggcacatagtcattatatcgttctggctatatgtaatattgtttccttgtaatcatctttcagtaacagacctacagctgattatgtgttaaatgctcacccagtctttgtatcagtgcctttccagccagactggttgcctgactcttctcccttgcagattactaagggtttctgcgaacaatattccttgggtccttgcatattcataacagattgttgttggctggaagatcattttggctgggtataagatccttggcttagttgtctttcctgagtgtcacgctactgacttttagcatgaagcctggctcttgaaaaatcgggtgacactctaattttctgtcccttataggtaactcagtcattttacctgagtgtccaaagaatttttttttgttttctttcctaggtcagtttttccaggtgcatggagtattctgtcaatatatagtttcaaatctttttctacttctagaatttgtgcttcagtcacgattttaagcatttgctgtttttattgcttttcttcttcaaaggctcttattacagtgttatgttgggttttctttgctcatgttccttttctgagtctttctcttgaattctatttctttcctcatttctttttgatgtttaacactttctcctttctattttttagcactcctcaaagattatctgttgtatgtattccctcttgtgttccttcttatttggtcttcatctagaaaatggattttcttttttcgttttcttcaaattctttcccacgttcttttgcctctctctatccaactatttcttttctccaatcacttcatttctgaatgtttttattgggattagtgttcctttatctcttcttactgcctcattttcttttagctcttttgaaatattaaagttttcatctgttttgggggcatgtctctgtggtaagaatgctactctgatttttcttcttataataactgtgcactgtatttgaccacaatcctattttgttactcatttttaagtggaatgagttttcttgtatttttagggataagggatgggccagaaaatattttctagtgtctaggccatagaactccgtcttctgttgtttccatggaataaaataaggcctatattttcttagcttcgtcttctctgcctcccttcacttggatctgccccctcccttcactttggctaaattattactgccatgttcgatttagattctgctctcaaaagtttcttctcaaggtgatttggtcgtggaaggaagcttagatttgttggtctcaagagtgccctggctccgtaacacctaagcacctcagaccttcccagggttccttgccctcaccccatgaattggattctgcaggaccccttgccaatgatgctgctgtgctcaaaatagctcaccaccctgctgaccgtgccgtaaggacctttggaagcttgggagcccgttgtgccaaaaccttcagatgcccactgcctctcctccaactttctcttgcacagatattgcttctgcctggctctgtcactataaatggttcggccacacccattcctgtcttcaggtttatggactacacagtaacctcattttgtcttgatgtggtccatgggtttttggctgtgtaattccaatttctctgtttttgttgttatcattgctattgttactggcagggaggaggagggcagggattctgaaaaatttttttaaactgtgctacctttgacactggtgccatcatcttccctgaattcccgctttaattttttcttttcttttcttttttttttttaagacagggtctcactctgtttcccaggttggagtgcagtggtgctattttggctcactgcaacctctggctcctgggttcaagcaatcatcccaccttagcctcccaagtagctgggactaaaggtgtatgtatgtattccctcttgtgttccttcttatttggtcttcatctagaaaatggttttttttttttcttttacttcaaattctttcccacgttcttttgcctctctctatccaactatttgttttctccaatcacttcatttctgaatgtttttattgggattagtgttcctttatctcttcttacttcctcattttcttttagctcttttgaaatatcaaagttttcatctgttttgggggcatgtctctgtggtaagaatgtgccaccacgcctggctaattttttgtatttttggtagagatggggttttgccatgttgcccaggctggagactcctgggttcaagcgatccacccatttagacctcccaaagtgctgggattacaggcatgagccaccgcacctggccccacttcaatttttttttttttttgagacgaagtcttgctcttgtcccccaggctggagtgcaatggcaccgtctcagctcactgcaacctccgcctcccgggttcaagtgattctcctgcctcagcctcccgagtagctgggattacaggtgcctaccatcacacccacctaatttttgtatttttggtaaagatggggtttcaccatgttgcccaggctggtctcgaacttccgacctcagatgatctgcccacttcagcctcccaaaagtgctgggattacaggcgtgagccactgtgcctggccccactttaattttttaatagtgcttgagaagatgtttctgctaaatactatgcctctggattaaacctcaaatacttcaaaatgaaaagtttgatttcggtcacagatttttagtaaatactttttagggacaagaaaactacaaagtgctttgaaaaacaaaacaagctcaattttttatttgtttaacatatgtagaaaataaaattaatacacgtatcttttccaaattaacacagtatgaaaccaaccactactaattcatcaaaagacacaatttagatcaagtttaggcttggttaggacgctggacgctgagtaaatggtagctctgaggctgaaaaaaaacccctgagtcactctggtacacattctgatgtcagcatccccaccccaccccaacccttattcccgccccgcccccggccccgccccccccccccccccccccccgcgaaaagaagtctctagctctgaaaattggcttgttataactttacaaatgtagttgccaaattgccattgacatcacatttttctttttggcttttagtagctagatagtaatactataaaggaactctctgctttttctattttgtcctttttaaattcttggaggcccttcataacatggaacacaggatgggcaaacgtgcttcttatagtgtaggttagatttagcaccttttgacaaagggccttgtttcctgtgcagtttaaatttagatccactgagaatctgagaaattcagtaatgaaagggtaactttggagtttcctcttttggaagctttccttattaaattctattaatgactctgttagacttgattcccatcttacacaagagattccagaatagcaacttgaattgcttcttagtccctcttacgaagtcactccttcatttggcattgatcgagtacctcccgtgtactggctgacggggcttatatacagagccactaccttatttttcattctgttattttaagagtttcttgatagtccatctacttaagaagtgttgctattaaatttcagtctatctcataaatattattctgagatcctcctggctggatttataggtataaatcattcttggataaaatatacaatataaacagtaagtggaccagttatctgattatacgtgctctgagtctacagaaagacaatatcttggtatgtttcaggagacttgtagagatgaggtgtaggacttctcatttctaattaaaactaattaaaatttactgtctacaagggagatggattgaacatcacctttacctttctcttgacagcaatgaaacctgactcaaagctggcactaaatgtattatttcagtatctgtgtcctattatgtgttgtaatattttggattaaaaaatggagaaaaaataaacaagaaatttttatttctgctaaaaagtcaacagagtccattgttatctttctttgcttttcagatggcagaaattgggtgtcaggtcctataacacaggggttcccaacccctgggccatggaccattatgggtctgtggcctgttaggaactgggtggcacaccagtaggtgagaggcaggcgagccggcattagccagctcagccagcctaagctccacctcctgtcagatcagtggcagcattagattctttctcataggaaagtgaaccgtactgtgaactgcacatgtgagggatctaggttgtaccttccttatgagaatctaatgcctgatccccctacccctagcctcatggaccagtgccaaaaagtttggggaccactgccataagaagtcccgaccagaagtgtcacatctttctattgcatgatgctgcttcttgaacacccatagtagccaaggccagaattagtgtggcaccctcttccccagacaaggtccatggacagtgcatttcaaaatacaggaagctctccttacactctctgctacctagcttccatggttatcaagtaattatactttatgctgagccaacttatgcatttaggaagagatgaagagaaattatatcctcaaatgggctggaacaaaagggaataccaataatttgtaagttaatcaaattataattaaagcaggaagagacacaaggagcttggattatctatgttttctgttagaaaataatacaacaaaagtatccagggagtcttatcagttctgtaggaatttggcagaacagtaaggttataagttgtccttttaattcccagccacctctggcctctgcttaccatggccctgccttctgacttgctgtttgctcagctccttagtgcatgggaagagcagaaacatcaggggaagagcgctgagatctgctgtgcacctgtgccgcacagcccttcccatgtagacatgtgtagcttttgggtttgccagtggatggaacttatccgcatcaagtagccttccacgggggtggtgctgatacgcactcccacccacagccgatacagcctaatcacaagtggaacaatcagagtggaaagtagcggaaagtagcagcctctggtttccaaatgtgagagagcctcagggctcagtcctcaaacctggtctgttttttgttgatgccttcaaaccatctcaaaactgacaccttctccagcctgggccttttctttgaacctcaggcttgcatatcccactgtctcttaactgccttcagtgggatgaactcttgatattctaccccaacctgcttctcccactgccttcccatctccttccagttactcaggccacagttgttgacgttgtccttgatgcctctttttctcctacacaattctgctggtccacggtgccaccatctcttggctggagttcatcagtaacctcctgagtagtctctctgcttcttctcagaatatctcctccatgcaacagccagcatgaactggtgaaaatgtagtccagaccctgtacctcctctgatcaaaaccctccagtgcctctcagctcactcagagtaaggacctcagactttattgtggctcaaagaacttgtcacccccaccctctgacttcatttcctgctccccaccccctttactcagtgccaggaacaccacctcgatggtgttcctccaacacaccacacaggagcccaccccaggaccttggtaccttctgttctttctgtcaggaaggctcttcccccagtcaccacattgctttctatttccctttcttcaggcttttccccaaaagttactgtctctgtgaggtcttttttgactgacaagcttgaaaaaatggtcaccagaccaccaccctagcccccttttctgcttaactttttagcatctatcaccatttaatggaaaatacttcattataaatcttttatttccatgaggataggtaattatttgttgttgggggtgtctttgtcagcatctagtacagtgcctggcagatggatgctcaataaatattgatttaatgggttatgagggtgttaatataaaattagcatttattcagcaactactatgagtcagccactgggctaagtggcttacatgttaagaacctcacagaaggccaggtgtggtggctcacgcctgtaatcccagcactttgggaggctgaagcaggcagatcacctgaggtcaggagtttgagtccaggctggccaacgtggtgaaaccccatctctactaaaaatacaaaaattagccagttgtggtggcaggcgcctgtagtcccagccactcaggaggctaaggcaggagaatagctggaacccgggaggtggagattgcagtgagccaagattgcaccactgcactccagcctgggtgacagagtgagactctgtctccaaaaaaaaaagaaaaagaaaaagaacctcacagcaacctagtaggtgagcactgttactcttgttttacaggtgagaaaattgagccctagagaaataaagtaacttgcttcaggtctcatggttaaggggaacctgggccctaacagtccacttcctgtaccttcaaccacggctctaccgcctccgctaggagatggcccgaggacattccttagctggcttcagcttgctctttttcccctgcggtccacccctgtctcctgcttggtcatcagtgatttccatgccatcccatgtcattggaccagttgtgtgtttttaataggagttctcatctcactttctccacagctttgccaattctgctctccccctcctgtctaaataccttcctcccttggcttcctgaacaccactgtcttcgggtgccatcatccctttctggcccctccttcctaagtcttcaggtgttccctttctacctgctttctacgcctctaagtgttggagttcctcatggcttagtctctagaccactttgcttctccacttaagtgttctgctagatgatctcatccaaactcacagtgccttgatggatccatgactcctgcatccatgtttctaggccagacctctcatcatcttcgggcctgtgtctccagctacctactctgcacctcctttggggtatcacaatgtcacctgaactcagcacgttcaaagtcaaagttataacaatcaccatcccaccaaacctcatctacccaagaattccccatctcagccattggcatcatctagttacccaagacagatgcctaaaagtcctccttgaagcatttctgtccctcttcctctgcatctaatgtgtcaccaagtcctactgatgcaatctcctcagtgtctttcgaatgcactctctctcttccggcccactatcaccattctagtcctaaaacctaccttctttctaggagccacagcttctctggagtttttacacctcttccaactgttcccatcaccccgttcttttctttgacaacattttttacatataaaaataggtatttatgtgattatatcatgaatgtcttttctccccaactaagaagcactatgagagcagggagcttcctgtttctccccgttcaatcctcagctcctagcagcacagtgcctggtgtatagcagattctccatcagtatttgatttgttgagtgaaaaacttagatgtattaaatgacaaactgagatcaagggagaatgaagaatcaatcagaagcagatagaaaattatgctgtgtggtatggcaacatcatgaatggactgttaccgataatacacactgagtcatcaaagaaacattaacatgtattctctattttaaaagggaggtacataaatatagaaccaaataaacagatctcaggaacatttccattcagtaagcaaagttttagaagggaaagagaaattaagttcacatcatttcccaataacacagatgaatgttttccatccaattctgaggacaaagatagcacctcctcgcccatccatgccaacggaggctgaggtagcacagataattgaaattacagtgaagaaggaaaggggttgattgatttgcatgccatctcttttctttaatagtggaggaattgccaaaaaaggctaaaaatgggcaacaggaaaagggagaaacagtaagaatcttggataatcttccactagataattaagacttaactgggtctgttttgatgtgtgcacatgtttctgtacatggagaaggatgaacccacaaatattataaatgccaatttccgaaggcttttggaaaatgtaacccatagcatatggtgtcaaattaatttggggttttacttgtttcagtctgatttgggcacattgaattatgagataatagtttggcatccatgtttgctgagtgcttgttgtaagtttctcaatttcacaaaaattctctgaggttagaggacgcgtcgtgaccctcgtttggcaggtgaggaggtagcggcacagagccgatccgtggctcgcctgagctccggcaggaactcctgggcggagctgctgagacccaggtctgcagactgtcactctggcttcactatttctggccttcctttgagcacttttcttacttttgttctgtttcatgcacttaatgcacctgtttcatcatgctgcctgtcacagttaaaggaatttaaaacagaatggatcgtatttgacagtaaggagctgtacagctgaattccatcaagacaatgtgcttgtagccccaacggcattaaaactttcaaatgatgctttatcacaacttcctctgggctgcacgtgacaaaggggtgcttaaccaggagggacatctctctttgcttgtaggggcaggttgctgttttttgcccacctctaaaatctccttggagcactcagttcttcttatcctccttaaagccaacaactataaaatttaatttaatgttgaacagctgtttctgttgcggtccaggtgaaatttgaggtatcagctaattgtgctaaagttcccaaaaagaagtattcagaaggtgtggatcaccaattacctcttggcagagctgtgaactaataactagtagcagtagataatgtactcagatgccacatgaaatgcaaaagattctatgctttattccataaagcatggctataggacattgtctactatgtaactaatatttaaatatttatagatttttaaaagatttcttcaaccttcttttctcaccctgtttctagatctgatgcacaaaggaaaataataatacaaaacccataacctattcattgtattgttgcggtagatcgagctacatgctgcacagcaaaagaccttctttgcacttctttcaagcagaattattgctgtatattcactctgaactgagaggtgaggattgaactgtgtagtgcctcagaaaatatcaagagttttaaaacattagttttgagagattgaaatacatagaaacttggaatgtttgaatgtcagcccagacattggcaggcttccatgcagatttcattgtgagtaaaatgtgtactcagtggctgggttcaagcccttcatagtttataagcaaatgtctctgcttcttctagatcattgcaaaaaaaaaaaagaagaagaagaagagaagaaaagaaaaaagaaataggttaagcaaattttgtggtggtgcttatgtgtgcacagacatgcatgaggcctccgcatcttccaaacttggaaagcatattttaacagcacaaatatatctacatgtttgatctacatcagagcctctttttttccctcttccttgcatgcttttaaattatatagtttaaatgttttaactattaaatctgtttggtcttcaagctgtaaacatcacacacagctaataagctttaggaaagaaaaggaaattgacatttagtatagaggttctacaaaaccaatgaaaaccatgcaaatgagctatggaacagagagatttgcatatcctcgttgatttcatgatgatattctcagcatgagcctggcagccttgcctttttacctcttgggatgatgcatgtactggtggtagagccctgcagggtcaatttaacgagtgtaacattgtgattttccatgcggtttctcagaaccactgagcaaaatgcagcaataaccagtgacagaggaaatcgatttttgaagtaaatacttttggaggaggggaagaaggtacattcccttcatatttaatgttgccaaagtaggttgaacaagtttttatattagtaccatttggtatttcaaaataaatagattatccaccatttccatcactctctggataccctcacatgtttaccaccaaaactcctgcgcagagactggtcctcttttgcaaactgcctttggctcccccgcgatctctcatcagaaaagcaggctaaggaatctgcttttgcccccatcctgttagaatgataaatagtagcctgatggccaagttgtatatttatttaatacatcgtctgtattgatagtttatgatgtcctggatatgaatacacgaaagcacagttgcatagtggcgaagaaggattttgatatcgtggagatctggatttgaactcaactctggcagttctccctgccttagtttcttgcccgtaaatgggggtgatgaggtagttgtgagaattaaatgagagactatgcaaattgttataatactccctggaaaatagttaaatacccaatagatagcatcactattttgaaatgctttcaaaattatactcgagttttacttctgcaaaatcaaggcagctttcttcagaaaagagagaaatgaacttcacccctaaaatgtacttggagaattttagagggtcttttccaagttgttataaagcacttctgaagtgaatttgcccatttctgcccacaccaatcttataacattccaggaataaaatctgcactcgagtttaaaaataaaacgggtggaacaaactgaattagaagtccttggcagacatcccccccagcagaatgttctctcaattggtggtattgcaataaaagagatgtatattttttagtctgctcttcctccctgataatttcagccagttgtatttctctattctaaaaacctggtatgcttggatttaatctcaccactcctatctacgctcctgctcctacccccacacccatttcccccaaaaaaaccccacatctgcacagaccctccttcccaagaaaacatggaggcgggctgctctctgataccgtacatgtgcattccggactgtgctgaggaaggtcatagaaacatgagagggctctgctgttgtcagttgtaaagactgccaagaaagaacaacaaaaaaatctcaaatgcattcacatttctcccgcctcttttttcttctgtaaatattcaaccctttttagagaggcttttgataatgtgttatctcagcaaacaccacgaaccttggatgtacgcagtactccctaatcccataggaatgactcagtcaagagagttagatgaaatatggttggcaagattgggtggggaatcttgttactacacacacatacacacacacacacacgcgcacacacacacacacaccagcagcaccagccactgcacccctatcatcgccatagacattatgtaaaaactagacattctcctctcccttacacagtcagttgcatctttcccaaaaatggaaggggaaaaagctttctttggctgagccatatgcaaaaaatcatggaacatctgtgtaagtaacaacatacaacaagacaaattattggtggtaaaaggcaaagcccttgtttcaaaaacatgtctggaaatagtgtgtatacagaaccttcctttgtgctaattactcataataactgtcagctttgtgtaccacaggctgggctgttaataactagtggtcgcagtacggtgttctttttctttccctttctttttttttttttcctatccttccttccctctttcctgccttcttttcattgttgttgcacaaatcatatagccttattccaatagttgctggaagaccaaatcagagatgtgggggattcagggactcgcgacatcttggagtatactagtggataaatgccacttcacccctgatgtggccgtttccctccaacacttgtctaaggagtgcagggactttggggtccaagcaatgtatcagtaaacttcagaatttttttcctaacatttaactctattctcagtctcaacacccgccacaaaaataatgtcactccaggcaaatttagtcgcttacggattctgagtcttattgtgattttgcctgagtggcaagcttttcaggcacgtgtacttaaaaatgtgatgtggtagaatttgcctccagctaggaatccacagacttgggtttgagctccacgtcccacagtcaccacgtgatcttcagaaaagaatcactgaactgcctgtgcctccatgcccccgtttgtcaagagggaggtggtaatacctgctgcggtttttatgtggatcgaatgggcctaaaactcatagaaacacagaatgcttctatgataagagaaaactccagccaggctcagtggctcacacctgtaatctcagcattttgggaggccgagatgggtggatcacctgaggccaggagtttgagaccagcctggccaacatggcaaaaccctatctctactaaaaatacaaaaattagccaggcgtggtggtgggcacctgtaatcccagctacttgggaggctaaggcatgagaatcacttgaacctgggaggcggaggttgcagtcagctgagatcgtaccactgcactccagcctggaggagactctttctcaaaaaaaaaaaaaaaaaacgaacaaaaaatactctgatgctattgctactggttgtttttttttttaatgctaaaaggactccaaacatcctgttatcacccactgtcaaatttctgcatatattttgcagtgccagtgagaaacttggggtctctacagtcagtaaggaaaaaggagtttgaaagaactaagggatctctgtctatggggaagaaatagtagggcagagaatttaaatttagggttcttaggaaatgatgcaccagggccaccgcacagccctcatgtctcctctcttcagtgtcctctctgcctccatcacctagtgaggagggaacaggtgcaggaacaggtcgccagggtgtccagcaggtgacctcccacccccctaccctcgccgcccccactgctccactggcagcctatgtcccaaccaaaccttacttcacattgtaattctaatgttctgtgcgtgttcatcgccatatttccctccatctgacccagcccgtcaaaatccttcctctacttcagggcccagctcccatcccctcttccgcaaagccttctaaccgcaaacccattaacctctccccacttggggcttctgagtccctttattatttatggttaggagaaagcatcacgtcggtctggtgatgtgtagtgagttgtgtgaatgtgttagcagagcagggtggccctgcatgtgatggttgggtgttagctggagtgagccagcctgggttcaaatctccctctggcatcagcttgtgctgtaattggggtaagtgctgaaactctccctgtctcctttcctcatttgcaaacttggcttaataatgatagctacctcaaaaagttgttgtgataattaaatgaatgtcaagctcttggaacagtgcaagcgcttaagaaatattatgttggtgcaaaagtaattgtgattttgccattactttcaatggcaaaaaccacaattacttttgcaccaacccagtatttgctattactagtcctggtcagctgagcatggtggctcatgtctataatctcaacactttgggaggccgaggcaggtggatcgcctgaggtcaggagtttgagaccagcctggccaacatggtgaaaccccgtcgcaactaaaaacacaaaaatgtgctgggcatggtggtgagcgcctgtaatccctactactccagaggctgaggcaggagaatcacttgaacctgggagccagaggttgcagtgagccgagattgccccattgcactccagcctgggtgacaagagcaaaactacatctcagaaaaaaaaaaaaaaaggcctggtctaccagagacaagaggccatgtcttgtccatgaaagccttgcaaccatattttacagatagaaaagacccagtccatgaacattaaagtcagtatcaggtacatttatcaacataaaatctgttcctttgaatcagctcaataataaaagagtgcagctgagcaccccctcccacagccccatgcctctagtcactgaaaatctgtgaggaatttttatagagtgtttcagaacagagcatttcaagacaaccctagagccctatggaatacattttcaatcatctttctgcgtctgctttcttttttgggtgcacacagcagacactggtgatgaggcatgtgcctgtgtgcactgttgttttatagaagctgaatgaaagcctgggagttgtatctgcctgaaaacttccatcctggcttctagagctcaacacctgaaacgctggaggcagttgaggtcactttgaaaacggaacccttgatgttctgctcaaactttagaggcatttacaacaaatcaggcaaatgaaagtgtggaaaaatcagaaacgaggaccactctgtcttagggattttgtcattgtatcgtgtgtgtgtttatgaatgtgagtgtgtgtcacatgtgagtgcatttaaccttcatgcaataagagagtagttttccacttagaaccagccaactctctataaaatttacctccgtgattctaattttgctccctccgccgtgggcaagttggcaatgtctgaatgtctgaagtcatttttgcttgtcacgactggggaggagctaccagcatctagtgagtagaagtgaggaatgctgctaaacatcctgcaacacacaggacagcccccaccacaaagaatcatccagcacaagatgtcaacagtgccaaggctgagaaaccctggtttaccttaaccttaaaagaacaattcgaatgcttgggaagggatgtctgccacatctgtactggagagaagcatggcccccagtcaaggacatggagagttccatgtctggatctagaccgtgtccatccacaaagatgcctcctgctcttctccgacatacaatctggtccatgagaatagactttattggtgagggggcggggctttaggtgagcggcattgaagggcttgttctgagcttggcctctgctggcagattattttctggccactttaatctcgatcctgcctctacttggtctttttttttttttctttcccccagtttttggatcttatagttccacaggacaagatacatctaagagatgggggaaaaggttaaagcagcaaggggatgctggatagagggggagggaaacaagaaaggaaaaaacaagacagagagacagagatagacagagatgtacaaatgggggctgcttggttaaagtgtcctggagttttcagcaagagattttgctgccagtgtctctccatccttctctctgcctctctctctctctctcacacacacacacatacagacacacacacacacacactcggccccaccaccacacacaggccaggtggctctgcttacatacatggcttggcgcttttactccttggctaagaccatttcacacatgaacaacacagcctcctcctagagatttgtcatccatctgcttgcagaagagctgtctgtttccctctgaaaattggtccaatcaacattttcctttggccagggtagcttaccagcagctcctccataaggtccataattgcaatttctcattctcatttgcctggctggcttcacccttctgtcctctctgcaccttcccacaagtgccccaccctccccaccagccctctcctccttttgtgttaataagccctgtcaaaatgaatgacagaatcaacttccttctcccaaaatggctcattactcataaatttcaagcaatattgccttctgtcctcaaaaggtttgcagatttttttcccccaactgatcccctttccagagtgaaatagcggatgaatgccttgcctagcaccctctctaagctctgcctctgtggcagtattgtgggccaatatgccaacgagtctttccttgtgatctgctccagcctgtcttgtgccatatgcttgtggcagacagtggttaatatcagtctgtgagcatcttgaggctagctttgaagtctaattctaatgtcatcatgcttatagggtgcacactttgtttgttctggaacagagggtcatctgctacgggatgtggaacactgaccctgatattgcagccgtgtttgtggttgagtgagggagcaggtgatgggcataggagggaaccaagccctgagccgtgtttcagggatgctcggtcccatcccctttctcccagatgacttcttattcttaaattttgaatagtgagtaacacaagcaggaggtgggatagcatgagaacttaggaaatcttcccatctctttgttacttacaagataaatgtctatactgaagctttagggacccagattacaactgaattgttttataaatgcgtctgaaatctgctgttttgaaggacaaagtaatacctgaagaatgattaagaaggcttagagaatccgcaggctccaaggtgtgtgaataatacctttccatggttcactaccaggtgatctggacctacagccagtcttctgtgtttcagtatattatgttgggagcattcccagacagttaatgcgtaaaatgctattcaaattctcctttaccgaaaggcattttaaagtaatacacgtgggtgaggaatacaagtgcctggtgggatacttttggtaaacaacgtggcacagtgggatggagtagggtctactttttcccaaatgtgaagttagtagctacagaggggtcctgagacagaaagcatttgtaaatattaatttgtgctctgtttcacagaatctgaaatcaggcatctgtgcactttaaaatatgaaagaactaagagatctagtgtttggtagcattttagagggaaaaaaggccatagctcaaatattgctctgatttcagttggctgaatttatgtgtaaagggcatgttagggaatagtctgcaaaggtaccagaaactgccattcatggaaggccctgagtgcaaaatgcagcagtcagtagttctgacccatgccattagatggttctggaaggtcctcagaggagacgcaacaccaacagtgacactgcttccagctcaggcaggctggagctgttctgagtcttcctgaaggttctgaatggtccagcccttggactcccttcagagagtcatggagcacccacatttcctttgcacctgaaacacttctttgtttctgtcttcaccctgactcctcatctattcagagatcccagctgatcctctctttcaaagccaggccagtgagctcttacagaagcttacttcagcattccttccaccgtcttctgagtagcagggcagacagagacagcaatggagaattccagttgattccccataaaatggccactttgttgtggggcatgagctggtctgtacttgtttgtgcctggcagtgcacacactagaaccctgggcaaccctggatgtaaatcaactagatactattattaaatagccgaaggtttgccagtgcagcctggagcaaagagagaggggtaaaatcaggctcccaacagacttccccataggaaacctctcctctgctgtgattttccagatgagctgcgtaaatggctccaaatcaccgaatgtttgtgcacgcaggctccattcatgcgcatgcacacacccggcttgtgtccttcttccctctcgtcccttgaacccgtagctcttgattctgcctgtaggagcaatgatgttgtagcaaccatgacaaaagaaacaaaatcagaaggcagatccaggccgctccctgccacctgccctctgtctaccttagacagatcacttaggcccactgggtcttgataagacatggtcttttcacacctgttcttccagtcttataggattacctggaggatcatgtgatgcgaaggatgtaaaagtgctccaaggggttaaaaggactttatataataaattcctacaaactgctataggcacagccatagctctgaaactagcattctcgtaaggctagtccaatccataagtttcgtttgcttcaagcagctcagatagacactctctgaagataaatgatgcataaaaacaccattgtttgtgatcagaataatcaggtaccactaaatagtcctgcatgtgtatgcatgataccagcagcctccaacttgcttctccaggagcactgtacttaacttggaaacccctttatttaatttctgtccactcacaaagcttcaccttgtcttctctcctctctgtcctcccgaggttaatccttgagagcctgtaatcaaggctaggccctgcccaccttaagtcaccctcccctctctctaggcctccacctcactggggagcgtcattgcagccagtggcaagaagctgcaaaattctctcatctgtgaagagagcccctaaaaccccaaatcccggaccagtagaggaaaccattgctgccctaatatcacatgttacaagtcttcgagcccatggtatctgagatgttaggagctagcattccttgtaattaaacccctggaacatcacaaggacccagttcagggggcttggttggttgactgattgatgacagcatctcaattatgtaggagatttctgtaaagaggagtgactggaaggaaaagaagataaccttcatttatatcatgagaccttgcgtagtagaaggccgtgaggatgggaacaaagtgaaatcatgaaaaacagcctgatgcaaaatgacaaagaagaatttcagggtcgttgagatcacacttgaacaataactgaacagagccagcactacagttttcagacctgatggctaacaagtgaaatgtattcagagagaggtgtgtgattataaagactccccctacccctggtgctctattccactgactgtccctttatgaaaaatgaattctagagttccctttctgaaatttcttacctgaatcagatcagatatgacaattctattttttaaagcaccttactgaaaataaagtgcttttcagtagtaaacctttaagattcctggtttccctctgacttgtgaaaatatgaaagaactgaaattagaccacattggcccaggttgggaaaacagatggcagagataaggcagatcaaagaaacatctctctgtgggtgaaggagttcctggttgtcatgtatccattttttgtagcgttttccctacttgaggaggctgttgtgaagggcaggattcttcactgaatctttattgtaaaaggcataggtgtgtcttgggtggattccagttctcaggttgatttgcttgacaactcttaggaaggaacaattaatactgctgcccctcaactagctagggagatttcactgtggaggtagaagtcggattcactgaggcagaattgccagggcttgagacccttcatgcctctcttttccaagtctctctctccaagaaagggtgaacttttcaagtcaaagagcagggacgtaaataaatgcagttatggctgtcttaggaggatccattcacttaaggcaaaggtcttagaagttacagaagaggagagagaatgggaactactgtggcaccaggatgtctggagaagagaaagtgcgcttactgtgcacagcttcctctccctcacctgcgccacggtgaacccacctatatctttctgctggcaaaaacatttgctcagtgtgtcgccggagtacttgagtgtctgatatttctcaaggcagaatctacctcactgtctctgaaacctcaaaatatgtggccctctcgaaggataacagttggcagcaacctaaggctgttctgctccaacttggaatgaagaggaatatgatttggccattcttcttagcacagaggcaaataaaaaaaaaaacccttatatacttcaaaagatgaagatcttacttcttactggctatctttgcaccaggtcctgggattggcatataataaaaaatgcatatgcagtggccatgaaatgggcttaaaggtcaatcttggctgccagtcgtggctaaactgcattgtattccatgtttttttccatattgcccctgcagtgtacatatacatgcacagtcatggcccctgcacactgtgtacacactcacgcctgcacacatgtatgcatatcaacgcctgcacatgtacttgtatgcacactcacccacacatgtgcatttgtgtgcactcacttctgcacacctatttgcatgcacgctcatctcccacaaatatgtatgcatgcacactcacgccccccccaccctcccgtgtgaaactctgcacctgcttgtctttaccctcacccttgaacctgtgtataacctcataaagtaggaagaagcccagtgttgaactctacagccttttacattcaaaatggttttgaaaaatgcccattcagaggaacaggaaagcaccaaacctaaaaggtctgaggacctttccatgctttctgtctcctaatctcagagctgtaccaatctgttatttaaaaattagtcattatttatccaaggcaggaggggacaaatgtaactgttagttcagtaaatgatttcattcttttttttttcctgtgtcctttctactgttaaagtgacgaaaatgacaccacggtttgatatgtggggttggtttcagtttgaataatctcatccttagctgcatgtgaactcatgtcttctcacactctattagataaaagcctaaaacaggaaggccagaaacaactgtttttaaaaagctcatgctaccctggcaacttaagttggaagaacctaataaataaatacaaagctgcccctctgtcctaatgtacttcttctgaattccagctgggcacctcatggtttcatgcctgaatcacaaaggcgagtgccagtacccagccagagcagttttcctaccataaaccagtaaatgtgtgtgtatcacatgtaagtcagggtcagatggggaaaatcaactacaaaaccgcagagacattatgcaaaattggattacgtacatgttttcagttttgtctcttagcagtttaagtctttaattaaaatacacacgagagagagagacagagagagagagagagaatctgtaactgttagattttataggccccggttatgagataatagccttccaagtaatttttatgggtcattctatctagtggcaacttagactataaagccatctcccagcttcccaaaagtaatgtctgttttctcactttctaataattacttcagatttgaaagtaaggagttgtcacagtgaatacaaattagagtcagcttcagggtattactaaatgtggattgttttgttccgagttttatccattttaggcagagtaacatgatcatttatatacatctgcctctatgcaggctgtgtagacatactcagaacaccagcttcacctcttcagtcttctaagacagtctttctaatactctatattgtctaatagctaagctattgttaaataaaaacacgcaaatgtttgcagttaggctcccccctccattctcaacctcttaagtgatacagacagtaaatgcattttgatgtttatttagaaagttggcatcctgggactgttcacaagatagctaatttgtctgaaggtccccagagacagtgaaagtcatcccaccatctctctagctgccctcataccggggaagtaaaatgcagcatagaacactgcagctcacgttatggagaacagtggtgctatggtgatttcctttctattcaaatcatttagtgaggatttacataatttgcattaacgtgtgactttcgatcacttatgctgcagcagagtattcgttgcctatgttctctaaggcaccagtgtggtggttcatgtgtccttgtataaaagattactgtcctccccatccccagtctttgtatctgtgcaccagaacaaaatgccctcggatcatggccacccaggccagagaatgaggacccacactttaaaaaccctgtagatgataggatgagcggtcctcatccgtcccctccctgagagtgaggttgggttggagtagaaggatggactctgccaaatgatgacagcagccctgagagtccttctcacaggtggccagctctgtcccctccagcctcaccacacattcccctagtacacaaaggcagacccgggcagccactcagcatgcacatgtagcagtgtcccctgtacactggtaccctcaaggcctccctggcacctttgcttgttacgttggctgatttcttcaaagggaaatatgggatgtggtgcagcctggccctcacacactctgaaaatagcactgcccagggccaggccttttcctttgcacactgccatacccaccctggaaagtactccatggttgtatcacaagaaaacagccatttgggcattttaaattactcaaaatattataaaaatatttataaaatatattaatgtatatatttataaaatacaaagagtatatgattaccaggcaaatgagtagacagtgatagaactatcataagaataggattggctattaattataataatgattggaatagataacatttattgaacatgtattatgtgccaagcactgtgctaaaatatttacatgcagcagttcatcaaaagctcatgggaagccatgtgcagtgtcatgcacctgtactcccagctacttgggtggctgaggcaggaggatcacttgagccccagagtttgagcctagcctaggcaacatagcaagaacccatctcaaagaagaaaacaatacaaaaagctcatgacagttgtaagacatatgtaccatcattacccttattcaacagaaaaggaaattggggcttagggtgggtggttaccttacttgtacaaagtcacacagctagtaagtggaggagttggttcaatgaaggataaccagggaagcatctgtgggcatatcgaggcctgaaaataggaacaccttggccaaatttcagaccatgacatcaagcgaatgcttgaaagctaaggaacaaatagaaatatgttgtatcatttataacaaattgttaccattaacacctacaattattagcgttaggagtattgcggtgggaattgaacaatgagaacacatggacacaggaaggggaacatcacactctggggactgttgtggggtggggggaggggggaggggggagggacagcattaggagatatacctaatgctaaatgacgagttaatgggtgcagcacaccagcatggcacatgtatacatatgcaactaacctgcacattgtgcacatgtaacctaaaacttaaagtataataataataaaataaaataaaaaaaaggagtattgcatggtcagactgttcagatctcatgaatgctccctgcttctctattccttctttgatttgacatgtgccaggccatgtattccagtggatttctgtactttctactttattccaaaggctaagcattcctgaaagccacagagggagttgatgtgcttaaggaaagaagtatcgcttaatgtggccaaaaaccgattccatttctgtacaaatgcaaggagtttttgccaggagccagggattaatagtctagaggaagggactaattgtacacaggaacaatatttacttttataatgggaatagtttgagacagtgcatcttctagacacaaacattcagtaggaagggttatgcattaattctttcatttaatgagcattttaagcacctattatgtgccaaatatcttttcgtagctctacaacagtgttcacttctcaatcttttgctacaccagagcgttgggaccatgctcccattaatcaccctgtctcaaacaacatgctttaccttcattcgttgatttactcatccattccttctcatagtttttaacctcaagagctctgaggttcagggtggaataatatggagggcctttgagaggctaacttttgaaccaaatcttcgaggatgaactagggtagtggcaggtagaaaactgcctttatatttagccttctttggtacctggtcatggatttcttcttcaagcatgaatggcatcagttgtctgggagtgagatacagtgttcgtatgctgagaaacagattaggccattaaaaaaaaagttgtggccacgtgtggtggctcacgcctatagtcccagcactttgggaggccgaggcagggggatcacgaggtcaggagatcgagaccatcctggctaatatggcgaaaccccgtctctagtaaatatacaaaaaattagccaggtatggtggtgggcgcctgtagtcctagctactcgggaggctgaggcaggacaatcgcttgaacctgggaggcggagcttgcagtgagccgagatcgtgccactgctctccagcctgggtgacagagcaagactccgtctcaagaaaaaaaaaaaataagaaacttgtaactccctctctctacttgatgaagtagacatcaggaaagactttcttattctgctttccattaaaagccataacttggaaattattattgattgggcttggtgtggtggcttgcgcctgtaatcccagtgacttgggaggctgaggcaggaggattgcctaaggtcagaagttaaagaccagcctgggcaacatagtgagaccctgtctcaaaagaaaatttttttttaagtagcctagcatggtgatgcatacctgtagtcccaggtactggggaagctgaggtgggagaatcacttgagcccagcagttcaaggctgcagtgatctatgattacaccactgccctccagcctcggcaacagagcaaaacctcatctctaaaaaataaataaaataatatcttaggggaagttgacaaaacattagaaatattgtagggttaggtgcctgttgagccccaggatttattccattattcactcatatcttcatgtatccattcaataaatacttattaaaagcctacaccatgcaagataaaagccacattctactgagtatgcaatgatacacggtatggggtttctgctttatggaaactaaaggcctactagaggaattcaggaattccagtgtgtaccagctcggctgtaacacagtgaggaagagataggaaccatgaactaagcggtgaaaatgtgatgggattcagaggggtcagaggtattggatacagtgagattattttaaacgtttagggtgtacgagcaagatgagtaggagatttctttaggaaacatctccctatgaaataaaagtttatataaaaggaataataattacagttgatatttatgaatacttaatctgggccagggactatacttagtacttttcatgcattgtctgattaggtcctcacaacagccctgtaaggcaggtattgtactttcttatattttatagtttgcactattgtgtgctccatggttatagcaaaagctttgtctgtaaaaggccacagggatagaaggcagagaggaaagtagatgtgtgatgcagtattaattattgagccaataaaatctctctaatttagattttttaggaggaagtcattttacattttacattaatttaatctatattgagagatccttctaagaaaataagttgcattacttcaagtatacatagccatataaattattgaccaattttttttttccaattcatagacattactttccagaaactagataatgaccatttgttatcagcacactgactgcaaaatggatgatgaagaaagcctgggttttttttttttttttttgaaagcttggtagttcttcttgtgaataaattaaacactttcctgacgatcctgtttgcattattgacttatatgtactggctcatatgtagctgcccatgtataattctccccactcattctgaagggagggaaaaaaacgattaaaaatttcccctccttctttttcctgttttgagattatttttgctcccagcagaggcgcggaggagggagctctcagagccccattctgttccctacctacagcatgaaggatccagataaccgcagaatgaatgaggtttgagcatttgtttttgctataagtaagatggtttcccattaataaaagtggcactcagtttactttgtcttcgccagacaggcaaagggtaaattaaggtggttacctgtggtgtcccagctctttcccaaggctggactagtgtgagccgagaaccaggcaggactcactcacaggtccctttctctgctacttctgctctggttttatgcgaagccctatttcccagctgcttcgggtaaacaaggacttctgtgttgaaataataaccacttgggctgggcgcggtggctcacgcctgtaatcccagcactttgggaggccaaggagggtggagcatctgaggtcaggagttcgagaccatcctggccaacatggccaaaccccatctctcctaaaaatacaaaaaattagccgggcatggtggcaggtgccgtagttccagctactcgggaggctgaggcaggagaatctcttgaacccaggaggcagaggttgcagtgagccgagatcgcaccatttcactccagtctgggcgacagagtgagaccctgtctcaaaaaaaccaaaaacaaacaaacaaaaaaaccacttattgtttcactgcctaatattaattaattggccaaatttctattttattatattccatatattttaaaataatttcttcttctgttgtacaaaccaagatagaagataatttgcccaagaacacaattggtaggtatcctagctaggaaagtgggtgcttctgaaaattataaaaatgaaatgaggtaattttctgggcccttggtacaatgcctgagatgtcatatatactcagctaattataagtgacattttgttctagaatccagtagctcaacttttagtccattgtgctgaacacaaatctatagatccttaaattgtatacttttattaatttaattttaaagagccagaaaaattgactacattggaaacattccagtccaccaacatattgagtagaaagaaggacaaaggccatattctctttcagatgctacaaattgtgtatattttcagtaagctgtgtctgcttaaggaggcattactgcattcggatagataaactcaaataaaaaggcctgagtgaagaggctctactgggtttagcgtttttttgttgttgttgttcagttttgcatgtgtgtttttaaatcagtttatggttcataagctgatgaagcagtgagtacaagtttgaactatgagaagcaggtttgaataagtctagacatttggttatcttctgtctagcattcatttgtgtcgtgggcgtcacactctggggattagtgtttcattatgcagaagctgttttatctttagctttcttataatagcttaaagtgaattctgagtggagagagaatgaaggccaggccttagtaactgcaagaatcataccaaaatgggttggatgggttttaacagtgaccgataagcattacgacctcactctctgatagttcagttggctcgatgctgtctcatcacctcatttagggtacaatatgctgaggaactgaccaaaggtccctgaacagtgagagatagggaagagcagaaatccgttcctgtaccaagtgtctaacacttaatataggtgagagctggcgtgagattatctgtgctgtggaaaaatgaggacctatcgatacctctaagtatataatcactgccgtgtcacattttaattagctccttgaggctatagaaagaagttcgcttcttatcctccaaattaagcatcacttttacaaacaatcaatgttccattttcaaaaccccaagtagagcaatgtttgattttccttactttccagctttgagaatgtttcatttttagaaatatgttataggaatgtaaagtaactcttgtttccccaaataaccacctccttattatctgttcccctaagctgaatcctttcaaaggaaattttgtcttcaggctaagtttagtggctgatggaaatcaaaattatatcaggtgggccattgcgtcagtaaaaaagcccagaccaccaccacacaggatttttctccagacacccaaacatcatgtcacaaagctcaaaaaagtagtgattaacatgcagtgctttcaggaggcccacattgccgattcagtcccagtatgggctcgtcagtttcactttcattcattcatttatttatttattcccccacccattgattcacattcactcatccattcattaaacatttgctgcacacaatatcactgttagacagactttcagaaatgattgggttcctgtattacagacatgagcccacggcacaaaggtcaaactaagagtaagatggatgtttatagcacaagcctataacaaaaagaatgggtcccgagccgcatcttcttccaaatgcacaaactatatttgtaccttaaaaaaaaaacaaaaacagtgtttccttttgagaggcagcatggtatatgggaagaacacggatttaagaactagacaggcctgggtttgaattctgcatccataatgtgctaactgtatcatttcgaggaagttcttttgagtttcagtttgtctttaaatagagtcatcatttctactttgtagggttgtgtgaggattaaatataaaatatgcagcataatgactggcacatttaaacgaagtgctcagcaagtgctatttcccttcccctttcttcatttctaacatagtttgggaatggtttaggatgactctttttcttcttgtgaatagatagagacctcatcaccctaacactagaaaactataggacagagaccatacttcttgctgtggccagccctcatccactttgatgatgcttgcagctcccaagagagacaacagcccccacggcatggccaagagaggagcaaactctctccccaaggcagtcactctggggatgccattgttccattgccaaactcatgacctttggggaatttggaaatctactactttgtggggagaaaaggacaaagaaagtcaagattaagctttatatgtaaaggccttttattttaatggtgttgaattgagtttggattttgcgtacccttcaaatttcttagggtgtgggtgagggcatcctaggagatttaattagctccttgagcggcactgaagtttgcgacattgaggcacattttcttctattgtccattgaagtgggggagcctggcaatgaaatttctgagaaactgacgctgttgccgtggatagaattgtatggatatttgaatttagtttagtcacttggtggagttttattttgttgtttggtttcttttggaaagagaaaattagtatagtatgaatctgagcagtctggttacatgctttaatgggcctctgagataaagcagaaaaggatgtagtctagtagtaaccctttagatgataagggacacgcaggaggctgtccaagacagtctgttaatcttaatagtctctcacttgttaagacctgatttatttcaaactaaatttcttgttttgagtttccgggtgaaagttctggactgaatccctaaaaacatgcacaacaaagaagaaggcttttagaaaggtttctcctattgacagggttcatattctatagttcacaattcagtgaatcaacatttatattaatttcatccgttacaacctcagaatttgcctacaagatccaatggcatttttactgcccttatttagcaagcctatacagtacttcatgcacttggtcatgtcttcaactaatatttattgggtgtcttccctaagcaagatagtgcgagagagagagctgagttaaaacattcaagataacctcaagaagctgacaatctactaagggagataagacatacatattaataagaacaacttaaacacaaaggacaagatgatatgtggcatatcttatcaattaaataatgttggacttcagagggtgaaggaattaggcatgaaggtatatctcaacagggctgtgaatgactggaaacaaggtcttctctcttcacactgtgagccagccacatccatactacggtgacattcatttctcccccaggccagctatgggcagaagtttaattatccttgaacgtcttcaatgatcctcatctttgcccttgttccctctttatcctttctttctccccaatgtcttaaatcctgatgcagccagggagattttttttttttaaccttcaagaaggtaaaaaactatgccagggcaaaatgccagatcaatgttgctattaatataatcagatataaactttttccagttggcaccaacaaccctgggccttctctgagtaccacctataaacagggcttcaatttcccatttttgcatacttactaatgtactacagatcttgcactgactttaattcaatatcaatattaaagtcatatgaggtagtagtaaatagagatagccataccttagagtcaataagacataaaattagttatgttattattattattaattatgcataatatgtcattttcctgaagagaacagactaatagctgatttcagcaagcatctttaggcttttgttttcaaattattttacatctttttcttttcttttcttttcttttttttttttttttttttgacacagaggtctcactctgtcacccaggctggagtgccgtggtgtgatctcagctcactgcaacctccgcctcccaggttcaagcaattctcctgcctcagcctcccaagtagctgaaactacaggcatgtgctactacacacggctaatttttgtatttttggtagagacgtggtttcagcatgttggccaggatggtctcaaactcctggcctcaagtgatccgcctgcattggcctcccaaagagctgggattacaggcgtgagccactgtgcctggccacccacctattttccatctttagcactggccgttctcattcaaaatacgtactgctacactaagaggagacttaacttcaaattcactttgctccacggatgttgtatatgacctgaatagatgtaattctgacaagcttgtagttcattggaggctcacaatttgaaagaaatgcatgattaagactttagaacataaagaagattctagtaaaacaaatgattgcacccttttggattttttgcatattatctttatgtagggaagggaatgatatgttagaaagaatcctcaaacaggtttagacaaatcactggttgaaccataatctccaaaatatcgctacatcagaaaaagcccaacatagcctctgaggtattcgtcagaaatcccagtgcaagcattaggaaagaaatgtactccctgctcctcacctttgtaagtcagatttagtcttcactgttcatttcaggttctctgcctccataggggtcccttcagcacttgtttggttctctaattggcttatgatagtgggtcttacatcatcaactggattgtaaattccttcagaaagagatgtcaattaagtacacagcagagtcacagtatttcaaaattggaagtcatagtaagggggaaggagggccgctagatgctgtgattcacacggcgtcatagtaagcaagaggccgaggcagtgccagcacccaggtagggctccggtgccaccctctgcttcatcctctgccaagcctatcacgacggtcgttcagctcatgctctccatgcacgtctggtgatttgatgctcatctttgccagcttcagagcatcactggacacatgcccagtcttgaagggttaattttcaagtaccaagcatgctttggacaaactcaaatctgttccttgttttcgctcaacccgcaaccagcatcatcagcccagacgcagcttccccagaaggccagcaggtggagcacagttttgtggaacttctctagaactcgctgtttaaaagccgcaaaccaagacatgtgaggctgtggggtggggggcaaagaagagccccagattctgcacgtctggaagcttttaaaattgtcttacaacaattttagacctacaaaagccagcttttgaaattgcataaacggcaagtcgagttcttttttttttttttttttgagacctagtcttactctattgcccaggctggaatgcagtggcacgatcttagctcactgtagcctccacctcccaggttcaagctattcccctgcctcagcctcccgagtagctgagactacaggcgtgagccaccacgccaggttaatttttgtatttttagtagagacagtgtttcactatgttggccaggctggtcttgaactcctgaccttaagtgatccacctgcctctgcctcccaaagtgctttgattagaggcatgagccacggtgcctggccagcaagtcaaatttttaattagacttaaaatgttggtgctcataacaactacagttactgtggttttttttttttagtttcataaagaggacagacgctaaggcaattgtgtggaacagagcagcttctcggggtaaccatctcctgctgatgtataaatatcggggcaaaactgagtaagttttagaaaataaatgtcaaagcaagtccgagtcatttattccttagcaggaaatatcgatcctgtgacattatttgattataatgactgtttctattaggttaaatgactgaggtatacttaaccagtttaggtgaagaatgaggctcattgcaccatttgattgactaaaccttagaacccatgtattctttttatttgttcagtcaccaatttttatgaagcacctactgtgtgccaaacaccctcttgggtgccaaggtaagaattaaattttggaattaagcaaagcatgatggctcatccatgtagtcccagctactcagcagactgagacaggaggatcgcttgaacccaggagattgaggctgcagtgagctaagaacatgccactaccctccagcctggatgacagagacctcaactctaaaaaacaggttttttaaaattggaattaaacacacttgggttcaagttctacttcagctacttattagttgtgagaaaataaatgtcaaatgtttttcaatttgcataagttatttaaccacattatccttactttccttatcattaaaaccctgaaaaggttgtaagtgacaaaatacgtgatacacacttagtgcctgtcagatgataggcctgagttactgttaacttttttttttttttttaccatcctcatcatgttcctcattctcatcttcttccagggttctcacttgatgaaggaaagtatttaagacaatacttctttaacatacttaataatggaatggatatagaaatgggagaaatcagtgtgaaagcaggctttggtgaggccactatttaaaataactatagtttatttaaaggagacacgaagtaactgagatttcacaaggccccagacccccttctcgaatgttattatcaactcccgtttctgccctgtgatgtcatgagggttgatgatcggttcttcttttattttgttgccaagtacagcagggatatgtgtcctctctattcctgagtggtgaaagttctcttctgagaccacaaaacatggtggcctcaggttctttatggccccacggtctcttcctgcacccctccccaaggggctgggttggtagatattcctaatgttatatcccctgttgttgacacccccatgcccccaatcccgcatgcctagcagatgcaccttaacccaaccactctgggtcagttccttcctcacacagcaagctgctaagaaggttgaagaattactggacttcagataccacatggcaccattatccctggcaggtttcctgtcactgcctgtttctttttcttccaggaggctcatcaaacaggcctccacacaaacagaacatccatccacttcacaggccacccagacgtatccagagatgcccagatgagacctgatttgcctgggttaaccgtgtgtctgcagctcagaccctccaatggggcttctagctacatagtctaatgatgaaaagctactggcctgggatttaagagcacagctttctagcctaactccacaactgtgcccctgggaattttagtctcctctctgcatttcaacttcaccaactaaataagtaccttttaatatctaattgaattgatatgctatataagcaaaccagatgttgtgagtaaaaccagcttcagcatccaaaagttgatacagatacttttgaggagcatgtttcaacatattccttaggacagccttactatgagaaggtcatctctcagtgatttcaatgtgccattggaagaagagcttctgccatttaaatgtccagttaggcactggtggacacagcagtatccttcccattcattccgaccatattattttgaatcataaaggcatatccttagaggagaacatttaaaaaatttaataatgtatttgtttcattaacatgaagttaagactttaagataagggtagtgcccacaacacaatcttttaaaatgaagccaagttaacagtcattactctgtgatctcaggcatgcccattatctctctgagctataacttcctcatggatgatcactagtctcctgccgctgtgaacttttacaaatctgattccatagtacacatcttaagtgttagaaatgcttgttctttggtgctgtaaagaaatagaccttgaacataaatttaatttcctcagcaagaccatttttactttctgcagaaagggtacacttgccagcagttttgccacaagagtacacggaacaaaggagacagggtcattataacctgacgcgtccaccctactgctatgtccagtttccattggctggaatgggacctcacattctgtatttgtcccgaatggctagcagcttagaactttttaaaagcagcaaaagcagaagagaacaaaggaaggaggaagtaacttgtgaaatgctgagaaaggtaaaaaaccttcaaataaggaagaggaacaggctatgacctaatgcttgcttggaccagtataagcatgctagggtaaatatttaggctaaattgtgggagctaagaacataaagtacattgatttctttattacagctagcagatatttaagaatgttagcacaggtctttgaataaattttgcttctaagagaaagtactattaattcctaattagatggggaggaaaatctttgaagaggaacctctactttactttttacattaaggaaatagggtgtctagtaatgccctcaaaagttatgaatgcccggtatccgttaggtttgaactaactgatcttcacattactttaaaaatagagatgactcaattattggttggctgtgagtaaaaccaaataaagctttatttaaagttttatttagattcttgaaaaaattatttaacttgggttctccttggtatgattaatttagagagaaaggaatctgagaatgctgttgacctcatcattccttcacatgttccacttttttagtctctcattttaacttaatgaaggaaagtcatagggagaaaaaagagagagaaaagaagataaggctgtgaagagagagggttgttttaagacctcacgttgaacaatcagctaaatctgcattgaaagcaagagaaatagctcaaacacaggtttatagtattttctttctgagagtgaacattgtgcagtaaaaggtccttcacatgctatggttcatacactggcatttcatgaagcagtagggagcagagttaaccccaccaagagcactgcagtgcggccttccttcccagcccccgttccagcacctctttccatttcccgacttttctttcaccgccagtaaatttaatgtcttcagctgagcactgatttcatgagcgtaaaggacattagcagtacttcgcacatggtatgcacaaatattaggcaagtccaaggacaggatgagctgcaagcagtctatgataagagtcaaaggcaggagttggggttgtagactcctccagccaaccacagcaaccaggaatttggatgcttcggccgccagagtgcttgcaagagttcatctctgaaatcgcttccattccagcgctaacattttatgaaacctgtgcttttcaaacagattgttttattgcttcctgcatcaccaatgtgttttctctttgctcccagctccctgagagcattttgaattatagcacagatcattgccatccacaaggtgcatgacatcacagtggacttgggggaagcaatgtcaaatgagactgagtggaatgggaaggagataggctggaaaatttaaataaaggtctttaggataaaatacagaatccagaatagttcctaactctcactacgtagtcgtttgtagcaaactgctaggactcttggcttttattggtgtgatatagatgcgctgctccttaatggtagagactgtgtctttaatcaaaagttggctacagagttgtttgtgcctgtgatatacttattagtccagagcagatatattttctgtcgtgtgtgctgaggagcactgatgtaaatccacttaatgttcatatcaaactctattctccaggaaaaggtgagggactgaaatgtacatacttgttggctggtcacatttgatattcagagacccaaatgagaaagtcttgcttctgagaaagtacccaaacaccaggacatcttccaagccccacacagtagcattaatgttttaggtgtgcaataaatagtgctgaatgaaggaagaaagtttcccaggctagaaacaggtgagtggagacgtgattattattaatacaaaatctggtgtgaggtgggggtgggaccctctccccaggctgtaccgacagccccttgctctcagtcggactcccaggctgagatccggccactaaagagggaacagtgacatttcacaggaaatgacccagaaaactaacaacgtggagtgtgtgtgcgtgtgtgcgcgcgcgcgagtgcgcgtgcatgtgcgtatggtgcacatgtggtgggggctggggacagcttgaatacaacccagggaccttaactggaggaaagactttaccaggcagactctggtaaaagtcgagcaggaagctgagcgtgacaggaaccccaagggtgtcaaaatgccccctcactcagcatctcttgagtcccatcaggacagaacttgtgcttagtcaggttctggacctgacagatgtgaaccagacgccctctcattgctgggggctctgggagggaaaggtgggatgaagagggcacattcctcccaaaggacaaagcaccttttagtggaaaatgtgaaaacaaaacatgctcagttcaaacaaggctcactttggtccagtacttcctttgttatgttcctgcctcttaaatctttctgctttaaagaactctccaagaaaatattttcagagtatacttttcagaggccctgtggaagccaagaataaatggcctccttttttgggtaaagagtcatatgtttaagatagttttatttgctccccccacctcctgccccgcatgcacacacgttgatatggttaactatcttctgctctgaatcagtattaagaatgggcacagagatgactaaaagccagaatttaccatattatcccacaaagcagtaacttttcaattttaggatacataatttcagcatttttcctatcactagatgtttagagctccctccagtgtctctatattgtcatatttactttgagatttttttttttcccaaagatcctaagaattcttttaaccatagcagggagagtatgttattgtctttaagcttacttcaagaacagaacgtgaaagccagaaatatcacatgcagccccacaacctatagattgtccattcctgctgtctgtgctttttttcaggatgaggagagttttggaggtagaagaagatgaagtggtcagaggatgggactcaggaggggacagggtaataaatatggtatgaaagttgctgcatttaaagagcttagggccgggcgccatggctcacgcctgtaatcctagcacttttggaggccaaggtgtgaggatcacttgagctcaagagttcgagaccagcctggccaatgtggcgaaaccccatctctactaaaaatacaaaaattagtcaggtgtattggcatgcatctgtagtcccaactacttaaggggctgaagcaggagaattgcttgaacccagaaggtcaaggctgaagtgagctgagattacaccactgcactccaacctgagtgacaaagtgagaccctgtcttaaaaaatttttttttaaagagcttgaataacttcctcttcttagaaaacgcataaactctgatgtgtcagctgagaagccgaggacctgggatttcaacctcttgcccgtgtgtttgtgattctggcgtgaaggtgatgatgcatttccaaagttgaacttggtctgctaggtttgggatgtggcagaattctggttcctgccagagtcccagtctttctgagtgtatgtgtgtgtacatgtgtgtgcatgtgtgacgtatgtatttatatccatacatacatacacgtgcacatctacatgtgtatgtatatataatcaagatgttcaaaattcaaagcgctgttttaagagagttaaaaaaaattcactatctacagatttgaattcagactgggttaaaaccaccttcctcctctggttgtcaagaggaaggttttggagttcgtgaattttttctgtggagttaagataacgtttgatgtaggagagcaaagctgcttcccatgcctaattccataaaaagcccagaacctctgaggcccatcttcagccaagcagccttgccctctggccttttctgcaacagtgagacaacagccctgggcacagcgggagttggttctgacaccagatgttctctgctcctggttaatgtcagtgagggctggaagttgaataaatgagaacaggagtggtctgggcccatgtaaatgatcctcccttgaaaggaggaacagctttcatcatttgttccagctaagccttgcatgcattatagatctggtgctaagcagtgggaaagatctcataagtaatgttttatgttctttctgtctctcctcttctgttgttcttggcttgtgggttgtgttcgtgttgttaactggaaaattgctataagccagttgtctcgtaagttttaaaaacgaattagaaaaaccataaaatcctctggcctatgcacattgtccctgttttgtgaaaacattaaagggtaaataaaaaggaaggagaacagtcaataatgtgcatcaaatatattctgagttctagagaaattaatgaccaagcattagaactagaagcaaaaaaaaaaaaaaaaaaaaaaaaaaaaaaaaaaaaaactgtcagtggttggcgagaagtcttgttttttccagccatatagatcaactgatgatatggtttggctgtgtccctgcccagatttcatcttgacctcccatgtgtgtgggagggacctggtgggaggtattgaatcatggggggcaggtctttcccatgctgttctcgtggtaatggataagtctcacgagatctgatggttttaaaaagaggcattcccctgcataagctctctctcattttttgcctgccaccatccatgtaagatgtgacttgctcctccttgccttccaccatgattgagaggcttcctcagccatgtggaactgtaagtccaattaaacctctttcttttgtaaattgctcagtctcgggtatgtctttatcaacagcataaaaatggactaatacgactggtggttgagaaaatgtagcagcctgagatttaagaaacaagtgatccctgagacagagcccttgaccctaaaggggaaaaatattcagttacactcatgagatataaacatagtacttttgttgtaactgctgagaactgaagagctaaaagtcaacattattttcctttttgagactcaaagtgtgtccaccaggagcactcttcccaatggaggcaaaatctgccaaagttgtttttgttgctgtctaaccttagaccatttcatctgccccaactaaaagtcctagccacagctctctcaagcgattctccaccctcagcctctgagtagctgggactgcaggcacatgtaccacacccagctattttttttaaatttttaaattatgttttttagagtcaagggtctcaccttgtttctccggctgatcttgacctcctggtgtcaagtgatcctcctgcctcagcttcccaaaacaccaggattacaggtgtgagcctggtcccccaggcttgacttggcacattgaatcttttatgaagaacaattaatgacttcccatgttgtgtaaagagacgggcaaatgtggcttcaaagcaagtcttgccaaccctcgctacaaccagactgtccctggcctaagcaagcccctcccatgtagacctggaaagccacttccaggtttcaaggatgagttttagaaaattaatggggtactagcatatgtgggtcaactctttattttaatgtaaggacactggacactttaaaataagttttctaatctttttaaaaaggaagggatattttaacatccccaaagtgaaaataatataatatcagagtaagtcctagaaatttaatattatggtacatttactatgttgtctttatttttcttcatttccacggattggccctggttctcagaccagcatgtgggaactactgggttggagtgttagccaataaaaatggccaaaaagtagaccatgaccttctttgagcttttctctggcttgtaattcccgaagctccttctagtgccaaaatacttctccctccctccctcttttagactgtaagctcattgagaacaaggacaatatggtaatcttaatatctttagcacacagtcagatatgaaagagacacatcataaatattggattaacaaatgaatgttctgaaggggaatgtggttgttgccactgtagaaaaggttcaggaaccaggaattcttgtgtaagatgtcatccacatagtcactggagaattccacagttgggttgagggcaaataggaatgccatgatccaggtacctagaactggcttgaaaacttgtaccttgcaacaataaatggaagccaatggccatgtggtctggccatggccacgtggtcagaagagaaggaattttcgaatgaggatagaggaagtagccacggagccctgaacaggggcttgggaggttgagctctctccacctcagagggctgtaggagaaacagggctgtctgcagggagccaaggttacagtctgggttggagagaatgttctgaggaaaggctgaagcaagaagagagctactttttactagattactgtgtattcagagggcagagtggaaataattaatactgagtgaatagaaggacagacagacctaaggataggtgagagaggtctgtctggtgcttctgaaagtttcaagtgtctaggaagcccccagcgttctagtggaaatgcacattctggttctgtcagtctgggtgggacctgagattctgcatttcccacatgctccctagtgatgctgatgctgctgggctgtgggccatggtgaggctagcgtttaggtcaaggaaacaagcatcttcagaggatgtcctccaggagcccaggcaacagttagaaggtcaatggaaaattctctggctgcagctgatcttttctgcttccctttagagcagggaatctcaacagcactgttgacatttggggcccagatcatcctatttggggaagcagggagatggagggggtggaggtgtcccgtgcattgggagaaatttagcagcattcctggcctctatgcgctggatgctggtagcacccggcagttgtgacaatcaaaaatgtcctcagacacttccaggtgtcccttgcagagcaaaattgcttccggttgagagccagagggttagaaggagaattatgtgtcttccctccccgcttgctgccacctccacctcttgtcttctagaaccatgaggcagaaatgacttaagtctgatatgcttggaacgcaacactcttttcgctatttctgtctttagaaatgttgagaaagtgtttgcctttatttgacggcctgattactttaaggtgtcctcggcatagaccagtgagcgccttggccctatttgctgacagttttaatagaacagcagggaaagtcctttccaagaaagtgttggctacgtagcctaacgtcattttaagtcatcaccatacacccaccaaacctctgagataaaatggaaactccatcatctcttgccagggtaatggtgttagtaattcactagtgacctctaagaatttctctgtgcattcactgccacatttaacttttgttacacggcctccaaaatgttttccagccacaaggtcagtccattgacaatctcaaaaatcctgacaaggggacagatgggtttagtttttgcctttgtgatggttagttctgcttaatgtgttgagaaaacatctgaaggttttaaccctggctggagtcgtgagacggaggcatgtttaatggaatagcacacgatcgtcctctcatggtgagtccacgttggagggcccaaagacccatgttgtacaatcggttcaactttttctgaaagccaaagaaaacctacctccaaacaggatttagtctcaagctagagcaaaaatgtacatcatgttgaaaagtcttctccaagtgctacaattcataagcagtgttgtgtttttactggaaaagcttgccatctagccaagcattcttcacatttttcccaggatttagtcataaaatcattttagacatattgcaaggataaaatgtgtacatatctgataaaaggcagggatttttttcttcttttttgctgtataactcctggaggaggcgaaaaacaaactagacacacacatacacactcacaaaacacacgtatttgtgcatatgtatgtgtatatagagagtgcacacatgttcatatatatacgtgtatatgtgtatgtatatagtttgttttccccctcatgaaatgtgtgtgtgtgtaaaataaactctatacacatatacatatatattattttcaccattaagtgcaagaacttggattctttattcacgattacttctatttgaatttaaattagatgccttaggcttctctttgggtttgaataacttagacacaaagtataaaacacttcctaatgatgcccacctgcctaggacatctttaggaattcaggtggaagtgtgtttgcatttgatttatctaagacgttgcagcagtggggatgtaatttctgcctttgggcaggaagggagcttagatggtggagttcgtatttgtaaacgtagatgtgggtgcctcaaagttggctgcgttgctaactaaaggaaggagagaagtgagcccagatgttgaccttttgaaaaaaaagtcccattttcatgacagattggcataaaagcaataacctgtggtaaagtctaaagaatacaagatttggatttctggatttgagtcctgtctatgcaacttactagatatgtggccttggacagatcacctaatctcacctgtcaaacagggacaatgaaactcaacatagcaatggttgcgaggagttaatgaggtaatccgtcaaattctgtggccgtggtgaaggatgatacaaatatccagtggcgtttttgttcttgaagatagtattcttgtgtgagttcttgccaacacacatacaattacatttctgagtcagactgatttcagtagcagataaacagagggagtaaatcagcaatagattagttggaaactctggacagcaatgatttggtggcatatggcttggtggtatgtacctgcacatgtaatcatggaaagttgactattcctactgttctcccctagttctatttcacttaagaaaaagttggaatggataccagcagtgtgctgataaaagtttagctactactggcggccgggcacagtggcactttgagaggctgaggcaggcagatcacctgaggtcaggagtttgagaccagcctggccaacatagtgaaaccccatctctactaaaaatataaatactagccgggcatggtggtgggcacctgtaattccagctactcgggaggctgaagcaggagaatcacttggaggtggaggttgcagtgagccaagatcgtgccattgcactccagcctggatgacagaacgagacttcatctcaaaaaaacaaaaaacaaaaaaacaaaaaacaaaacaaaaagtttagctactggctcgggaataacaggacgtttgatttgtagcatttactgatttctgtaatataaatactctcactgtgactaatttcaaactaccaatgtgacattaccaaccatgagattgtaaagagatgcacagtagcacaccaccatataggacagtcgtgcatcacttaataatgggaatgcattctgagaaatgcatccttacatcgtccttctgcaaatatcataaagtgtgttcacccaagcctagatggtacagcctgctacacatctaagctatataatgcagcctgttgctcctaggatacaaacttggacatagggttacgattgcctacagcactcagcaccttactgtactgaatactgtaggcacttgtaacacaatgttcctaaacatagtttttgtgcatctagacatagaataggtacagtaaaaatgaagtagaaaagattttaaaagggcacacctatatagggcacttaccatgaatggagcttgcaggactggaagttgctctgggtgagtcagtgagtgggtggtgagtgaatgtgaaggcctaggacatcactgtatcactgtaccccactgtagactttataaggactgtacacttaggctacactaagtttgttttttaaattgttctttctttgataataaattaaccacgctcagcttacttttttactttataaactttttaatttttaaaaactttttgataactttcataatagcactcagtttaaaatacaaacacattttacagctgtacaagaatattttctttctttatatctttattctataagcttgtttttgtagaaactaagtctcactatgttgcccaggctggtttcgcgcacccgggctcaagccatcctcctgcctcagcctcccaaaatgctgggattacaggtgtacaccaccacatccagtttataagctttttcttattaaaaaaagttttttttttttaagttttctgttaaaaactaagacacaaacacatacattagcctagccccacacagggtcatgatggtcagtatcactgtcttctacctccttatcttttccatctgtaaggtcttcagaggcaataccatgaatggagccatcatctgcgatgataacaatgccttcttcttgaacacctccagagggacctgcctgaggctgtttacagttaattggcttttttttttttttttttttttttttgagacggagtctcgctctgtcaccaggctggagtgcagtggcacaatctcagctcactgcaacctccgactccctggttcaagtgattcttctgcctcagccacccgaagagctgagattacaggcacgtgccactatgcccagctaatttttgtatttttagtagagatgggtttcaccatgttggccaggatggtctcgatctcctgacctcgtgatctgcccaccttggcctcccaaagtgctgggattacaggcatgagccactgcgcccggcctacagttaatttcttataggtagaaagagtccactctcaaataacaataaaaagtatagtatcgtaaatacacaaaccagtaacatagtcatttattttcactatcaactattatgtactgtgcgtaattgcatgtgctatacttttataggactggcactgcaggacgtttatatataccagcatcaccacaaacatatgagtaatgtattacactattacattggacagctacagcatcagtaggcagtagaaaattttcagctccattataatcttatgtgaccgctgtcacatatgcaatccgcggctgacccaaatgttgttatgtggtgcatgactttatatccactatacaagtagatgtaattaacctcagtcatacagataatagtaaaatagagtaaaatgagggatgatgatgagtttttgtttttgttcttgtttttttttttttttttttttgagacggagtttcgctcttgttggccaggctggaatgcaatggcgcaatcttggctcaccgcaacctccacctcccgggttcaagtgattctcctgcctcagcctcctgagtagtgtgattacaggcatgagccaccatgcccagctaattttgtatttttagtagagacgggatttctccatgttggtccgactggtctcgaactccccgatctcgggtgatccgcctcgcctcaggagtttttaatataatttattaaaccataagtttatataagttaatttttaacattggctatgttgaacgcttggctgtcaagcttaactgttagctctcacagacctggctccaacatgctactgtttctccttggctgtgttacagtacaaagttataccatgaattagcaagttcaggaccatcctggaaagccagcgtggaaaatgcagtcataaatggatttttatttctgtggactttggactggctgtctactcttggtctcacattctctactgcatatctctttggctaagaaaattagtattgaaaaatggtttatggatctagttattggagctagtattcaactttttagttacttaaaagataggacttaaacagagctgaattttatagggtcttttattttcttctttggtccttaagagaagactgcagaaaactagacaagaggaatttgaatgttctcataacaaagaactgataaaggtttgaagtgaaaaatatgctaattaccgtgaattgatcattacacaatatatacatgtattgaaacatcatactctagcccataaatataagaaattatcagatgtcaattaacaatggaataaaatgaaattaaattttaaaatgaaaacattctagaaaatattcccaagaagagatttatttatttatttttctggctatctatccttaagggttcgggaaaaaatggccggtggagaacaaaagattgaaattttagctcattcatgatgcacgtgaccgggaaggagtgttaagatgtcctgtacttccttccataatcacaggttgaggtgagggttgcctaaagtctgatcagccacattttgacagtggagactcagaggcctagttaggaacacagaaggaaaaatgttaaaggcagacctttataaccaaaacaatcaacaggtctaaaagccaaagaaaccagtatttcagaattgttaacttactcctagatgtgtgttaggcatcgggcttatcttaaagaagtgtcttagaccacagaaacatagacccatgatatttggaccaagcataggttaaaactaggggagggaggcacgaattacaaaaaaaaaaaaaaaaaggtgattccatgttagaatcccatgttgaaaaggtattacactttattgtaatacagacaagatttcactgtgttggccagactggtcttgaactcctgacctcgtgatcctcccaccttggcctcccaaagtgctgggattacaggtgtgagccactgcgtctggcctaaaaagcatattttaaaattagtcacatatggaagctaagtagtgcattttgtgtttccgaacaggacttaaaacgtcagtgccataaacactggtatgtattcagacacactggtcatatgtcatgaatttggtagacatatttgtaggcaaataatgtagagatagagtcacatattttaaactaaacaactcactatgaaccatcatgatggttcacacctacaattccaacactttggaaggccaaggtaggaagatcacttgaggtcaggaattcaagaccggcctgggcaaaaaagcaaaactcctctctacaaaaaaatttaaaaattagccgggtatggttgtacatctctgtagtcttagctactcaggaggctgatgtgggaggattgcttgagcccaggagtttgaggctgcagtgagctatggatgtaacccagaaagaccctgtctctaaaaaaaataaatatatacaataaaataaaaataaattaaaaatttaaaaagccactgtgattcttctctgtgatcattcgtaagtcatacactattttgtgtgggtgaaacatgtgatctgttagtgggtctgagaaaatcatatttattaagcaaaaaagtcaatatgtgcttgtgttttgcttatgaatttactcgaataaaatgtctgaaggtcttgaaacttcttaaaagaaaatggttcttacttcattttggtgtgtttacattaaggggagccatgtgacctcttatgagagttactgtcaaatttcaagtgcatgggcattgcctggaggacttgttcaaacacagattgctggaaagcccaagaatttgcatttgtaacaagtttacaggtgatcatgatgccgctttccctgggtgactcactttgagaaccactgtcttgtgagtttagagataaagaatggttgaggtcgtgtgcgatggctcatgcctctagtcctagcactttgggaggccaaagcgggtggatcacctgaggtcaggagttcgagaccagcctgcctaacatgatgaaaccctgtctctactaaaaatacaaaaattagccaggtgtggtggcgggcgcctgtaatcccagctactcaggaggctgaggcaggagaatcgcttgaacctagaaggcggaggttgcagggagccaagattacaccgcttcactccaacctgggctatagagcaaaactccatctcaaaaaaaaaaaagaatgggttggaaaaaatgtctgcacatcagtaagcacaaaataaccattgataaatagcattacaagcatccaggatcctaacaggaggggagaaaatcaggccactttagaaacacttttatgactggcagttatccagtttgctactaaggtcaggtctaaaagattgttaagactagcctgtttctgtatccatgggtatcagctggggaagccaagttctgtctttgtgcttggcagccctccccaatgccatgtctctgctgatgacattggaatttcctccaaattaaacagcctgacagcagccatctgtaaagaaggcagcaaggttacgagtgatcactggctagtgccatttctgctgccaaccaggcaggcaaagcttctggcatgttcttgaccacctctgagaagagttgatgtttcctttggggtatcatagagtttctgccacccagctctgtttctctgcctcctggtgcctgcccctaattattgcatagttgtcactgatcctggtaacctgactgctggatttttgctccagaaacctacagtaaaggagaccgtaggccaccagaagccaggaggaaacatcaggctgcagtcaagggcactgccttctcccctccaggctgctgggctttgagggcagagaaataaaaagactgaaagggattagaggcctggagtccacaacaaagccctgtagtcatccaccaccttgcacagcctcttcctgccatgcttacaggtgaaaagtctagttcataggacacattgcttttccagaaccttccgctgccttccagagccagcattcttcctgaaaactctctcttgccagttgtttgccttcagagttacagtttaaaaaccaacacttaaactgatatcctctgaagaaaaaaacagataacaaattcatgaatcatagttatacttaaatttcctccgtcacagagaaacatgttatttttagaaagtggatcccaaacctaactgatcagaatcccttgggggaaatgtttttaaaaaataccattacctgtgcactggcccagaaaatccagggccattagagactgcaaatgtctgagaatctgtgtttcctaaaaggcacaatggtgattctgatgggcagccatgtttgagaacctctgattgaattgtgcacaattttgatggtgctgctgttgcattataggtaattcaaagaagagcttcttttttttaaaaaaaaatagtaatctataaatataatagttttcatctgaatagtgttttcttgttttcagaagaccttcataactttttttttttttttttttttttgagatggagtcttgctgtgtcacccaggctggagtgcagtgacgcaatctcggctcactgcaacctccgcctcccaggttcatgtgattctcctgcctcagcctcctgattagctgggattacagacgtgtgctcctacgcccagctaattttttatatttttagtagagatggggtttatccatgttgtccaggctgatctcaaactcccaacctcagatggttcacctgcctcggcctcccaaagtggtgggattacaggcgtgagccaccacgcctggccataactattatctttgacaattttcctgggaggtggatgacaggacctgttactgacgccagtttacatctgagatgctgcagtggagaggaattggaactagaaccgacacttacggcttcttgtctggtgtactctctgctgttccatcttcattgcttgtgtgcatgcgtgtgtgtgtgtgtgtgtgtgtgtgtgatgtgtttatttgactccttgaatctatgttgtcttgtttttcgtaaatggattaacgccactaccacggatcatcagggagatatgacgctagagatagataagccaaatggaggtagaaaatccaaactgaaaacagggagagaagctaagatagacccaaggagtctaacaacccaagttctaaactagagagaaggccactgttcatctatttcagggatgggcagttatggaaatagtatgaactcaggcatcccaaaggcagtgcagtgtatgagagaaagatgcttgcatgcatactcccagcaaagctctcagtggggcccaagatgcagggcatggagggtaataaagattagccaggaaggtgataggacaacagatactgaaaacatggcaatgaaaaaacatcagcattcagaggtgagaattaccattgccagaagttcttgggaagtaaaacaagtacagagctatgggtcaaggatctcacagttagagtactagtagcagtagggtggacttgagtctgtagtttgggaccagctgctaacttaaagcctgggaagctcgtgttagccagacattacagatactttttatgtcaccttgaacaagcttcactatccttatatttaaaataaggagtaggcctattaataatctgtatgtatttcttgcagtaaggaaatctaattttgggaaatgaatagcaagaacatagcttggtgcagtgagtcagtgagaggatttacaaaaggtgaacgtacacaggactcttaatactgatcctgggctagtcatgtcattgcacatgacacctgctgttggaaggaacaggttaagcatttagttgtgtgcaatgaacctgtgagccctgtgggctggtcccacttatttgaaatagaacgattgcagtgcctatgtgagtcagggtacacctgaatgtttagttagtgctttccattaacccttttcaattttgcttctatgttttcttttcctccagaaggaaaatgagcagaaggtgtgtcacatgctcgctttttatctgctgcgtagttcttgtagtgaaaggattgtcgataagttcagaaaccaagactactgctgcctccccttcattcattcagtagtcttacagcctaaagaagacaagaaaattaaggactctcaaggcaaaaggaagtcaaatgaaattgggaagtgggtctacagtaaatgcaatatctgtcgctttcttttagaactgcataaaccacatggaaattttccgtgtatatttgctaccaagggatgctatcatctttttctttccttttttttttttctttttttttggagatggagtctcgctctgtcactcaggctggagtgcagtggcgccatctccactcactacaacctccgcctcccgggttcaagcgattctcctgcctcagcctcccgagtagctgagatgacaggcgcgtgccaccacgcccggctaatttttgtacttttagtacagacgaggtttcaccatgttggtcaggctggtctctcgaactcctcacctcgtgatctgcccgccttggcctcccaaagtgctgggattacaggcgtgagccaccacgccgggccactatcatctttttaatttaggcacatagtgctcaggaaaagacaaggatgatggatggtaattaagtaaatgaagacagcattggtcaggagggcagtataaacaaagtaaaatagaaagtctcttgttctattttttttaaataatgataattatatatttcttacagtcatatccagagcttacttgaatctaaagcagtatttatctttgcagcaagcctatgaattagctttacagactgtaggatgcagagacccttggattagaaaagttcagtaacccatgagcagaggcatgagaatgttaaaacaagtcactaaaggtcacatagcattccactagctgggctgtggttagcactcatgacctcctggggtctcatcttttctgaatcttattgaatcatgccagctttctgatatggtccataaaatgctgatagaaatcacatgtgaagttcccaactgtgaggacagcagacttcctttagaagataaatactagacctaatctaatacactttatttgacgtagcagaatttctcctgcatccttatttcaaaagcatacctgcctgtggtcttcccgggtcttaggagagtccatatgtctgatggaagcagacaatctagtgctactcagagaaaccaccacttgatcctcagtttttttgaggaatttcatgtgtttttatgtgaagaatcactctcaggaaagttctgtattttggtagcagagatcctgtcaagaaggcagtgagatagatacacataataagctgttcatcattactgctgatggaactcttcccaggcctgcagctgacagcattgcatgggacctgcagcccctttcaccgtgactgcagattctttggttaagagactgtcagtggtcaaggctctgccccggcttctcgggatcttcacactcccctgtgcatagtaggctttgggttattggccatcatgaaaaccaagattgtcgtttaatgatcacatctatggacttggggtcggaggaacctggattcacatcttggctcctccactgactggtaagttgcttagattagttgcttttttcctctctggctgaatttatgcaattgggagttttaaaaagtatccactaaattcattgttgttgttgttaagatttagttgtgtattgtacactacctggcatgtagtggatgtttggtcaatggtaactattaaaattattgcagatatcctcaggtattatatttttgacaggagatatctgatagcctgattcgatattttatgtggaaggaagaattaaatacagaagaaccctaagacaatgctatctgttctagagagtgtttcgttaaagttgcagtgtttcataacgaagcaggcaggacggccctctgctatgcagagctctcccgctcatgacaacacaacaagcactcccggttcatccctacctactcatcccaacaatgtttccaagttgttttaaggattcagaatggccccactccttttcagatgtccctgggagggtaacccctgccttgtttgagaatcacgagcaagcatagtctgagtttgacttctgtacccaagtagcagggcaccacctccctctcagtggctgatggagaggtcttccacagtgaactttcagtgaagaagttcatgtctctctacattatctgttttactcagcattcagagatatgtggtgcctccacaggggccatatccaggctttctgatgaccctatagggagcaatggcaatttaatgaggaggggaaaagatcagcttaacctagcttctacttcatccgggttctcatggttagttgagagtgctgatccgtgaccaccattgagtcattgatctcccgctcttcctagtcaatctgtcattcagagatttgcttgatcccttgtgccagatgcatgtatttaacaagctaacatgcactaagcatctgctatgtgtcaggtactattagacgcatcatactacaatgactaagacacagtccttgtcctcaaagaaatagtagccctgggagtaaaaatgatataggggaggctgggcacggtagttcacgcctgtaatcctagcactttgggaggctgaggcaggcagattgcttgagcccaggagtttgagaccagcctgggcaacatagtgaaaccccgtctcctttaaaaataatcaaaatatttttaaaaagtgatttgaaggagtaacatcctgttcatgttcagaggcattcagcctatgagcccaaggagttacgctcatttctctctatgtacatcttttagtcctaatatgcgtttcttcatttcttttatttttgttaccattatactctttacacaaggtccttcaccagagacctgttatcagtgtcagagacccagccctggtggccttgtgcagcagatcagaataactcaaggagctcccacatttgctctcctgactttctagaggcacacgatatccacatatgttaatgtattggttttatcataggtttctccttgcatttctttcatgtaaaagtgttaagagttcagtctgatctgaaagcaaaagtttaagttctcagcataactattcttacaatcttgtgcctttgcaaatatgttaaaatgttctcagccccctccagtcctgaactccccatttttttatggttaacgcgctgtcaccactacccagcagactacaaagcagcagcaagtgcaatgcagagaacgcgatgtagatcttgttcaaagcagctgacatgttgtcatctcaggaagggcagaatggcaaggaggagtgattgatggaaacttgatggagcaaccttcacttaattatttttgcatagattcctgaattgtggcttctttgctggaaaaaataataatgatcctgtaatgcagactgctttagaggctggaatgtgtcatcgtatgtgaggattaccacttgctcttttagaaccccaagcatctatctctacctagaaattttttatcgtgaagactaatagccttaagggtgaaggagaggacagagaccctaacccagagtaagataggaatgattaggaatgattgttggtgataatcagatgaacacactgtagccctgtatcaggagagaaaatgtgtttgagattagcacgttatcagaaaaatgtttgcacttatcttattctttgaataagttgcaagctatttctcttctttcacaaaggcaaagtagtaagccaaacctgtaatcagaaaaatattgatatgttagatagagaaagttatttttgtgtgtttgtttcagttgttgaatcaactggtatgtatcgagtacctactgcatgtagggggattgtagagaactttcagcgtcaagttagagattttaaactttatcctagaagtaaaacgagaaattaaggcactgagttagaaaggagctagaccatgatttctcccatatctcttgtgcaaatggcactagccaagccagaagcccctatgctgttcctccatgtgcccctgcccagccattcagcagccttggtgctgagtctgcctgggacatctcccctgtccgcctcctcttctccatgcttactgcccctgcagcaggccaaacctgatgacagctcagtggcattgcagcaagttcctcccgactgtttgccttgcctgtagaacctggtcccttctcatccatcttctactctatgaccagagtgacatttttaatcaaaaaatgttcctgcctaacccttctgagattctccataccttcaagagatatcttggggagagaagggcactcgttacctccttcctcccctcctggcatgccatacttgtgcttccctgaatgtggcatgtccccttatgtgactctgcatgagctccctcctctgtctagacaatgttccctctcacatcacatgcagtcacacattcctgtgtactcttcaaaactcaaccctgccatcagctccaaggagcccaccctaacttttccctcctggtctcactgagccactctgtgcttcccacccatgaaactcatatgtaagatttttagtgtctgttctcttgaccatctctgcacactggatacagatgtattagtctcttctcacattgctatgagaactacctgagactggataatgtgtaaagaaaagaggtttaattggctcatgtttccacaggctgtacaggaaacatggctggggaggcctcaggaaacttacaatcatggcagaaggagaaggggaagccagcacgtcctacgtggctggagcaggaggaagggaaaggggaggtgctacacacttttaaacaaccagatctcatgagaactcactatcatgagaacagagagggagaaatctaagcccgtgatccagtcatctcccaccaggcccttcctccaaacactggggattacaatttgacatgagatttgggtggggacacaaatgccaaccatatcaatggagctccttgagaacaggaactgtgtcttttagatcttctgttttatatgtctgatgcatagtaggcagttggtgatcactcatttggtgaatgaagtgttaggctgaactgaagtgggaatgaatatgaagagataccacacacctgcattccttgctatctgtgccatttgttccatctcatatctcatggtcacaccagtctgagcaaggtcagatactctttttagagaaccttctgtggccttattccatgttcagttgtttaatcacgattacctttatttttgtattggtccatgtcctgagtattttttaaagcattgactgttgtggatccatggagaagtcagagaaaacagatgaagctctctgataggaaaaaggattgaataatcttgccatccaaactgtggtatcaaaatatgactatatatgttgcaatcaggtgcatgcgtttcttggctttcctggatgtgcaaaatagaattcaagacagggtacagagagaacacattctacataccccacataaccttggcatgactgtttggaccttgctggtaagaagtggcattggctagtcttttgttcacaggctggcaaggttgctcctgattttctctttacacggataattcctttactgaccaaatctcatgagagcaaagtgaagtatcctgtagctggcactacattcatgaccttttctatgacaggttaatcatttctttgtgtgttcactcactgacctttacttcattggccaaaggagtgccccatgtcaaagtaatgtcctcgttcctccattccatcatccctttggggcagaaaagatgctgtcttacccgtttttgtccccagactagctgggtgcctggtgtgtagatgttaaatgaataaattgtttaggcaaagccgttagtagcatgatctaatgaccacaaacagaaaagtgtgtgtggtggggaagggcaacttatattttaagaattgtgttttaataagtggtgaattatttcagtataaatccagtattatcattaataatagataaatatattgagcatttaccataagcaccatattctatcgcctctcccattacgtgaaagactaagttttatagtttgaaaagaaggaaaataggaaatatataactacatttaatattatagcataaagggctcaagtggaatgatgctggtatgacagagtattcccaacagtcctcccagttctttttacattaatataaaatgttccatgaattaaagaaaaatatagcaagtcataaacatttacaattctctttcctcaccatctaaggaggacaagttctgtgcttatttagcttgctattccttgtgaggtcagaaaggtcaatgattaaacttagattaggccaaattcctccttaagagaagatatggtgcggggtagggagtggggaacataagaacagccattatagggacctgtaagagaggagggcgagatgggaggaagagcaatcgtcctgggaaaagggaacttgggacagagaggagtaacaaggctttcagggagtctttctgagcatggtgccatgctccctactccccacttccaccctccccactccccccctcccattcacctctgccatccaggccttcccaggaacacttggccaagacttgcaagtttatttattttttttttagctcatcagctgtcattagtgatagtgtcttttatgtgcagcccaagacaatttttctccttccagtgtggcccagggaagccaaaagattggacacccctgctctagatgtgagtcttggatgaccacccttcactctacctaggctacagtaacagacgttgaaagtcagcatcttcattgttatggaggaatggaaatgggataaactattttaaaacaattttggatttaaaaaaatagtttaaatattcctgttctctcaccccacccacccctaacttctttgcattattaattttcttagctaatcttatttctaaaaaagcaaaaccttccaagggaattctttttcttttctttagggagagagtctcactcttgtcacccaggctggagagcactggcacgatcatagctcactgcatcctcaaacttctgggcccaagtgatgcttccacctcagcctcccaagttgctgggactataagtgcacaccaccgtacctgggtatttttttttttttttgagatggaatctcgctctgttgcccaggctggagtgcagtagtgtgatcccagctcactgcaagctccgcctcccaggttcacaccattctcctgcctggctatttttttaagcttcttgtatagatggggtcttgctatgttgcccaggctggtcttaaactcctggcctcaagggatcctcctgccttggcctcccaaagtgctgagattagagccataagccaccaggcctggcccaaatgaattattaatttgttttgggtagaattactaatagccaattactagttagtggaacttcaatttgggatgtttttatctatttgaataaactttcattctgtataactccatgtctaaatctataaatgtagacatacatcagtatagaaacgtcagtggctcttagattgggtactttaataataactctccatgactgaccactggggacttctcaaggagcaggagaagtatctaccaaacgtagatacctgagaaatagtggagtctgctgtaatgttcactgtggataacctgactggcagagttgtcccttctggaagagaggcagctcaggtcactgtgtaaggcacctgtcttaacttgcaatgggaattttgcagtcaggtgaggggcacaatatatgtgaagaggaagtgaatgttgttgatagcatcacatcataattaaattccagccactggatgatgaagtcattccttcacacacaaacggcattatatgcctgtaatatttttccagggctgccattacaaagtgccagaaactgggtgacttaacagacattgagtgtctcacagctggggggcctggaagtcagagatcaaggtgtgggcagggccatgctccctgtgaagatgctcgggaaggatctgttccaggtcactccctagcttctggtggctccttagcatgtggctctgtcactccagtcctcacagagcactctgcctgtgtgcctgagtccacatttccccctttttttttcatgatggagtcttgctctgtcacccaggctggggtgcagtggtgcgatctcacttactgcaacctctgcctcccaggttcaagagattctcctccctcattctcccgagtagctggaattataggcgcccgccaccacgccaggctaatttttgtaatagtagagacagggtttcaccatgttggctagactggtctcgaactcctgacctcatgatccgcctgcctcgacctcccaaagtgctgggattacaggcgtgagccaccgcgcccagcccacatttccccttttcacaaggacaccagttctgtcagattaggaacccctctcctccaggatgacctcatcttaactaattatatctgcaacaaccctatttccaagtaagttcacattcagaggtattaggggtcaggatgtcaatatataaatttggagggacagaattcagcccataacaatgcctgccagtggtagttttttgggggtcagggtgagtctagtatctgcattttcaacagcatgcctttttggggagatgagtgtcaagcattcactgatttgaggtaacggggccctcttgagtctgtgatgtaatctcacactcccctaagagctatttatggcctacaagcctgtgcacatttgaatgcgcgtgtgcagaaaagacaatgagccagacaggcttctacacccacttaagagcactcacatggatcagtcacccaccctgaatgccacgttagttttgacatctgaaatgtgtctggcattttcaggcagagaaggcttttaaaaaaaaaaaaaagtcacatggatgccagttccttactatctccctaaaagagcctaaacacagaaatccagacacaggaactcacaagaatattagataataaatagccaagcttctgaagaggcctggaaccagagaatgatatttaagggttattaagcttaattttttgcactgtggtctgcctggcatatagtagacactcactgaaagtttgtgaacagatgactaggagagtctctgttccgtgggtatgaatcttaaagatgcatgtattcagccccttctcctggcttctgttctaagcagagggaatctgatgccttgtttctgcgcatctgtgatctgggcagattacagatgtcacaagccagtgatgtacacctggattgcatcctgaccaaaatcagggaagtacccgctggcatgttgaggacctcctttgaagaaaatcctgtggctaaaccaattcattgcccttgggagagaaacattctatagcctgctgggtggatgtgtacagtccatgtggacccacctaagtttcctattttgttccttctttcttgttttcctttccttcctcttttcttactttttaagccacttattgagtttatcctttcaaaactcatcttgaggatatgttcaaaaatgacccatctagagcttcctgtacacttctttgcagagtgagttgctgctgacttatttctccttccagcgtcttgctgatgcctctgtagagtcatttattacctgcgtaagagtgacctctacacgtgcctggttcccaacaagacatggagtctcaactgaattttactcatctctgtttccctaatacctagtgcagtacctggttagcacttcctggatgttcagtgtatggttattgaatgaatgaatgaataagctgttactttctgcttgcatagcactgttctagagtgtcatggaggacacaaaggaatagaattgatagtaggtcattcttcagttgcgttgcatcacaagggtaaaacgtgtacttattcaaaataagtggcataataataacttcttaaaatttttattttatttttccgtaagttattgggatacaggtggtatttggttacataagttctttagtggcgatttgtgagattttggtgcacccatcacctgagcagtatacactgcaccatatttgcagtcttttatccctctccccactcccactcttccccctaagtgcccaaagtccgctgtatcattcttatgcctttgcatcctcatagcttagctctcacatatcagtgagaacatatgatgtttggttttccattcttgagttacttcacttagaataatagtctccaatctcatccaggtcactgcaaatgctgttaattcattcctttttatggctgagtagtattccatcatatatatgtaccacagttcctttatccactcaattgatgggcatttgggttggttccatgattttgcaattgtgaattgtgctgctataaacatgcgtgtgcaagtatctttttcgaataatgacttattttcctctgggtagatacccagtagtgggcttgctgaatcggcatcataataacttaataagtcaagaggaggtctgggcactgtgctcatgcctatactcccagcattttgggaagctgaggtgggaggactgcttgaacccaggagtttgagaccagcctgggaaatatagtgagactttgtctttacaaaaaagttaaaaaattagccaggggtggtggtgtgcacctgtagtcccagctactcaggaggctgaggtgggaggatatttcagccagggcagtcaaggctgcggtgagccgtgattgcaccactgcactccagcctcggtgacagagtgagaccctgtctctaaataaataaataaataaataaataaataaataaataaagtcaagagaggggcccagtggtgtaatggaagagcactgttcatagaatctgtagatttgttttctagtcctggctccacaagttacatattctgtgctcctgggaacttcccttaacctacatgagcctgagtttactgatctaaaaagtgggcctaacgcctatctgaaagaattactggggatattaagggtataatgtatattataaagtgcttggtaagtcatagcatggtatctaaatctaaggtatgttgcttttatgacacaaggcagtatctgagttaggacagaccaggggagtggtacaatcagttaatgttctgagttgctgggtaggagttagcaagtaaggcacgtgcaagaattagaacttggccagagctttgaagaataaggccacctggcatagacaaagggaagcagtgtggcctgagtacctgcacacaggttgtggtgggccaggaggatatgaacgagccccatggctgccatagagggctggtggtgcccgagatggccctccttgccatgaagtaggcagaaggcgcttagagctctagtttcccaaatggagctcaattgcttgtcatattacatacacgtgctgttatgtgtgatgatgctctgttctaaccctgaaagacctggtggagccttagcaaatcactggccattctcccaaacactgcgtgtgcttatgctatgccgccatagttttacaagcatttttcagcgtttatgcaaatgctgcccttctgtctttggtaactgctttgctcatctttcaggattcagcttacatcttgtcttctctgtgccacattcctgtcagcagccacctcacaccacccgctcctgtgcacacaggcgtacagagatagtcttgttcctctctgctcttagagcaccattcagctacccccagtggagcactaatcccagtgagctgtgatggtttcttggtgtctgtctccccgcgagaccatgggctcttggtgaacagcggctgtagcctgttcagctctgaccctccggaccctcatataacctgtatgacccatgaaggtgcacagcaatgggaaggatgagggaagaagaaggatcttttcaaactctgtacattcttcacacagaaaagcaggctcatatcagctgacttgttctcccaggcagagaacaagagtgtgccacattcactccagttgaatggtttcaaacttttcttcctttgaggtggatgtatttttggcttttggcagtgtcttagtccatttggactgctaagcaaaataccgtaaacttataaacaacagaaatacatttctcacagtgctggtggctgggaagtccaagatcaaggtgccagcagcttcaggatttggtgaggtttgatttttttggttcatagatgacaccttcttggtgtgtcctcacatggtggaaggagcaaggtcgctctctggggtcccttatagatgggcactaatcccatatatgagggatactgaaagtaaattgatggaagtgctcgtgtgaatgaatgaatgaatgaaaccattttgaagctagattgctaggttcctgcaggttatatctttgtatactccttacctttcaagaatgtctgcagctctctgcatacaataacttccttgagtatatataactacagtatgacaaggcttttaaattgaacaattctaaagactgtttttttgagtccaaaaagtagaatttggtatcaacattaggtttaaaagaagtgatttcagagtttgtcaactattcaagtgtcagaaaaaaataatgtaaatgatgtgcttaagacatttatttttgtattctcgattctcctgaaataaagggaaattgtcttgaaaagctgtagattttaaatgaaaaggaaagcgggaaggtgacataatttgcctctgcctttgcagaaattcaagtgtatatggcctctctccaatccaccattttcccacctccacaggccccatgtcagctgtttccttcatatcattgcaatgctttgagggtgattgttggtttaagctacagtcccttcaaatttgtgaaagactaaacagattgataacaactccacctagattaaatgaaattctgtgggtagacaggctagtcaaaatacaatccccacacaccccaagtgagcattgcttctcctttcagatatgctgtgggtacaaagaaaggatttagtccaaagtgccttggggttttgttcagtccagagtgtaatttttttctctcttttgcctatagccatttctgtaacattactgaaagggcttttttcctaatgaagcatgaaaattgatcgtatcttgccaggagagttcttcctaagtcttaagatattaaagatttcatgagaaccgcatgaagaatatcttcttgaatcatttacatttttcccttttgtaggcttatgtaaccatgcagaaaatctaataataagtgtgctattagtgtaccatgtgccatcccgcaggcagctgtgccatggggcaccagtgcccagggcttgtggatagcattaacctgtacaactttctaaagtaaagcccagtgggaaatctgtaggtaattgaacagatagtccatttttatcagacttccccctgccccttccctgttctgtcttttctcttttcttgtgccagaaggaaacaccttggccataggcctttcattcacaatggagtatattttccaaagcaaatagcttggactatttcaattcccagagcaatctaggtgggcacacagagctaaatttgggtttgaaagaactcttaaattagtatcataggaaggcaatgagcaggaaaaaaaaaaataaagatacaagcattgtggtctgatggaaattatccagcactcacttacaaatgacaagtgggtaccacccagcctttctcatgttccaaaatttaataaagggttccatctaggtcccccagaaactactgtgattatcagggtgagagaagggggaatgatgaatttttgtaatgccccaatctttgtaaccaggcatagaaggacattcgctgggctcaggatgggtgttagcatgtagtggataaaggaattgcagagttgttgacagctgtttcctcagagacacttgtcctgatgatatttgctttggattctaagtaacagagctgtagttcttaaagtttaaattgaaaaaaaggagttttctgtcaagtggcttagtcatggaaatcagtgaagttaagcttgggcaataatatatccttttcaaatccaggtgccttcctgatcatgccagagcttttgtgactcctttctccttggtgttcttcttttgatgcggcgatagggtctgaacacgtccaggctgtctttgctgggagagggcagaatgcctcggctttcttcagccttgcctttcttcattgtcttcaccctgcagcacttctgcaaagctgctggggtaggtgggtgagtgggcgtcttttctttgctagcccaagctgagttctgaagggaagttagcagggctcagctgctgccgcaaagtcagtcagaccaattctcatttgcatgcctacagaattagacatattcaggggctcgggttaatgccataccctcctcttgtccttggaaaactgtaagaatgcgtgcaggtaactctgcagcaattctgtgttgctcagatgtatttctcttctttcagaattcctccttctatagcattcccctaatatttatgtgctggggctttcttctttcatcccaggccccagcttcgctctatatcagacagaggtgggagctgctgatcaagggggcacacttgccatccaaacctcacgatgctcacaggtgtcctttcaaccctgctaacccagatgatacatcaccatttatacctttggaggcattttctctttaattgatgctcacttagacctaagattgttcattaaagtccagaggtgctcattaaaatgaacattggatagtgtggtagatgcaggttatcattatgaatccaagaaagggctctgtggaacttgttatatacggcatttataggttgttaaattaaaggattagtgttgtgctaaaccattttcaggttaatcagttgtgggaaaccagatctaatgttaaagcaggcttaaactatggtttttatagtagggaagtttttaagctactgttatttctaataaaccctctagcttgctaatcgagcatacttttcaatttttgcacttaactgaatatggtcttgttccctaatttttttatgtgtgggctttatttcttcaagctggattgtaagttcctttttagcagggtctatgtcttttttttttttttttttgctcatatcctaaaagcttctggtataattcgaggtatatagcagatgctaaggattttattgagtgattactacatttttagagtgtcattacaatgtattatcacctggtttatgccgtggtgctttatgtaacatgtgcctatttacagaacattgatataacatgttggtctgcaaccaggttgttatcagcaataggaaaagcattacagagttcatatggaagtagaggagaaacaggtctaatttgggtgtgatgccctgtattagtctgttttcatgctgctaataaagacatacccaagcctaggtaatttataaagaaaaagaggtttaatggactcacagttccacgtggctggggaggcttcacaatcatggtggaaggcaaaaggcatgtcttacatggcagcaggcaagagaaaatgagaggcaatcaaaaggggaaacctcttataaaacaatcagatctcgtgagacttattcactaccacgagaacagtatgggggaaactgcccccattattcagttgtctcccagcaggtccctcctacaatatgtgggaattgtgggagctacgattcaggatgacacttgggtggggacacagccaaactatatcatgccctaacctgatcagatatggcttccagactggcccctggagtggcctgaataccttcaccaagacacgtgtgtgggacagatcaaaagtttccatctgccatttgtctttcacttggtaactgctaatgattgcttgttaaccatacacattaatatgcccgtgaagcagatagaaaataaaataagtaaaaaattgtataagtggaaaaactaagacccaaacaagaaattatggatcatttctaaatggtggccaggacgtttatacggagaaaccataccattgaaccataatcaatgtaagaatacaactgatggtttcagactttcaggaatagaatgagtctcaggcagacatgttctcaggcaacatggcctgggacatccccagaaacctcctccatggagttaacaggacacctacatggccctatgtgtccctccacttgggcctcttgttcaacctcgtatcacatgtccccttcctaccacataaacttctgtctctacattctctactctaccacaggttcatttatttgtttgtttgtttgtttgtttgtttgtttgtttatttatttatttatttattttgatacagtgtctcactttgctgtccagctggagtgcagtgtgcaatcacagctccctatagcctctgtctcccaggctcaagtgatcctcctgcctcagcctccctagtagcaaggactatagacatgtgccaccacgcccagctaatttttaccttttttttgtagagatgagttctcactgggttgcccaggctggtctcaaactcctgggctcaagtgatccttctgcctcagactcccaaagagcttggattacagacatgagccactgtgcccagcccacagtcatgttttaaagtgtctgagctataaatactactataaaggtgtcaactggttgtatatgtgggcccttggcatttcagaaatgacagttattgccaaccattaccaaatggaatccattttatccaaatgggcatggttggggctgagcatgggatggagtaatgcagtcttattgcatttcagtgttagagggctttcactcggtttgcagtttctccacagctcacccaccaattctacctgtgtacttcttttctgttccctctcaacttcttttccattctctccttcctcttgtttctgtccatatctctggcttcttttaatttcccttttcccttctttcttattggtctggccctgggtctggtgagaccaagggcacagaaggatactggctccatgccaacctttcctccaaggcacaatctccttcttggcatttactgagatgttcaacttcctgtgtttctaatattccttcctgttttataaaagaaaaatagattggatttgcaaagtgccttaatttgttgattttctaaaaagcaattttaaaaatgtgtatcaacaatatcacatacatgtaactgatttattgactctggcttgccctgggtttaatcacacataaagaaattttacaataacacatgatccagtagagaaagaagtcaaagaaatatgtaaagtcctgtgacctctgtagacatttgggattaaaccaaattaaaacacctgtatgggctgggcatggtggctcatgcctgtaattccagcactttgggaggctaaggcaggaggatcacttgagcccaggattttgagaccagcctaggtaccatagcaagacccaatctctactgaaaaaaataaaaataaaaataaaaataaaaataaaaataaataaccaggcatagtggcatgcctgtagtcccagctactcaggaagctgagatgggaggatcacttgagccagcagtttgagactgcagtgagctatgattgcaccactgcactctagatgcaacagagcaagaccctgtctcggctcaaaaaaaagaaaacacttgtatcaattcaggtcaaatattggtttcttttttttaagagcagattaacatcttgcatatcttttgctatcacatttcttcttatctgaccagctgaaatggaactagtgttaaatacaaataataaaacctgtaaagatcctaagtttttgcatggtacaataaatcctcactcattcacatgcttggagaaagtccagtctgattcaattaatgaaaagcaaaaaaaaaaaaaaattgtaactacataatttttatctcatgtattagctcctatttagttcacataagtgttcaaataggtactcatttttaattaacaaaatatttgtgtgtagtgagtatttttaaaccaattaaaacagttccttcttgtaagtaaattaagtgctattcttagacgatggtatgcatcattcatttgctttgcaaaccattctttcacaccattctagttggtgtgaaagcaaattgagcccatctctactggaatttattgcattctcttaatttctgacactctatgctcccaatagtagggactccatcttagccaccacgacatcccaggcatggctcctagaataatttcagctctttaagactcaattaatatttgctcactgattaatatttagctccattaatttatgtgtccaaattccttaccatttgccaagtgcttttggattttacagttagttacaaactgtagtttaaggtttttctggctttacttcattcttcctttaactagctttaaaaaactagtttataattctagttacaatacaatgttaagtgaaagaactgattcaaaattatatattcagaattattctaactttgtaaacatgcatagatatatgtgagctttaaaaaagaaaattatatatatatgccaaaatacaatcaaaatgtaaatagtggatatatcatgttggagatattaggagcagttttatattttttaagttttctgtgtttccacatatgatcacactttatttttatatcagaaaaaagctatcttagttgtgcattgtacattagaaatattagttttgaagataacctaaacacaagtttttatttcttctgtcacagttgcctcttttcttaaaatcgtgtttgccagtttctttcacgacactgcaaacaattttagtagcttcagttctttgataaatctgtagcttttagatctttgattactattagcaaagaaaagatagacccaaatgaaaaacagttgcatttttgaaatatgtccggcgggggttgatgtggaaagaacaattcctctcaactccagggtcaaagcagcagccctgccaggctctgtcggggtcgcctggagaacatcacttaactttctacatcagttcctgcttctggacattataacattcatgatatccacctcatgcaggattcctgggaggagcagatcagatcataatgtgtgtgaaggggctttgaacgacagtcaccacattattaccaccataagcattatttccatttcaaaaatggtagaggagggaagatgcagatgttctctttatgttggctcggcaccaggcacgtccaggttgtgctgctttaccctccagcatgaagagttagaaggtaaatatcgatattgcttttcataactaatagcttcatagttcatgtcaggtgatttcttggcttccgttagcatttcagagaccattatacacagcagccatcctctgcagagctggagaaaactcatttttcaaggcaaatagtcccaagtcagggttcagtcctggtggaatgaaataaagaaggagagtttatctttaaggtaagctagcatttaagtagatgttggatattatcagagatgcttatgaggggcagagagcattgaagacttataccctttgcacatctttaaatgcctgtaagtgcttaccaggagccaagagcgaacgggtggctgcgtgcaaatgctagaggttaacccctgtccatgggcatttaccgcatgagtaaaaatttattgcagagttcaggactgtgattctgctgctcatttctgtagcgtatttctttatctgaaaggatgcccattgtcctttctagctttttgggccataaccgtgagggaaggcccaaaggaagaacctctgttggagatcaggtttattcatccatgtgggtggaggtacgaaggagggaagaacctctgttggatatcgggtttctttgtctgtgtgggttggagactagtagaataggggaaaccacatactgcccattcctccaggatcattttccatttggatatttagaaagcaacaagagaggagttttagaagacaaggtagatgatttcaagttactttaacatagaggaagaaagtttccttctatttttaatggctagtgcatgatttgtgggagtgaagattgggagggggcacggacgaacaccaggaagaggcggttaatttattggtccccattaattgaatttaataagtgagttttgtcagtttagcaatatccattagtttcagagagtgtttcagtattattctgtaaaagcatccagggatatattttacagctacagcatagattatcttgcacacatattgaagtaaagatacctttcaacattccagatactgacttttcacccaaatttgaaaatctccatttagcactttctaaaataccagtgaaaattaatatagttttgtagatttatgtactaagatgcagattaagacatgtggaatctaatgaacatagcaggaaaagaaaattttctcaagtctgttcattactattcctcatcacattttttattatttaatagcttattccttgaatatgtgtgacttgggattagatgtgccagttggaagacctcagaggttcagaaattcacagacatgtgaaatataaaaccgtattcatttagcagatactgataggcatataaaatagaaccttcatcatctatctttagaaaaagaagattaaacagaagtgtaattaatttgccaactctgcttcccgattgagacatttatcaaagttgatctttaatcattagtttcctaatctgtaaaatgaagtctattatgacctctaaggtctatttgtaacagttaggattaggttcagttccatatcaccaaaaaaaaaaaaaaaaaaaaaaaagaagaagaagtcaagccaaagaaatagacatttatttttctctcacataaaagtggttttgagaggtaagcagtccagggtgattatggtcactgcacaggctcagaaacattgtcacctttctattctgccatgctgtagtatatttcttttcttttctttctttttttttttgagacagattcttgctctgtctcccaggctggagtgcagtggcatgatttcagctcactgcaacctcttcctcttgggttcgagcaattgtcctgcctcaggctcccgagtaactgggactacaggtgcgcaccaacatgtctggctaatttttatgtattttttagtagagacagggtttcacatgttggccaagctggtctcgaactcctgacctcaagtgatgcacccgcctcagcctatgtctcacatacaagatggctgcatagctctagcctttaacattaccattccagaaagcagaaaggaggaagagacgaaggacctaccccctttccaaagacacttgccagaggaaccataccacatttttgtttacttcatgtcaacaagaatttagtctaggcatacctagctgcaaggctaggcataccttcttgcaagtctaggcataccttcttgcaaggcaagaagaagatcaggtcattcagttgggcagcaatgtgtctacctcaaaaccaaggtttctacttctaaggaaaagaaggaaagtgggatattggggtaagcaacaattatccacaggttttgagctcaaaaagccgtgatcgcatgtttctgggaaaatttgacctatacaatcgagtctgaatgtgtgctgggtgtgtacaaatcagacaacttcaactgtgagccttcattagctctcccctttatctagacttaggattgtatttccaggcataggtcagaatctttacactgattgtgtgtgtgtctgtatgtgtgtgtgtgtgtgtgtgtgtgagagagagagagagagagagagagagagaaacagaatcttggctgcaagatgtgctgaatataaacacaataacttagcaatttataactgcccctttcccatctctgccccctccccagtatcagcatacgcagtgttacccccacactatcaatatgtcaatgattaatagcaactggcaaatgtgtgctttccatgagacttgtatgcaaggttactcgggttcacagaggctgctaataacagcagcactattgaattatgctatgtgtctgtgtctgttaagacaggtcggaggacaggggaggaaacttcccccagggtaattgagagacaaagtcactaaaagctacagatctccagtttgggctctatgcatgagattgttcttaaaagtcaaagaaatataaaaggaaattgcacatttgtaatttttttaagttccccatttcatagctcattaaaaccaggactttaatattctgggtcagaacccccattggatatttttgtgaacatgtaacatgtgggttgattagaggtttgggcctgtttttttctttttctttttttttttttttcagacagagtctcactctgtcacccaggctggagtgtagtggtgtagtctcggctcactgcaacctccacctcccgggttcaagtgattctcctgtctcagcctcccgagtagctgggattacaggtgcccgccatcatgcccggctaatttttgtatttttaatagagaaggggtttcaatatgttggctagtctggtctccaacacctgacctcaagtgatccacctgcctcggcctcccaaagtgctgggattacaggcatgagccaccgtgcccagcctggcctattttatttcatgcatatatagtttaagtgtctctgagattcttgatcaactaacaaaatccaagaggcccttttgttatattctaaattcattcctgcttctgattgttgcaaaggggtcagcggatagggtgccagagccagaagttagctaggtggcaggttctgaattaatgtggtattctgggtaatataatgtcatttcctagggaactgccagcatctagctgacctccaagaggacaagtggtcaggaaggtggagatagtattagaactgttattattgttgttgtttttaacaagcagacctgtcatgaaacttgccatagaggtccccttttccatatatcaccaaagcctcataggtaagaaaaggtaaacatccaagattgtttctttaaagattgctgttgggcagaccaagatttagccacaaaaataaacataatctctgatgctgagaagagatcagaatgagttgaaacacaggggaaaaaagaagtaagcagaaaaaaattttacaatagtagatatggggattagatagatagacggctatatagatatataggactctgaatagacccattacaggcaggcatgtaagtggaaatgattaatatatagatgtagacacaggtaattctatataaatgtggaagagcagcaggaagtttctacagctgggaaggaaaaggtaattttttaaaaatgaggtcattacaggttgtttgggtccaggcagattcccattgtcctccctaaacactgcttgtaaacagttttgggactgaatgcaccctttgactgtagtctatgctttacattgactagaactgacaaacagatgaaaagtaaaataatgtttctagagattttctatttggttatgtcatttttttccatggacacatctggctaaagccaaggggtgttaagcccccaaatgtcatttgaatgttcttacagtatgaagaagaggaagaagaaacactttgaaaaccaataattcggccaggcgcagtggctcaatgcctgtaatcccagcactttgggaggccaatgtgggtggatcacctgaggtcaggagttcgagaccagcctggccaacatggtgaaaccccatctctactaaaaatacaaaaagttaggcaggcgtggtgatgcgtgcctgcagtcccagctactcaggaggctgaggcagaagaatcacttgaacttgggaggcagaggttgcagtaagccaaggttgcaccactgcactccagcctgggcaacagagtgagactttgtctcaataagaaaaaaaagaaaaccggtaattctgttttggaactccttgctctgctatggcacatgtatacatatgtaacaaacgtgcacattgtgcatatgtaccctagaacttaaagtgtaataaaatatatatatatatgaaaaaagaaaaagaaaacaacagtgctgattgaggtgtcacacttttgctggttgtctctcctgggtatacctctagcttatcaccgccattctgggaagacaggagcaactgccttttagctgtagtcaccactcatttccctgttagccccttgtggactggaagctccttgaaggagacaaggcaccaagtcacattttacttcatatcccaccaccatgatgtgcctggcacgtaaatgttgaataatctgaacgagtggatccctgaacagtttaataaaatggggtttaaggagactgtgacattcatgaatagcatcacatccaggcttatttctatggctttctattgggctcaatgcctgggtccctggcacatgagaaacaagtatccttgagcagtaggggaaccataccttattcttaccacctcaaaatatctagaactggctgggtgcggtggctcatgcctgtaatcccagcacattgggaggctgaggcgggcagatcacgaggtcaggagatcgagaccatcctggctaacacagtgaaaccctatctctactaaaaatacaaaaaattagccaggcgtggtggcgggtgcctgtagtcccagatactcgggaggctgaggcaggagaatggtgtgaacgtggaggcggagcttgcagtgagctgagatcgcgccactgcactccagcctggcgacagaacgagcctccatctccaaaaaaaaaaaatctagaacctcagcatgaagccatttttaaaatggtgccctatacttagtcaaattcaggcaattcagtttggggaattattttctgtaaatgaggtgctctgaatcagagttctgactccagctttactggctgcctaagtgccatggtttagtgtaatgaaaatacagtggggggtccttaaggcatcattcagggtctacctttaagcgactccagctcttgaacttaatgaactggacactttcaagttctgaacatggtaaataaaagccagcacctgctgccaaaataccttgtctcataatcaaaatcatttctagagccagcggaacatggattccctgagaaattcccactgactcagcaattttaggttgggattttattttagagtcacttaacgaaaagatttcacctagtggcatggccccaatatttatcaggtaactctggccccatctcagcagactgactgattcaatcatcttaccctttactggggatgaaacgaaatgcttactaactcactcctgaccccacctgccactccaagtcattccagcaaacaaatccgtaatagattgctgagagggggaagataggtgaaattggagaatacactaaaaatcaactagttttaaacggtacgggtgggagccatgccccctctgtactggtccactttataaatcccagagggaactcattctatgcttgaaggaaaactttgccttgttctttggttagattgtgctgaacagatcaattcatgtcaaagagcatcaacttttcttatttatgccatggcttccataccacatcacactttatttactcttagtggaaccttgaatcaatgatcaattttgttttgtccttcagtggagtatcagacaccaggacaacctggtcagcaaatattctgaagtcctcagcagttattactagacaggatattagcatatggcacatcatggaattaatttatgtaacacatacttagcatgcacctatcaaatatgtatcaggcacagtgccacggccttaggatggagaagaaaaaacatagttcttgctctcagagagcttagatctagaagttgatagatgctgttttccaagtttctccacttgtatttctgaaactgtgaacagccaactgacatgtagtaagcaatcatttttccagaaaaagtctgttggggtgaaataacatgataagggatctgagaaaagtaggcagggtagggatggcaatggggaagattccgttataaaggaacagcatacatatagattatatcgctgtatatttgtgtctgtgaagcacctcatttaattagatggtatcatggcaactagaagagtgcttacttaaatgagcggctccatgcaaagccctagcagactgaaagtgctttgtaggtattagctgttattattcctactgctcatcactaatatgtagtaggcactccataaaggtttgcgacatgagtgggtgggagatttagtgctgaaatgtaaacctatacataaactgaatatcacatctatatgaatagagaaccttttacagtacaagcaagagcaagatgttcacattatattctgcaaagaatgatctgaacacttaaacttacaggctccgaaagtgtctctctgcccaacatccctatccatttaaatagaaatggcagtagcagcttcctggtgctgctggtgggaagagccgtggtaaggtgtctcctttctttcactccggagcgggggtgatgacaggagagggaccgggcgggagcgaagtgatgatggtgataatgggggtaactgctgagagcgggagggtgggggccaggaacaggaggagtgtgagcgtgagaagacagtgctcagaagccgacacccaggtgacttctctggaatctccctgctctgaaatgggtaacgtggctcctttctctgaagctccaacacttaaaggagcttcttgttttaagcttcttgtgttaagctccagatttttacaagcatctcttcagagcctggtctccaaagccatccgtccagtcagatcaagagctacttgccctgtttctccatagtcacgaactggttaatgtgaggggaaggcaagaatggtctccatcgtcacgggtttctgccttggtttgaagcaagctccagcagttacatgaacaccagttacggaatgtctacagttatgacaagacacagcagggctgacccggctcacccagcaagggaacaaaggccatccacacgtcagacccagcaattcaggtgaaggaacacacagaacctcctagttcgctggatgaggagtcccccaatttcaccagataatcacacaacatgttttcatatggccacatgcccacagcctcaagaaggtgaagcattttcagagaatgattcctgacactacagaaacattgaccatttagaatcagaagaccctcagtcaaggctggcctcacaggaaaatcaaatgtaatgattcccataatgagttcaagccagacaactgaattatgcatctgacattaaaacaactgggggattgtaggaggaggagaagtttgggaagagagaggacagtgtaatcttctgggagtaaaatttattactgaacattaaaaaaagatctgcaagttaagttgagagtcattttgtttatactcgaaatgctacaatgtcctttgatttgtttatgcaagttttaggggacaagttacgtttttttagcatataatctacatttattcccaaaacactgctcctgagacaatccatcagatatttcctcaaggctgtggaaaaggggataaaaggcatatttttaaaggtgggcgtgtatgtgcaaaacatgtttgttttaaagagatctgaatgctgtagaaataattagccatgtgcgtgaacgaaaataatgaataccaaatggtacaatgtcctgcttgaatcctgtttcagaaacagaatgtgaaggaaacattacgttctctcatccctctcttttctctttcacccttgttacccctgaattttgtaataatcactattacccttttggctatgaatttaatgtctctatatatagagccacacccctaacacagattcttcttgcctctcagagacagttaaatgtctttgggtattgcactacttattctccataggggctcagacatattcactattgagcattttcattagctaaaataaattaaatgtatgtcgtaaatgtgcagcaacactgaagaagctgcgagctacatcttgtccttgggagtcatttacttagaataagtaaagactttctcacttgctagtttcaggcgtcttaccttgtgttattccttacaaatggacagggctgttctagaacccacttcctgaatacagggaaagaccccagtggtgtattgggataatggagacagacaggtctgaatgtgaggtgtggacgtgggcttgtgtgtgtgttttctccactggatttcttcaaacctaaagttgctggatcacatttctaacaacaatttgcctgaccttataggatctcctttctcactgaatatgttacgattagaggaactaagattggctaaaggacttttggaatgagccctggacttaaaaacccgttgaagagggagcaaacaagaggaacagtgttttccaagaggcttacttctcttaaattgaaatatagtcatgttccctggctctgagggcactttctcagagcccatatgtttattcaagcatttgcttcgtgatgtgggaggctcagccagtgtaatcccaggcatgagatgttcaaatgctgaatatgttattcaagcacattatttcccattgacatatgtaaatttaaaaataaaataataatgcaaatttacatattgaatcttgggaatggaaaacacatttccgatgtcactgggtatatctgttcccctactttaaaataggactatagagctgttctctttgaagtcatctctgaccatacagtttaatccagtgggcattaattcagattctgggttagtgtcttgtagaagctctccggtgcttctaatattcagcagatattgagaacccatggtctaatccaatggccattcttagtctttctgtttctctgctgcatttaatataattgatgtcttaattttcttctgtcttttttatttttattttttacgtccataggttttgggggaacaggtggtgtttggttacatgaataagttcttcggtggtgatttctgagattttcggtgcagccatcacccgagcactatacactgtacccattttgtagtcatttatccctcacccccctcccaccctttctcccaagtccccaaagtccactgtatcattgtgaggcctttgcatcctcatggcttggctcccacttatgcgtgagaacatactgttataggatctctggggtgtcaatttttctgatgggaaacttctgtggccgcaacgccttttaagcccaagtttttgtcctgcgtccagaaagaatgaggtacacagacatgtgaagggtgaaaaagaagagttttatttagtgttagaacaactcggaggagtggggagctcctctctataagcagatcgtcccattgagtgttcagctctcagcagagaggaggccctggaaagggtggctcctctctgcaggcaagtcattctgcaggtctctgaagcactcctcttagcagagagggtagctcctctctgccagcaggtcatctctgcagctggttgtcccatcgtctccagctatcagcagagagggtactcctctctgcaactggtcatccagtcccattctctctctgccccctttgtccctggccatcctcctgcctgctgtggctaagcccagggcttttatggacctcagaggggaggaagtatgtgccaattggtccatgggtggccatgggtggacggaagaggcaccacgagtccccactctggtcggcaggactggcagcccggcccccagccttcaggccctccctcgcctgaaggtggggcctaattggggactcccctcttttctgccccggaccctgtcttcctcctgctgccattcatggccccggggcttggccccaacccagctctgagatctgagtgggtgcctggaacggagagaggccaggcagtgggcgcagacacatctgagcatgcagagatggggagggtccttcctggggcgcccaagggtgcaggctgcagagacgcccaggtcctgtgcctgggagggttggccacagctgcacccgggagctcccgccctgacaactcggaaggggcagggctcccgcttgttcctggctcctgcctgcttcctggaatgggaggcccaggtctgcagccgtgggtgcggcagctgcagctgcacctgggaaggcagatcctgcctgttccaggctcccccaagagcacagggagactcggatctacagctgcagtttgggtggctgtggccccaagagggcggggctcctgcttgctctgtggagcaggaggcctgggtctgcagctgcagttcaggtggctgcagtggcacgcggagctcccatcccaactcggaatgaacagggctgccaccagctccatggagtatgcagcaccagccgcgcagccagcttgatggcagcagccactgccatcattacggtgttcagttttccattcctgagttacttcacttagaataatggtatccagttccaaacaggttgctgtgaatgctattattttgttcctttttatggctgagtagtattctgtgatatatacatacaataatttatccactcattgattgatgggcatttgggctggttccatatttctgcaattgcgaattgtgctgctgtaaacatgcatgtgcaagtatctttttcataagacgtctcctctgggtagatacccagtagtgggattgttggatcaaatggtagttctactttaagttctttaaggaatctccacactgttttccatagtggttgtattagtctacattcccaccagcaatgtaaaagtgttcccgtttcaccacatccccatcaatatctatcattttttttattatggccatttttgcatcttcgcccttcttgactacttttcctctctctaaccaaaattatggtaggtgtttgctcttcttgccttttgattgcctttcttggatatttctcccagtgtcagcttccctcccgggtactggtgctgcttctgtcaccccgttcccttacctactcttggtcctttcaggagagttcctgtatgtttatcttagagccacgtaaagctaaatgggtcttactatctttattaacgagctttattatctgcccctcctctagcttagcactctgtccattctgtgtatcttattgcagttgtacctttcctattcccacctgagagctcccactcctttggttcaacccagcttccatcaatcattcctcgagccttgccaattttttgtctctcttccatgtttattgtcgctacctgagtctagaccctctgggaactgagctgattggattgcagtcttctgcacggggagccatggtgtagagtggaaagtgtaatggatgtggagttagaaagatcaaattctggactcggttaagcatttaattaaaatgtcttggccaggcatggtggctcacacctgtaatcccagcactttgggaggccgatgtgggtggatcatttgaggtcaggagtttgagaccagcctgaccaacatggtgaaatctcgcctctaccaaaaatacaaaaattagccgggcatggtggcgggcacctgtagtcccagctactcaggaggctgaggcagaagaaccgcttgaacccgggaggcagaggttgcagtgagccggggtcacgccactgcactccagcctgggtgacagagtgagactgcgtctcaaaaagcaaaaaaaaataaaataaaataaataaaataaaataaaataaaataaaaaataataaaataaaaataaaaatgtctcaaacccataggaccttagtagtgcatatttgtctctaggcctgtttcgccacctataaaataagctgcattttataaatggaataactataaatgaatataaatcgatgtggaatttgcataaattccatatagatttgggtttcttggccttatgctgaaaccagcatttgagactgttggtgaaaagaatataaagaggtggtgtggtgtacatattactgtccgtattatggtctgattgtcaccacagtcctccatattagctttttatatgacccctgctttcccaatctagatctccagaatttttttggtgttttttgaatataatcaaaagtttgttttgctcaagattcatcttcctaaaaatgtttgacaaatgcctaatttgaaaattagtttgctgtcttcaagcttctcttaggaaagaaacgtggtccaaaagaagtttgtctagtatgcagggatttttaaaaactggataacccagggtggtctgcataagttatatgcttttcccccaaagaatttcaaacggctttcctggtatcatttgtccttatgtttctttagttccaggacagttcatactgttcttggcagcttacaaaatgagaaactgaggtattgtaattcagtctacttcccttccaaggaaaattgaaaaacactgtggggaaaatactaacaattatgtgagcctcaactttagattctgaaaaatttattcatggaaagcaaaaattcattactattcccataacattgccaacagcaaagagattatattcagaattaaatacagccctgttccatttcttctttgctttgaaactcagtgtgagacagcagtggaaccttttctgacttaaggccaaattaggtcaaaaacctttgctttgaaccttctgagtcatagaataagcagggaggaggaagaaaatccgtgacctgtgccacgattttttactgaggttttgtgcaaagagtgccgtgggcaggaaatgtaggaagaagagaggacatcacttcttcagtgtttccctgtatgtccagagataggaaattcagacatttgctttatttgctaaacttcacagatgtgagcaagaggaatattagaggcaatgtgtctaaattacttacttcgatgtaatgacttcagagctctcaggaggagaatggtcgcggggaaggaacgagcccaaccaatggcatgcccagagtcagcccttcatctgcagttttaagaagtggtggttggagcaagacgtgtttgcagttacaggaataagcaggagagggcagctcaagttgcccatcaaaagggtgggtgaggggctgggcgtggtgcctcacgcctgtaatcccagcactttgggaggccaaggcgggtggatcacctgaggtcaggaattcaagaccagccttgccaatacggtgaaaccccgtctctactaaaaatagaaaaaaattagccgggcgtggtggcgcatgcctataatcccagctactcaggaggctgaggcaggagaattgtttgaacctgggaggcagaggttgcagtgagccgagatcgtgccacttcacaccggcctgggcgacagagcgagactccgtctcaaaaaagaaaaaaaaaaaagggtgggtgagtattcctgcaggaaggggaagattgagcagagaaaaatgtcatccctttcttatccatggggcttctcctcccccaccaagctcatccatcagggtcgacactgctcttgtttgtgtcttcgcttagaagagcctgctagaagagtggcagatgagtcacctgtcactaaaagtaggtgttcttagtgctggggaaaatggaaggtggcagcaaattcctgctgcagttttccgtaaaattggattaccactactggttttaggtgcccctggttttaggtgctctgtatgtaagtttgtgcaaaagtacagcggcatctgtgggcatccaagctgggttctgctctcagcaaactgaagcaagcccaggccagtccaagggaagatggctgtggaccttccttctgttttatgcagcctagtttgaggcagttcaactgccccagagttaaacagttcaccatacataatagaggacttcgtaattaaaataaatacctctccaccaagagaggagaaaaagaaagatgtgcacagtgtgatgcagaaatgcaaggtgccctaaagtcaaatatgttacaggacacagtgtgcagctgtcagggcctctggccagtctccagctatgctggaggtattttctgtgctctgaccataggctacaagaccacatggctgctgctccactctgtagagtttcttgcatatcagaaaatctgagacctgacatttgtgatgaatatttcttgtacccatcacaaatcagaagaacaacccagagaggatgtcaggcacctgttggtctttcctcttgatctacttgttgcctccaagcaactaaggttctttttagagctctcacccctcaaagtgtagataattatattatcctctaaatatctaaaaactttgtttaaaaggactcgattttgttttctgggaaaagcttggtttaatacaaacaaattccatgtgtaacccagctttataaaatagaagggtccgagtgcggtggctgtaatccccacactttgggaggctgaggcaggtagatcaggaggtcaggagattgagaccatcctggctaacacagtgaaatcccgtctctactaaaaatacaaaaaattagccaggcatggtggcgcacacctgtagtcccagctactagagaggctgaggcaggagaatcgcttgaacccaggaggcagaggttgcagtgagccgagattgcaccactgcactccagcctgggcgacagagcgagactccatctcaaaaaaaaaaataagtgaaataagatagaaggaagggggtctggctttattgtggagggcactgttttagggaggtacatacatgaatatgttcctccgtcagggaactgagggtccactgcactgattctcaaccatggctgcacattgaaatcactgatacccactccgaccctataggttctgagttcagtggcctggagtgtggtgtgaccggcaagacttttcaaaatctttccaggtgattctcctgtgctgccaaggttaagaagcacaggtctagtgtagtagttccccaacctagctgccaatcagaatcaccaaaagagatttttaaaatacagattcctaggtcccagcccagacctacacaatcttgggaaactacagaggatgtgtatttttacagcatcacatgtatttctgattatcgactcaggggaccctcactgtaatgtcctcatgcacgattgtgatcttaaagcataatgcctgtagcagtttttatttatttattctcgtagacgaagctgtttttcactgcttcaagtttaatggccaagtgtgtttgtaattgtggttttttgttttttgctttttttgagacaaggtcttgctctgtcgtccaggctggagtgcagtggtgcaatctcagctcattgcaacctccgcctcccaggttcaagtgattctcatgcctcagcctcctgagtagcagggattacaggcacaagccaccatgcctggctaatttttgtagttttagtagagacgggggttttggcatgttggccaggctggtctcgaactcctgaccccaagatccgcccacctcagcctcccaaagtgctgggactacaggtgtgagccaccatgccgggcctcctgtaattgcttgttaagagaatcagacacctttctgaagccactaaccaaccagcagcattccccattctatgagcgcttttcctttctgctttcttggcacatttctgtcatagacctcgttctcagccttgttgagacacctcctttagtttagtgtggagtattttcctagaacaccgcagccagacgtcccccgttatccgcaggttgatttctgaggccaactgcagactgaaagtatgaaatggaaaattccagaaataaacagttcctaagttttaagttgcgtgctgttctcagtagcatgataaaatctcacgccttaccccatcctaacgcagacgtgaatcgtccctttctccagcttgtccgctgcgcagcgctccccgccggtgagtcacctagcggccatcttggtgcttagatccactgtggtgggatggaagtgcttgtgttcaagtcacctttattttacttaatgatggtcccaaagcacttagtgatgctggcatactgttacaatcgttctattttattattagctattatcattaatctcatactgtgcctaatgtataaatcaaactttatcgtaggtatgtatatataggaaaaaaacatagcgtacatagggtttggtactatccagtgggtttcaggaacccactgggggtcttggaacctattcctcatggataaggcggggactattgtactgaaatctgacaataactctgccatgatgcttcttttgagccacaaagggagccctcgatgtgccttgctgtggtcatttcctttaaattcccttgctgtgatcatttccttccatccagcccagcctgagatgtggagactaccagacagagcctcgtgtgatgctctgtcggcttgagtgtgaggaagcttgtaaatccatgcgttttgttaaaacattatcttctacagtgtcattgagggaagtttcaaatcagctgtgaaagaaaacaaaacccacccatctaaggcattactcatgcctggctgttcctggcttgcattagactccctggctggtcccttcaggctctccgttgagagctttctgtgaagttctttgtatattttcccaaatatgtttattatgggttcattttatcttctacgttggaaacgttatagattgagactcagtcactgccttattgctgcttttcatcatcccacccaccatcccttgggttaaccagagcaaaatagaagcaaactatattattcgcgaaactatagcagggaaaaagatccaagtttctggaacgtgtcctgatgaaaaaataagagtgcatcagatgtggagataaaatgtctcaatgttgaagggatgcatttatctacttaacactcagatgtttttctgatggaagcctctgcttatttatattttagcaaaggccaaactaacctgttctaagaaataatctcatactgaaagagagacctcacttcccatttcccaatccaaagtaaatgctgtgaaagaccaggaatgtagtaccgtcagcacacatctgggactgtttgtagcctacgttctgaaatcaggggatgctgacaggctcaagctgcgatactgaaaggaggcctggtttcccttctgttggaattacattacaaggagaaatattgatccagcatactcaagaatgggctgggtgtggtagctcatgcctgttatcccaacactttgggaggctgagacaggcagatctcttgagcccaagagttcaagacaagcctggacaacatggtgaaaccccgtctctacaaaaactacaaaaattagctgggcgtggtggcatgcgcctgtagtcccagcaactcaagaggcagaggtgggtggatggcttgagcctgggaggtcgaagctacagtgagccaagattgggccactgcactccagcctgtatgacagagtgagaccttgtttcaaaaaaaaaaaaaaaccctgaaattaaaaaaacattcactgggggaaaaattggtttcttagtagaagaataccagcaaaactcaaaatgaaaatggaaatgctctgctgccaatcaggaaaagactgaaaatcttggcagaattctgctggaatcctctgcccatttccttcatgttctcataattataaaagaaaaagaaatgaacattgataaagttcctgctgaataagagaagttttttctacctcacatttgttgaatgcatctcatttagtcatcaccctaaccctgtagggtacgtgttattatctccattttctttattttttgagacagggtcttgttctgtctcccaggttggagtgcagtgccgcgatctcagctcaatgcagctttgatctcccaggctaggctcaagcaatcctcccacctcagcctcccaagttgctgggactgcaagcatgcaccaccacacctgcctaaatttttttattattttgtagagacaggcctcactttgttacccaggctggtctcgaattcctggcctcacatagtcctcctgcctcggcctcctgaagtgctgggattacaggtgtgagccaccacacccagccaattcccattttaaaatgaggaaaccaaggcttgggttcggtgatttgctgtgactgaaaatccttccctccccacaaatagggacaccactatcagatatcacatagatcatttcccaggagccaagggcaaagggcagacccgtctttggccaaagccaaattctttcctacacagtaaatatgggaaaaagagagacttcaagcttcaccccaagagttgagacattttgaagaaagactgacacaattaggggagtcgctggatataggagtgaagtgcgagagaggtatcaaatatcaggctctggcctatgcttggagaaatggtgcaaaaccgttagcagaaatatggaaccggagtgcatgctgatttgagaggggtggtaagcatccaagtggaaattcctcacagactcttgagctgagactgaagttcaggaagaagaacacacctggattttttttcttatgctaggcattatagttgcttttatttcatctcaacaatcttttgaaaacgtattatcatcattcacatattccagatgaggaaactgaggcttacagaggttaactgcatcttccacgtccacagtgctagtatagaaaatgagctttgttgtaaacaggagactgccttactttttttgcatttccgcttgtccattaaatattttattgcctgtttagattacagtcattggtgcctacagcagcattatttatctttcattgggaattagggccttaaattaaatcgttagtcatattttatgtttttataatgttgtagagattctagttagggcatggtattctaaaaaggaaaagcattgatttaatttataatgaataattgtatctaaacagtgtactatgtgttctgcgttcaaataagccagaaagcttctatttataccaaaggaataaacagcaaacaacagacatacttaaattgaaaacatgagcacatttgaattttatttttgaatgtagatgtaattgaccatttgttctgcaaacaaggctttggtccagtttagggggaaaaaaaaatcagtgcactagtgtggagtattttctaaaagaagacaattttagagacttagtaaactttctgaaccggtaagacttgaaatgcctcatgaagggaagtgaggcagggaaacttttaatgagagattattccattcaccatctttgctggagctgactggtgtctatgatgcaggaagtaacctgagaaagaattctagggaggaaaatgtgttttttttttttctttctttcttttttgagacacagtctcgctctgtcaccaggctggagtgcagtggcatgatctcagctcactgcaacctctgcctcccgggttcaagtgattcttctgcctcagcctcccgagtagctggaactacaggcacgtgccaccatgcccagctaatttttgtatttttagtagaaacaagatgtcaccatgttggccaggatggtctcgatctcttcatctcgtgatccaccagcctcagcctcccaaagtgctgggattacaggcgtgagccaccatgcccagcctgaaaatgtgatttttttatgcagatgaaaataggaccacagtgaaggaggtagagaagagggcctttcttagaaaataatcggaacaaccacagccagtaattgtaggtcttgagtacgccaggccctcatctaaattcttcttatgtgtgaactcacagcaagcctgtggggtaggaactagtattattcccactttggagatgagcaaactgaggcacagagaaatgaattagttaggcctggttagtacttagatcagagaaattaattaacttgcatcagatatacacagctgaggagtaaggccaccaggattccaaatcaggtggcctagatcccaggcctgtgctgtttgctgcagcagtcataggaggtagtttgaactggaaagcagttcatcatgagaggtagcattttttgaggcactactgcctgcttgcatgctaggcactgaattgtcccatgcaattctcataacaacttcatgaaataaggcgtattactatcttcatttttttttttctaaggcagagtttcactcctgtcgcccaggctagagtgcaatggtacaatcttggttcgctgcaacctccacctcgcgggttcaagtgattcttctgcctcagcctccctggaattacaggcactcaccaccaagcccggctaattttttttgtatttttagtagagacggggctttgccacattgaccaggctggtctcgaactctggatctcacatgatctgccccccctcggcctctgaaagtgctgggattatatgtgtgagccaccgtgcctcgccatactatcttcattttcttaaagaggaaatcaaagcttagaaagttgaatgggcccggtgctgtggctcatatctgtaattctaacactatggaaagccaaaatgggaggatcgcttaagcccaggagtttgagaccagcctgcacagcgtgatgaaaccctatctgaataaaaaagtttaaaatgtagctagatgtggcggcacaagtctgtaatcccagctactaaggaagctgaggatcacttgagcacagggaggtcgaggctacagtaaactatggttgtgctactgtgtccagaattaggtgcgttcttggtctcactgacttcaagaattaagccgtggacccttgcggtgagtgttacagttcttaaagcggcatgtctggagttgttcattcctccctgtgggttcatggtctcactggcttcaggaatgaagctgcagacctttccggtgagtgttatagctcatacaggcagtatagatccaaagagtgaacagcagcagcaagatttattgcaaagacaaaaagaacaaagcttccacagtgtggaaagggatcggagaaggttaccactgctggctcgggcagcctgcttttattctcttatctggccctacccatgttctgctgattggtccattttacagagagcccagtggtctgttttgacagggtactgattggtgcatttacaatccctgagctagacacaaaggttctccagggccccactagattagctaaataaagagtgtcgacacaaaggttctccaagtccccaccagagtagctagatacagagtgtggattggtgcattcacaaaccctgagctagacacagggtgctgattggtgtgtttacaaaccttgagctagatacagagtgccgattggtgtatttacaatcccttagctagacataaaggttctccaagtccccaccagagtagctagttacagagtgtggattggtgcattcacaaaccctgagctagacacagggtgctgattggtgtgtttacaaaccttgagctagatatagagtgctgattggtgtatttaaaatcccttagctagacataaaggttctccaaggccccaccagactcaggagcccagctggcttcacctagtggatcttcacagaggcagtaggtggagctgcctgccagtgccgtgcgcccgcactcctcagtccttgggtggtcgatgggactgggcgctgtggagcagggggcggcgctcgtcggggaggctctggctgcacaggagcccacggaggggcagggggaggttcaggcatggcgggctgcaggtcccgagccctgcccgccagaaggcagctaaggcctggcgagaaattgagcacagcggctgctggcccaactgctaagcccctcactgccctagggccggcggggtccgccgctgctccgagtgcggggcccacggagcccacagccacctggaacgcgcgctggcccacaagcaacgcgcgcagcccgggttcccacccacgcctctccttccacacctccgcgcaagctgagggagccggctctggccttggccagcccagaaagaggtcccacagtgcagcggcggggtgaagggctcctcaagagccgccaaagtgggagcccaggcagaggaggcgcagagagcaagtgagggctgtgagggctgccagtatgctgtcacctctcactacactccagcctgggtgacagagtgagacccggcgacaaaaaagagggagagaaaattgaaagactttcctaaagtcacgagttatcaaatgccagttagcccggtctaacatgacactgaatcaactatgtgcttcctgctcaggagtcagaacgatattatcaagtgttaatgcttctaaatgcaaagagggagcaaggtgtttcttctctttagtctgtgaccagcagctgctcactataacctctcttccactgcatgtccaaggattactgcatagaggaggattcccatcttcccagcccctaaatttaaaaataaattaaataggctgagcgtggtggctcagggctgtaatcccaagcggtggctcactcccactttgggaggccgagatgggcggatcacctgaggtcaggagtttgagaccagcctggccaacatgatataaccctgtctgaaaaaagtacaaaaactagccaggcatggtggcaggcgcctgtaatcccagctactcaggaggctgaggcatgagaatcgcttgaacccaggaggcggaggttgcagtgagctgggatcacgtgactgcgctccagctctggctactgtctcaaaataaataaataaataaataattaaaagaatatagaaccgccctcacacttcctgccggatgcagtcaatttgacagtgtgcctcattcagagggtgttgcctacatccagggagtgtcaatttttttttattgaatgaatacctgattaagttaatgacgctgagctgggggaggaggagcagtttggcagcccaatgctgaagggcttctggcagctcattcagtgtccttaatgttccattggctttgtgctgggccgcatgtgagccccaggagaggctgctgtaattactcagcttttttattgaaaacagctgcaggtagcgagtcatcccattgtccatcttgctagtgactggaaacaactcggggccatcttgggctccactacactgcagcctcattctgaagtcagtggaggtagaaagtaggcttcccacttgctgggcttttcaaaatgagccattcatcttttgagggtcagaagtcagccacccattcaccgagtgtgagtcatacccctaattttaaaacaaacatttattgcagagagaattcttatcttggccgatgtgtacagctgatctccttgtccttcctacgattgatttaggctggtttcaacaaaattgttgtctttgtaaatacacacctcttccagtaaatccagagactaccgaggtgtttccttgagattgagcctaagacaatctttaattagttttggataattggatatgaatgtttagaggccttcccatatagcaagtgtctttaacatctcacacaatatattatacttgtacttcctgacccgagaagtaacaggagttaataatctcacgtgagaaagtatgtttgaaatggaatctcaaggggcagattctttgcagataccacaacattattttatgtccctccgtaatgagttcagttttttatcatcacatccaaaatctagaaaatgatccagaaatcctttgccttttaataaccagcttgtaaggaagacaaactgcaagagatggacacaagataagaacagtaaccaaccaaggacggacagcaccctagaaacccaaggggttgtgaacttcagtctctaagcagcatcggagtttacggtctaatgacgaaaacacgtgaaaacaaggattgcagcagccggaagtggctttgctgagagtttaggaatgattgcctaaggaagtagcagttaggggacccactgtattagtcagggttctctagacagacaggactaataggatagatgtatatatgaaggggagtttattaaggaatattgactcacatgatcaaaaggtcaagtcctacaataggccacctgcaagctgaggagcaaggaagccagtggttgaccagtctgagtcccaagacctcaaaagtagggaagccgacagtgcagccttcagcctgtggccaaaggcccaagagccctggccaaccattagtgtaggtccaagagtccaaaagctgaagaacttcaagtcgggtgttcgagggcaggaagcatccagcacgagaaaaagatgaaggccagaagactcagccagtctagtccttctacgttcttctgcctgctttcattctagcctcactggcagctgattagattgtgcccacccagattgagggtgggtcttcctctccaagcccatgacccaaatgtttatctcctttggcaacaccctcacagacacaaccaagaataatactttgcatccttcaatccaatcaagttgacactcagtattaaccatcatgcccaccatggtgaaggcatgcgggggtggctggtgttagactaattggagccttggaggatagtcgaggaaacggttcctgaacggtgtgtggatgagaatgttggagcagggtgctaaggaggcacagaggagaggcagagggtatggggttggagtggggagagccttaaggaggtgacatggaaggagagacctgaaagatgggtgaggccagtgcttctggaagtgtggttcctggaccagcagcatcagcagcatctgggaactccgggtgaatgtgatgcgcacgctcgagtataagaaccactgcattagaaaacaggtgacagtgccttgcggaggagcggtggctggtgtggaaagtactctaacagagcagagggaacacatacccagaggcctgcagcaggcatatttgaggcttgatcaggacacagccacccacacccactggttacaaattatctgtggttgctttcagcctgcagaggtagagctgagtaatggccacagaggtgtatggcccgcaaagccacacgatttactaggtggccgcgcatcgtcaaggttttccagtccctgattcagagggtggaactgacataacctgatgacagaatcaggggagaagaggcatacagggatatcggccagctttcagtcttcagtgagcaatgacatgatagagcagtgacactaagatactgctgcctcactttttacagctcacagtcccctttgcggatgtgagaaagggcatacagctttaagggcttaaaggatgccctgacgtccagtcctggaatacaggctaatgccagcaggtatctcagagatccttgtagctccaagcagatgagggagcggggcgctgtgtggtttcaaaacagaaatgcagtttgttcacaaacttttaagatcatgacatatttatttatttatttatttgagacagagtctcgctctgtcacccaggctggagtgcagtggtgcgatctcagctcactgcaagcctgcctcccaggttcacgccattctcctgtctcagcctctcgagtagctgggactacacgtgcccaccaccacgcccggctaattttttctattttttagtagagacagggtttcaccgtgttagccaggatggtcttgatctcctgaccttgtgatctgcgcgcctcagcctcccaaagtgctgggattacaggcgtgagccaacgcgcccagccatgacatacttatttttaaaaatttttgactggtgacaaaatatgcataatatgaaatttaccatcttaatcatttttacgtgcacggttaagtggcacattcttgttcaaccatcaccaccatctgtctccagaatgtttccatcataccaaactgaaattctggaaccgttaaacaactcccattgccccgtcctcccagctcctgctaacgcctgttctacgctctctccaaatttgactattctagattcctcatagaaggggaatcatatgatattgttcttttgtgtctggcttctttcacttagcataatgtttgaagatttatcaatgtcatagcatgtaacagaatgtcattcctttgtaaggagagggggatgaataatagctcgtcataaggatataccacatttttaaagtttattcatctgttgatgatcattgggttgttgacaccttttggctcgtgtgcacaatgctgctatgaacacgggtgtggaatatctgagtccctgctttcagtgctttgtggtagatatccagacgtggaattgctgagtcatgtggtaattctgtatttcacattttgaggaactgccaaaatgttttccatgcagctgcatcattttacgttcccaccaacgatgcacataggttctcgtttccccatctccaccaacacttgctattttccatttttgttttgtttttttttttaaaaaaaagaatataatgtccatcttaatgagtgtgaagtggtgtctcattgtggacatagcatataattttaagtatgattaaaggaggttagaacacgacttttgtgttggcaaagtggggaaaaggattggctgctgtaattaaaatcactgagacaggccgggctcagtggctcacgcctgtaatcccagcacgttgggaggccaaggtaggtggatcgctcaggtcaggagtttgagaccagcctggccaacatggtaaaaccccgtctctaccaaaaataaaaataaaaataacatagccaggtgtggtggcaggcacctgtaatcccaactacttgggaggctgaggcaggagaatcacttgaacctgggaggtgcagtgagccgagactgcacccattgcacaccagcctgggtgacagagcgagactccgtctcaaaaaaaaaaaaaaaaaaaaaatcactgagacatactgccaaggacagatggagttagggggcttaaagatcctctataccagccgggtgcggtggctcacgcctataatcccagtactttgggaggccgaggcaggcagatcaagaggtcaggagatcaagaccatcctggctaacacggtgaaaccccatctctactaaaaatacaaaaaaattagccaggcgtggtggtgggtgcctgtagtcccagccactcgggaggctgaggcaggagaatggtgtgaacccgggaggtggagcttgcagtgagccgagatcacgccactgcattccagcctgggggacagagcgagactctgtctcaaaaaaaaaaaaaaaaaaaaaatcctctataccagaggttctcacctctggctgcaaattagaatcccctggtgcatttcctaaaatgccagtggtggtcccaacatctagggattcttattcagttggtctggggtagatctggacattatgtttttaaaagctccctgggtgagtctgatgtgccgtcagcattgatttcttattctgcaggtgagagagtatggccctagtactaaggctgcaagggttctggtctctcagccagagctgctgccactgatacaccattattcagcatgaccacaaacacagtgaaaccagtagtgtcccaggtacatgtgcatcctcctttgtattgtggaggaaatatgtccccaaaatctgcagagccaagtgcgggagccaactcctccatttggtctgttgggatgttcagtattctatggtagatttctagtaagtcaatttcactcagtgggctgaggatattaagacaccggaagttagctgatgtgttcccccattgctccaacactttgaactctgtaccccaaaaattgatccactcagtgcttcttacatgtatgtgccattggggagatttccacagggaggctttctctgagcctttggccctggtgacattacactgagtaatatatatccctgttcctttctgtaccacccatctgcctgttccctggccacagtttggggtataccaatttagattaacctaattattgtttcacaaggcattcttatcactgaacgctgatggatgttacttcaacgttgttatattttattacttggcctatttaagtgtataaccatcactagctataagaaggtgaccaactacaacgttagagagagcagtgcctgcaccacgaattgcaagttcagggggtttcccagaccaccctccgttttgataattcagtaaaaggactcacagaactcactgaaagctgttctactcatacttattacagggaaaggatacaagttaaacttagccagggtaagaggcatataggagaggtctagaggggtccagacatggggcttctgttgccctctgcccatgaagtgatgaacagcattacctcctcccagccatgatgtgaagaatcaccaaccagggaagctcacgcgaacctcagcatctagagtttttattggagctcaattgctactgtcctcatgactgacctctagtccctaggccctcctggagatcaggcaaatatctttcattattagttcctctgaggttggaacgtatacctcatggcccaaagcccccatcataaatcacattgttactccatccagtggccaataaacatacttctgtgaggcaggacattccagaggccgagagatcacctccccacaggtgggggcaaaggccagacctgagtttgggtgaggttaaattcttcatggtcaggcgcggtggctcatacctgtaatcccagcactttgggaggccgaggtgggcagaccgcgaagtcaagagatcgagaccatcctggccaacatggtgaaaccctgtctctactaaaaatacaaaaattagctgggcatggtggcatgcgcctgtagtcccagcttcttggaaggctgaggcaggagaatcgcttgaacccaggaggcagaggttgcagtgagccgagatcacgccactgcactacagcatggtgacagagtgagactccgtctcaaaaaagaaaaaaaattcttcactacacactaatgacccactacacaacccaagaactagatcccaagttttcatattaggattttttgtgtgttgtttctgcccttttttagccatgtaatcttaggcaagtgacttacactctgagcttcaatgtccttgtctttgaaatggggtgatcatatgctagttgttatttatatgtaaagcattgctgtagcctgcacaaattaagcatcgtgacttgtcctgcctgctgtgccttagagagcctgggtcccgggaggtcttggggtctttgcagttgagagcattgaattgtgcagtgtctcagtgactgaaaccaccatagaaggtaagccagtgtgtgacacctggaggaacagctggttagtttatgaattatctggaggcattggctttgctttcattcagccacaccaaggacagtgaatagttttaagactctcccagagtacctcagttcccacgagacctttttcctgacttgatggagagttttatgttctctgttgtagactggggctgtctaatgtcctggaaacccagccccctggtggctggcaggatccagcctaggcctcctggagcagttgctggcgctttgcatcgtgttgtgtggtgaagctcgtgagtgtgtgtgcgggtagacagctggcagccttccctgcgggatgtggaaggaggattctgcatttccccaccatgcgtcttgggaattactcatccaaaaagtattgtggaaaagcaggcagagtgaaacacggaggcattgcacttaacccttccctggaaatgccatccttgagtttagcgtctgagctttctgtttattctgcttgtgtgctgaattgccttccttcttgttggtgtgcataggggtctgcacattgggcacttataaatattatcccacctatcaagtgaagaaaaaaatgaactctcaaacacccatcacttcctctttttctatcacagatgtgaggaaaaaacagatgtttgaaagaattgatagtttgaaggtgttgtattgattacatcatggccaggagagatgagcaacagataagtgtgggtgatcactgagaattcatgaggaaatgtttattgaattataactacgatggcgaccatgtactgagtgtgtgttatactaggcactgtgcatgttaattcttccccattttaaaggcagagattacaactttacacattgttgaaatgaaatttttgcctcattaaacttgggcacatgtataatcgcaagtaaaattaaaattattattttgagatggagtctcgctctgtcgcccaggctggagtgcagtggtgtgatctcggctcactgcaacctccgcctcctgggttcaagcgattctcctgccttagcctccctcgtagctgggactacaggcgcctgccaccacgcctggctcattttttgtatttttagtagagacaggatttcactgtgttatccaggatggtctcaatctcctgacctcgcaatccgcccgcctcagcctcctaaagtgctgggtttgcaggcatgagccaccacgcccggccaaaattatatttttaaaaatggataacataggtggtttggggtaaagccaaggtttgaacctgttctctaccttacggcgtagcccactctaactacaattctgtgtgtccttagtagtaatagcagtggaatattattgatctattatcatcattgttagtaataataatattaatatttatcttgatattctaaataggacagtggatgtgaatgcttcatgcatcgggtagtgagatctatcacagtggtggtaagaaacattcaagtgagagtcaaagtgacaggttctcatcctcctgaccccagttcttactgtgttaccttggccaatacttttcatcttcttgcatcagtccttgaaataagataatgaagagggctcacttcctctcactttgaaacaagttagtctggactgggatgagaaccactaactccaggcagcgtggaaagcatctgtgtaactgttcccagccttcaaccagagtggtggataaacagaaacgtgggtgcccccgggtagctaacctggaatgcactacgctttaaagcaaaaaagtatttgcttctgtattgaatcaggaaaggtcttgacagaaaggcatttccagcttttcttaaaaactccaactcaacctctgtcagacaattcatttgggaccagcttggatccagatggttatttttccatcttgagcctttccaggaattccggcatgggcaggccgccagagacactggctacacagccactgcagcgcgttttccatgtgagccggcttctagggatggcccagccaagctgtggccccgcccctcctccttcctcatccaggctgatcctccagctctcacggacatgtgccatgagccacgcagggggaccccagccacatggccgatgtcctgatgtttccaggggtggcagagctcactaactgcacccccagaactgtcatctgctcactacgaatagcaatggcagaagccaggaatctaagaattgatgaagcctggccctccattatgtggacaggtagtagcaaatcactcagccccacttagggataagggagacagcaacttaaccacgtgccaagcagacaagttcagcagaatggcagccagtgcagctgtgtgtcttgaggaattctttccagcctccccttcaaggcccttaatcaaagaacaactccccactggacgcagagctacccaagccagcgaccacccgaatgagactattattttgggtggatttaaattttttaatcattgcttcaagtatagtcgtatccattgcccaaaaagtctatagatgcatggggtcaaaaaacactactattcgtggtgctgataatataagtagtggggctgcttttctcctgcctttgcttgacccactgcagtcccagctggcagtggtagtggcagattcccctgacccaaccacccccaggaaggtcttgcctcaaagaaaaggaaaatgtggtgtgtgctgctggctgccacggactcaggggagcctgtgccaggttgcaggcttgaacttgcttcttgtgacactagagggagagagcttgtttcaaaagcatgttagtgctctcagttcctcacgtccgacctgtgccagaggctccttctgcagtctcaccactcctatggcctggatcacaattgggtgggtggtcttgaacttggctgctgagcctgaggtcccctgcttgcttgcctgggaaatacaaacatcctgacctctcttccttggtcactgatcagtctcttccttactgaacgtctcaccagctgcagttcttgattagtcaacatggtgcagaggtcccctagacatcttttcccctacttatccctgtgcattctgtcccttttctacatgaaaaataaataggcatatttgctatgaggctgccatcgccatagccaggaggtgagtgtaacccgcatcatggttgggtagactaagaaagtgatttccagtgctagttctacctctgactgtatggccttgggaaaacctcagtgtccttatctggaaaatggagataataatacaaacctcacaaatttgttatgaagagtaaatgagatatttaagtaaggttcttggcatgtataataagtaatcaataaatggaagatatttggattggtttcttagggctgccataataaattaccaaaacatatcgtggcttaaaacaacagaaaagtattctctaacactcctggaggcttgaagtctaaaattaaggtgctggtggagccatgttcccttcataggctctaggggataatctttccttgcttcttgctgcttctagtagcttcgggtgatccttggcttgggactgcgtcattccagtctctctgcctctgcctccacagggcctttgcctctgtacatctcacatctttctctgcctttctcttataaggacatttgtctttgaattgagggcccacctggatcatccagcatgatctcatttccaaatccataattacatctgcaaagaccctttttccaaataaagccattcccaggttctgagtgggcataacttttagggatctaccattcaacccactgtccttccttattcatgataaaaattaagatacataaaattatttattttttatgtccttaggccctcgtgtggactccttctagcttggattacgagctttcatttcttgctttttctcttctcactcactacacttccgtgaagagcaagatcccatgtcccaggggtgcagagccgagaagggaaacccgagcgcgttggggcgaggctctcagacagcatcttctacaaagttgtgccaggtcccagctcgcctctctggtggtttctggcctggatgtctctagacagggccttcagtccccttcaggagcctcctcattttgggccaagaggcctgccccatgaagctccacgcttagatagacatggaagagaaggtcaatagtcagtttccactgaggacacagcaagaagaaattgtgacagtagactgggatgacaagccagccaccttgacacagagtggaatcacagtctcagaatgttcctaatggcaaaaaaatgtagagtaagtagttcgaacacccaaccagggcagggacccctaccccatatccctgagtttctatcctgacccttggggtgacccagagatccctgactcatgaggcagcccagtccatttttaaccattctcattgcttcctaatgctgcagctttttctgttcttccccagggcactcattcccagttgtctcagctgttactcatctgcttgcctccagacctcttgcgcaactgatcactccccctagacatgccccatccttcccacgtgcctttgcagcaggatttcaactgtggctttacccgtgccatctatggttgcagtatttattcccttattctgaacattgttttctttctcttttcttgagacagggtcttgctttatcacctaggctggagtgcagtggagcaatcatggctcactgcagcctcaacctcctgggctcaagcaatcctcctgccttagcctcctgggtagctaggaccacagatgcaaaccaccatgcctagctaattttttttattttttgtagagacaggatctcgatatgttgtccaggctggccttgagctcctgggctcccaaagtgctgggattacaggtgtgagccactgaacccagcctgaacattatattttttttaatgaaggttataattactatactttttaagaaccctaccaaatggttgttcatattgagtgtatagtcaaacaaaaactttctgggctctttcattgaaaccattattaaaccagatctcttcaaccctgctagtaggctaattgagctgttgaaaccaagggcaggcatttacatttattctcattgatcttaattttcctggtttggtaccatcacttccggcttcttaagatatatttgaatcttattcgcaacatatatcccttctagccttctgttacttcgaaatatgataaccaaaacactgtattagtattgaatagaacagaactaaaaatagagttctggcataccatttgcttcacactgacattgaacaattgaggtccccgtcatacatactagaaacggaatgagtgtttgatgaatgaatgtgtgatccactttgggggcatgcctgttcagtcaaccataaaggcatctaattatagctatcatccaatccacctttctccattctagatactccaagcatgtcgggtttggacctgtttttaatgcttggccaaaatgaagtgctttctgccagtgcaccacacaggccttccagtttagtgatgtaataaagctggaaggagattggtgagtcagcactttgagaatccttgacatgcccaagtaacctctgtcctcacacccaggtattctgccctcttcagtgtttgcatacgtagtttttccagtcctggcacaagctcatcagcctgctcttcctcttctttaaagctgaaaccgtgccctgtttgtccatagatatacaggccaggcagccatgggttcattcaaactgagaagcacaggattgggggtgtaggaaaagcaacccattttcttgccctaggtttaagatgtatttttaggagtttatatatcaaattctaagagcatcttccattctgagcagttggctgctatttactggacttgcagtcagtgggcatatattccccacatccctagcacagaagcatctcattttcctatcacttcccaagcagtctgaatccatggtaatagcaaaaaatttctcgaaatgaaattatagcaaagaaagaagtgtggagcttcctttgttaaatttcatttttcttcctgggaatgattgagttgtgtataaaatttatgataatagcctttttaaagtatatttctctgcagttgtgtaaagaaccagaagaaaagcagcatttgttatttgcagccgtattaggtttagatgaccccagaggaagcagtggagcatcacctaaatattagatgtttatctccgaggctccatcaactctgtgtttacgtacaacacctagtttggtttcccagtgcctgctccattaggaagaggctagagatgtttaatttgcttaagagtttagcagtagaaaatttaatcggatagctgctagggtttctcaaaccttactgtgcatagaatcatctggatatcttgttaaaatgcaggactgggtggggcctgagagtctgcatttccagcaaacttgcagaggatgctgatgtcacgggtcggaggaccacacttcgactagcaaagccttataccactgggctaaatttagaaattatgatagagagatagttaatgtagctctaaagcggcttaagatgaatgtattcagaacagtgattatcaggcaaaccatgggtagcaaactctaaatacatttgtcttgattcatctattaactctccctccaatttcccttttccaataggaatgtttaaacagtgcgatctgcatatgtggctctctggtaatttggcattgatataattgtgcatggccccatgtttggaagaaatctttttgttgtggcaggtgcttccagagataaactcctcgggggtcccctgggagggcaattcaggacacagaggccagttgtctgcaactagagactctaagagcagaaatcccactctccttttttcttttttcttctttcgtttctttttctctcttccttattttccaaatctacttttccaccttcataagttacttctttgttgtttagtcccatgatcacccgatagaccaggaatgtggtgccatcctggggcgccctctggtggttcattgaaaatacagcaagacccaatctctacccgtgggtttccccttatcagtactgaaagcttacggggcccagagaagggacacatacctcagcgttagagagccctgtctgctccgtgctgcactggtaaatagccctaaatgtaggaggaggatgggtggaaacttttatcggtttggccccagctcgctgcaactgctgtcttaatcattgtgtccttgatttctcattggcaatctctggaaaagatgctgtttatcaatggataagttttcagaagaataaatttggatttgtgtgttaaggccaatatgtcttagcaatcatttcgcagaagaccagtccagtgagtcttcagggctgactaagccgatgtctctcaaataaacagtataattaaacctgagcactactgagaaccaagtcagcattctttttcaaatttacgaaagctggcttcctaaagaagtaccttcagaggagttttctagttttgtgtattgtgcattcaattgtacaggcaatgttacatttgcattgctaatagacccttcctgaatgtgtttgacattttacttggctttgaaaggacttttatgccgctgctttttcttccctagtgctgccttgggctaattaacctattcccttactggctgggcctactatatgcaaatgttctcattttgcattctgacacatcactcttgcataaatatccctcatgaaaccctgtggggttttattggatcagtgctgcaggagggccagcagggggcgcatggactggttctctctgagtaggtctcacgcatgagttttccttgctcgttggtatggaaatgtgggagcgtttggcattccctttcttaagagtgagtcttgaaatttaaagataaaagttcattattagaacttctttttacaagggaaggctgtacagaacacagttatttgtcacttacaaaaaccctaggtgggcagggcgcagtggctcacgcctgtaatcccagcactttgggaggtagaggctggtggatcatttgaggtcaggagttcgagaccagcctggccaacatggtgaaactccgcctctactaaaaatacaaaaattagccaggcatggcggcagccgcctataatcccagctactcaggaggctgaggcaggagaatcgcttgaacccgggaggcggaggttgcagtgagccgagattggcacattgccctccagcctgggcgacagagtgagactccatctcaaaaaaaaaacacctgggttgcgagagtaaataagtgacattactccttcaacacttcatttcttcagcataagtgttttagggtttttttaaccttatttttcatttccgtcccagtctttaagcgcctctcttgtcatatgagaaattctattcttactgaaatgtcctttgatatcgagacaccaaatttctaaacctgcaccttcctagatatctgatcaaaatcattaaggattgagaactttctgttgtatcatttgtcatttcattatgatgttcattgatgatgttggagcaaaaccaataagggccattaaatcattgccccttccaagctggctgcagtggctcatgcctgtaatcccagcaccgggaggccaagtgggtggatcactgaggcctgttcaagaccagcctggccaacatggcaaaaccccacctctacaaaaagtacaaaaattagccgggtgtggtggcgtgcacctgtagtcccagctacctgggaggctgaggtgggaggatcacttgagcccaggaggcacaggttgcagcaagccgagatcacgccactgcacttcagtctgagcaacgaagcaagaccttttcaaaaaaaaaaaaaaaaaaaggaaggaaggaaggaaaaaaatcattgccccctctaaaaaatagttacaaagtagggggcagagtagagaaagggggttatgtttcagtagggatttcagtgttgctccaacatggacaaggattgaatgctgaaggccgctactttattgtgtttgttttaaaatcggatcattggctacacacagtggctcatgcctggaatcctagcactttgggaggccaaggaaggaggatttcttgaggccaggatttcaagaccagcctggttaacatagcaagaccccatctctccaaagaaagaaagaaagaaagaaagaaaatcagatcattgaaaagagggtctggatgtgagataccaaaacccaagggtgtggaattcccaaagcccaatcccacagctctcagaatcacagcatgttgcactgtgcatacctacagctgctacctgtggaagcaatcacatccgctgcttgctagcctgggtcatgtcagttccactgatatttggcctcttgtctgttgggcattggtttgcccacacagcagcagtaactcagacttcagtggttagtaagagactgagatacttgaccataagaactggctccagggtcaccatttgtatgtccaggtttgaacacactgatctgatttgtctgaaagagctgtcgtctctagtgttaatggcgagttgttactttccaatgagaaaggggacggtgtgaaggggaacttcaatgacaacttgaaaaggaagagagagatggacaaaccaagcatgtaacccactgagaaaacattcagtgcactagccctatttttgtatggtatttgggttttttaaccataatcaaattcggtttttaacagtctcactccgtcatcatatgagtggctgtactgggaattcttttgaaacttgcagagaacaggattatttctggcggcctctgctgagttggcgtgtgtgtgtgtgtttgtgtgtgtgtgtattagggagaggaaatcgtaggtccagtgtggacccagagctaaggggaatcttggagagtagtggctctggcagatgaggattcagaaatcgagtgcaaggactgttctggactttcactgctaacctgctttttctcagtgcctggctctgagggcagggtccagctggtgtcatgctctccaagggcttcattttatgttccagccaggcaaaggagaggtgagaaatggaaccaacatttctgaaaaggaaatttaagaactgcatcatctgcccttgaagaagaaaaggagaaaaaaaaacaggagagagggtattgagaacatcttaggggagttgttaactccattaaaaaatatatgtgttacagtgttcacttgcccagtgtcttcataatcttcctttataatgtgcagctgccacggctagtgtttttgtttttgttgttgttgttttgtttcgtttttggagacagagtgtcgctctgttgcccaggctggagtacaatggtgcaatctcggctcactgcaacctctgcctcctgggttcaagcaattctcctgcctcagcctctcaagtagctgggactacagccgtgtgccagctaatgttacaccaggctaaatttgttttttattttttatttttggtagagacggggtttcaccatgttagccaggatggtcttaatctcctgacctcgtgatctgcctgcctcggcctcccaaagtgttggctagtgttttctctgcttcagtgcttggggtatgattgggttatgggagttcacaccgagtccagggcctagtcttaatcttgccaaagatgttctttccccggtgctcatgttctgatgtcctttccctccttccctttctcctccctttccttttccctttgtcactgccctcttccctttcccagcatccagagctgctgttggcggattgtacccacggggagatgattcctcatgaagagcctggatcccctacagaaatcaaatgtgactttccgtttatcagactaaaatcagagccatccagacagtgaaacagtcaccgtggaggggggacggcgaaaaatgaaatccaaccaagagcggagcaacgaatgcctgcctcccaagaagcgcgagatccccgccaccagccggtcctccgaggagaaggcccctaccctgcccagcgacaaccaccgggtggagggcacagcatggctcccgggcaaccctggtggccggggccacgggggcgggaggcatgggccggcagggacctcggtggagcttggtttacaacagggaataggtttacacaaagcattgtccacagggctggactactccccgcccagcgctcccaggtctgtccccgtggccaccacgctgcctgccgcgtacgccaccccgcagccagggaccccggtgtcccccgtgcagtacgctcacctgccgcacaccttccagttcattgggtcctcccaatacagtggaacctatgccagcttcatcccatcacagctgatccccccaaccgccaaccccgtcaccagtgcagtggcctcggccgcaggggccaccactccatcccagcgctcccagctggaggcctattccactctgctggccaacatgggcagtctgagccagacgccgggacacaaggctgagcagcagcagcagcagcagcagcagcagcagcagcagcatcagcatcagcagcagcagcagcagcagcagcagcagcagcagcagcagcacctcagcagggctccggggctcatcaccccggggtcccccccaccagcccagcagaaccagtacgtccacatttccagttctccgcagaacaccggccgcaccgcctctcctccggccatccccgtccacctccacccccaccagacgatgatcccacacacgctcaccctggggcccccctcccaggtcgtcatgcaatacgccgactccggcagccactttgtccctcgggaggccaccaagaaagctgagagcagccggctgcagcaggccatccaggccaaggaggtcctgaacggtgagatggagaagagccggcggtacggggccccgtcctcagccgacctgggcctgggcaaggcaggcggcaagtcggttcctcacccgtacgagtccaggcacgtggtggtccacccgagcccctcagactacagcagtcgtgatccttcgggggtccgggcctctgtgatggtcctgcccaacagcaacacgcccgcagctgacctggaggtgcaacaggccactcatcgtgaagcctccccttctaccctcaacgacaaaagtggcctgcatttagggaagcctggccaccggtcctacgcgctctcaccccacacggtcattcagaccacacacagtgcttcagagccactcccggtgggactgccagccacggccttctacgcagggactcaaccccctgtcatcggctacctgagcggccagcagcaagcaatcacctacgccggcagcctgccccagcacctggtgatccccggcacacagcccctgctcatcccggtcggcagcactgacatggaagcgtcgggggcagccccggccatagtcacgtcatccccccagtttgctgcagtgcctcacacgttcgtcaccaccgcccttcccaagagcgagaacttcaaccctgaggccctggtcacccaggccgcctacccagccatggtgcaggcccagatccacctgcctgtggtgcagtccgtggcctccccggcggcggctccccctacgctgcctccctacttcatgaaaggctccatcatccagttggccaacggggagctaaagaaggtggaagacttaaaaacagaagatttcatccagagtgcagagataagcaacgacctgaagatcgactccagcaccgtagagaggattgaagacagccatagcccgggcgtggccgtgatacagttcgccgtcggggagcaccgagcccaggtaacgttagccagggtggcacagggatgggacaccacaccgtgatgccatcatcatctcctggcaagacgaattgcttctatgaggcaggattaagggttctcgggtacacctagaccttagactcggcctttcccaactgcgttctctagaaaaaataagccccatttccccgtgatctctgctgtgtgtaatgaattaacctccatgcatggagagtggggctagttatggagtccttgagacaatccagaaactcaccactctagttattttttgaattctgtgattaagatgaggaaccctgattaggaaacgctgctggacttcaggtccttctagtggtcattcggcactttttcttaccaggaaaagacagaggatgccgttggagtgaggggattagatgctaaagcaatcatatcccattgcaacatccatgttttaaaatatgtcttattagctgggtacagtggtatatgccttcggtcccagctactccagagactgaggcaggaggatcacttgagcccaggagttcgaggctgtagtgagctatggctgaacctgtgactatcactgcactcaagcctgggcaacatagcaaggcccggtctccaacatatatataatgtcttattatttaggtatgataaggccaacagatagatcagcagacaactctctttgacgagataatttttatactctctgatcccaagaggaaagggcactctacaccaagaggtgtagaacaccgtaaagtggggggcacctggggaagccccaggtgggtcaggaggtggagggagtgaggggaaatgtggcaaacaacagcctttattgtggtttcatgggaggcagggtaaacgggtttaggattggttagagtggataattccagtgtgctctggggtgtaggggctgtccttagttgtctggctgctggtgctggggtgatcaatacaggtggaagggctgggcacagtggctcacacctgtaatcccagcactttgggaggctgaggcgggtggatcaccagaggtcaggagttcgagaccggcctggccaacatggtgaaaccctgtctctactaaaaatacaaaaattagccgggcatggtggtgtgtgcctgtaatcccagctactccagaggctgaggtaggagaattgcatgaacccgggaggtggggattgcagtgagccgagatcaggccactgcactccagccttggacacacagcaagactctgtctcagacaaaaaaaaaaaaacagatggaaggcagccctaagtgtgatggaccaatataggaggctgctggggagtgggctctggactggttagtttgcatatgaaagtcaggctcctaggaattagctctggactggttggtttgcatataaaagtcaggcctctaggaattagctaatcctaggagagactatacctctgggatccacaagacactaaaatatcaaagcatcagaaaataaaagcgtggttaatacaatctgagaagtcagggctgtcccaggtgacctgctgggcttggggtaaagtcagctgtagccaagatgagtcactggaagtatggttaacgctcttaatttccacaggctccttcaatctacccttttccaggttcttagatcgattacatgcatttattccacagcccatttctttcactgcccaagttgctgggagtccagcaggttcagcctgcagctgagagctttcctggctatcgagcgtactttctacaagtgtttccatctaggatttgaaaacattcaaatgggacagagcctccttccagcttgagttgaaaatagtcatgaaatagctgctatttgggacattcagataaaataaaacaagaaaaaaaagataaactaattaatggtttgaattgttttgggcatttttttttttcatttttgagacagtgtttcttgtctcctaggctggaatgcagtggtgcaatcatagctcactgtggccttgacctcctaggctccagcgatcctcccaccccaacctccctagtagctaggaccacaggtgcataccaccatgcccagctaatttaaaaataaaaaacattttagtagagatggggtcttgctgtgttgcctaggctggtctcaaactcctgggctccaagcagtccttccacctcggcctcccaaagccctgagattacagacacgagtccctatgtctggcttttttgagcatttcttaaatgcccaagtgaggaaaggaccaaatcagttttccagaaccactcgtgaatgactggatatgggggcttgcacaaagccggggccctgcattgccgagagcttttagccctgaatacttttctttgtattatgagatgtcactgtaggtttacagtctttggaagggcccaagaaagatttccccaaagatcttatttaaaaaaaaaagaaaatcaggatttttaaaataaatggcataataatacagctcactacccctctgtagtggctgttcacttcctgcatgaattaggggtgggtactaggagaaagaaaatgaactaccttgagcaaagttgactcttcacagaccccaggtgacacatggaaaataaacatgagtgaagagtcattgcttttcatggtacttagaatccttaacacatttttgtgaacagaggcaggtgtgaaaagaggttttgtttagaaatgcgactggttccttgccggccagcatcaacttcagcttgagaatgaaggcagccacttcagctgtgggccacacttcccaggcctggcagcctctgcagaaaccagactcttctattttttttttttttttttttttttttttttggagacagagtcttgctctgtcacccaggctggagtgcagagtgcagtggggtgatcttggctcactgcaacatctgcctcttggttcaagtgattcttctgcctcagcctcccaagtagccgagactacaggcacacgccatcaccccctgctaatttttgtatttttagtagagacagggtttcaccatgttggccaggctggtctcgaactcctgacctcaggtgattcacccgcctcagcctcctaaagctgggattgtaggcgtgagccactgcgcccagccccttacagccctcttctgttcttggggaggaagatctaggtgtgtttttccctactccaaactttgcaaaattaatgattaaatgaaagagaaattggcttccctgtgaagtcagagccctgttctcatgttttttcccatagtgagatcactaaatctctctactgacagccagggtgcagacgagcaggtagaagtgttgtcagggcctgttggcaggtctgtgaggttggcccccgcgtggctatgctgcatgccgggaagggcttcctcaaagaaaggcaagtgtgctgagacctgctgaaaaggcagctagggcttcacgctgtagaaacaaaagtgcaaggcctgacgcaaccaatgatttgtcactttaccgaggagcctatcagaaatcggctgacatcatcacagctaaaatactccaccagctgtgtttgccacaagtgacaggttcagagtcagtggagactcagacagagagcatgagagggggagatgggagggagagagagaactcatatctggacttaattgaggttccaaaggctacatccttctcccctctgcagtgccttcctgaggggttttctcccctagcctgaagaatcttcctggtcttctcaactggttaggcactgctgacactgcacccacagagaaattcagaaatgtgcaaattgttgagcttaataagcaaaatcacaaatttgattggggaagttgtggaagaagagatggttttctccaaaacagatggcattgtgactctaggcagaaatcctgcatgaacagactcttgaggatgcctgaactcataagacccccccaacatcacacccccagggaaagcagtgtgatatagtatggtggtgacagacccaggggtgcggatttgggtctctggcaggacaagttacttcacctctctgagctgcagcactctcctctctaaaccaggcaaatgagttttgtttttctgtgggtttttgtgttcgtttgtttgcttgttttgagacagggtcttgccctgtcacccaggctgaagtgcagtgatgggatcattggctcactgcagcctcaacctcctggactcaattgatcctcccacctcagcctccccagtagctgggactatgggtgtgtaccactacacccagctaattttctgtgtttttttgtagagacagggttttgctatcttgcccgtgctggtctggaactcctgggctcaagcgatccacccacctcggtctcccaaaatgctgggattataggcgtgagccacggcgcccggccacgtatgattcttcataggagataatctcttgagagggttccgttttttaatgcttcacttttatactttccagaacagcacagcccttgtaaaaatttattagcgtcggttaacaaaaaaccaagaagagcattaagatgaacatgtactgacctcatgctaagcggcacacagacctcatgggaactaaagccatggcatataaaactgaggggtgtttagtttggggatgatttttaaggggctgaattcctcattaagactgtggaaagatgcccccagcattgtcccagctgacgctccagacgaggcaatgtaggagaaaaatgcttttccgtgtttgtcactatccctgtggcattgccctgcccagtacagcttttctccactcgagcaaagcgtctatgcatcccccaggcccccacctaggtgctgtgggaggaaaggggaatgccaggtgttgtccattgttactgcgtgcaccaaaggaagcctccttcctcttcagtggagggtgatagcacgttccccaccctggaagagagttgctgctttgccatgccttgattctggttgagagtcccaaaggatgacagaatcacttcccttgggcctcactgccaaatataatccacttaatatcctccaagtttgaggccataagtctgtggcgcatccagatgcgacccccgaggcgatagcatcaacgtgggagccaatgcaactcaaaagaaggatggggcttcgcacctcctccttgggtaggaagtaggttagctgcttggaaaatgcaggaactggcactgaagagatctgagtctgaacatatccctcacccgtcagtagcactgggaccttgtgcaatgttagttttcccttccctgcttcaacttagatggctcgggccctgagaaagtgattcacagctgaaaaataaatcaaaggcctcgtgttctaaaaagagtttatggaaggagaggcagctgatgaaagtctagaaagaaggctgaacttttccaatgagcacaataagccatttttaccctgcctgtaatcctcggggtggaatcccgcgagtggccgaggcgagcacccttcccgccgttcctgtttctaaggctaaatgatgtcatgccagcctgcgtgagcatatcaatctgtatttctgagtatgaactggatttgaggggtgcattggtgctccagccctccagatcagtaagacaaccaatgcagaaacaagggctcccaggctcctcttctgcaagaggctgttagtgacgtgcccgctgggacagccctgcccaggatggccccagctggggagcctttggcttccatctggcggcgttctatattatcccatccttctgtctcacccttcctaggttcagcttctctgaagagtacacagcatttgctcagtggagttgtaaaatgtattggtaaagtgctctgggttgacacgttcctttgcttctttcctaaatgccaggctctgtgttattagggccgtctgtcgcttcccagcgcctcccgaggtgactgcttccctgactcggtggctgcttaatattcagtgccatttcctcctcccgactgtcctggcgtgggtgtgagtgtgcctgtgtgtgtgctcgtacagcagttgttatcatgatgtacttactggctgtctaccgatggctttcctttcattctactattttttggttgacttctgtgagctgtgagtcatcggtggtaacattatgcattgaatggattagctggtacctaaaaatagccgaggccctcatgcaggcggcacatgagcctgtagagtcagtccctttgcagccaaggcagacccacttgccaacattgaacatgccgagcttggtggcgatgaatcctaatgtatcaaaaaatagatagttggtgactgccctgtgtgcagagcccagccctggatttgtgccgcagttgttggtaatacacacttcctgtctgttctggtgctggaaaggctccaacagagaaactatgtcaaaccacatttttgtttgtgggtctttgtacctctctaaaaaaaaaaaaaaaggagaaaaatgctctcctttaaactgtatgtgctatatgtgcccccaactgggtcatcttatatgttttgattctctcagactgttgttgtttatagcatttagaaaaaaattaaagactattgtttaaagcagttttaggtgtacagcaagtagagagaggtctcacacacctaacagttttccctgttattaaaatcttgcattggtgtgatagattggttacaactgatgagccagtaccgataccttatttttaactaaagtccatagtttatactacagttcactctgtgttgtacatgctgtttttgatgaatttatgatgtcatgtatccagcattacattattatacagaacagctgtaccaccctaaaaatcccttatgcatcaactatttgtcccccacaccccacctgaaactcctggcacccactgatcattttactctctccatagttttgcctgttccagaatgccatgcagttggaatcatccggtatgtcgccttttcacattggcgtctctcacttagcgatatgcatttcaggttcttccatgtcttcttgttgctctgatagctcatttctttttagcactgaatattatgttgttctttaaggcacattttttttttttgagatagggtcttgctctgttgcccaggctggagtgcagtgacaccataatagctcactgcagctttgacctcctaggctcaagcaatcctcccacttcagcctccctaggaacagggaccacaagtacacaccaccacgcccagctaatttttctatttttttgtagagacggggtcttgccatgttgcccaggctgctcttgaactcctgagctcatgtgatcctcccgcctcaggcccccaaagtgctgggattacagggatgagccacccttccctgcctaaggcacacattttaaggccccagaaaaggaaggcaagtgagctagaacctgtgtgcctaagggcttccgtgtcacagctgctgtggtcactcactgggcagtgtccttcctggccatccctgagcctccccacagggccttcccacaagggagctctgtgagccacgctaccatgtgtaagaaaaacccagcttttaatgtgggatttgtgttaggaggcgtcccggtgctagggtgtgggtttactgaacaaccctgaaacacttccaccaaggactgagtcaggctttgcgtgaacatgattcagtgttttaaatagaacactcacagagattcttacactcagccaaagcgttttgactgtttttattaatgatttttaaacattgcagtaaatgggtctctcgcttacccccttcatctttgagacggggttttctgatttttttcatgctgagaacgtaaccatgcagacttagccttccaggaaagcagaccggcctttctctacaggtaaaacaagactgagaatttcacttgcagacaaagttaagaatgcccaatttaataatttcgccaaaaaacaagacatacttactgaaacctagcttatgagagaattcattgctcccagcaacaggcgaaatttgtatgtctgggatagtgtcatgaaaaaatgttttgtaaaacagatgcccttcgcaatttgtgaaaacagggactcttgtgaaggaaatgggagacatatttaaacaacagacgttttgttttctttctatcttgtttttggtgatatgtacatatgtgtgtatatagacatagcaccaatctaagattgaaatatacaatcaaacagcataaatatgcgtgtatgtgcatagtgtttagatatagtagttattgactaagtggtgaaaggaattttattgaattttcatacagaggagctaaaatttttcttaaaagccagtcattagtcagattaggaaggtgacatttaaaaaataattatgagcccagaagtgagtcggtgttgtctccctgtctaggttcgtccatccaaaatgggagttggaggtgacagttctagaggagtcgatttagggggatggatggaggaaggggtaggcagatctcttataaccacactgatgagcacatgggcttgctggcagcagtgggaggagggagggaaagagtggaggagggtgggaggcggtccacccccaaaagcaagaggtgctggcgacagggcatccagagatgaaagacagagggccctcaagcttacaaaagtataaaggccatccctgggcgcggtggctcacacctgtaatcccagcactttgggaggccgaggtgggtggatcatctgaggtcaagagttcaagaccagcctgactaacatggtgaaaacccgtctctactaaatacaaaaaaattagcctggtgtggtggcaggcgcctataatcccagctacttgggaggctgaggcaggagaattgcttgaacctgggaggcagaggttaccgtgaatcaagatggcaccactacactctagccttggcgacagagtgagactctgtctcaaaaaaaaagaaagaaagaaagaaagaaaagttataaaggctattctacttactgcttagggtgtttgaaacaggatatatttactggatgaaaaaatgggctatattgagctgtctggcgttatgtaacgtgctttggttatctgtggtactgctcccatgagtttattttcattgggatttaatcagaaaccattctggaaaatgtgtggaaccccagcaagatcataaaatgacttaatgattactaacacagctgcaagaacgagagtggagagaaaataactgaagtgtgattcaataaaatcatgacgacctcagcatctgacaaggtgaggtggctatggctccgctgagaaagctgcctgttaggcggtaaagccacaccctggagaaagcactgctcctctccctgggggaggtcacagcccactttagttctggctggttaaaaaaaaaaaaaaaaaaaaaaaaaaagacaggcagtctctctattgccccctgttgtccacttgtaccattgcaatgtttttccatacagaaggcaaacagaactattctttcagttttttttttgttttgtttttgttttttttaagacggagtcttgcactgtcacctgggctggggtgcaatggcgtgatcttggctcactgcaacctccgcctcccaggttcaagcaattctcctgcttcagccttcagagtagctgagattacaggcacctgctcccacgcctggctaatttttttgtatttttagtagagacagggtttcaccatgttggtcaggctggtcttgaactcctgacctcatgatcagcccgcctctgcctcccaaagtggtgggattacaggtgtgagccaccatgcccggcctcttctttcagattttaactgagcacctattacttgctaggaagtcttttagactctggagatagaacactgagtttggggaaagaggcaaaacagacaaatatacaagtaaataaaaaagaatgcataagaagataaccagtcccttttggcaccagggactggtttcatggaagaagattttttggcaggatgggaagagggagggggatggttttgggatgaaactgttccacctcagatcatcaggcattagttagattctcataaggagtgcacaacctggattccttgcatgcgcagtttacaatagggttcacgctcctatgagaatctaatgcttgcgactgatctgacaggaggcggagctcagtctggaatggttgctcacctccagctgtgcagcccagtacctaacaggccatggactgctactggtctgttgcctgggggttggggatccctggtataaagaggagaaggggccaggctaggtggctcatgcttgtaatctcagcactttgggaggctgaggcaagagggcacttgaggccaggagttttgaaaccagccaggccaacatagcaaggctccatctctacataatgatcatcattatcttcaccaacaaaacattagctggacatggtggtgcatgcatgtggtcccaactactcaggcggctgaggcaggaagatatcttgagcccacgaggtcaaggctgcagtgagccatgatcatgctactgtactccagcctgggcaacagaacaagaccctatctcaaaataaaaaaaggaagctatggaaactagagggttgttattttaaatagaactgtcaggggagttctctctgaaaaggacagtgggtggcaacagtacgtgaggcaaaaaagattccaaatgaatggagagagtagcaggtgcccagacggaaggcgcaagaggggttaaagaaccagcaaggagaccactgttgctacagtgtagggagtaaggggcacatgcagaccacatcaggcttgcatgtggtgaccgagcgagtgagatgcagcttggccaggacaaaggtggtggaggtagtaaaaaaatagtatcattctaggtgtatttggaaaaggaacccatacagtttgcttataattgggatgtttgtgatgtaagagaaagagcggaagaaagtatgattccaaggtgcttgattgaacagccggaagaatgggataccatttatggagatggggaagaacatgggatggccaccgggcaggggcacatcgggaggtctggtgtgttttaggtcactttaagtttgagttgcccattcgacatctgagtggacgtcatcggatagtgtggtcactggtgtccaaatgtacccgttttgcgtgtatgttctgtctcctggtgggaggcaagaaactaggtcttaaccaatagatactcttctaaggttcctaacacttagcaggtgctcggtgtatacttgttgaacttttattaaaactggaaagcctgaaatgtatcattaggaaccctcaataatattttgaggccgggcacggtggctcacacctgtaatcccagcactttaggaggccaaggcaggcagatcacttgaggtcaggagttcaagaccagcctggccaacatggtaaaaccccgtctctactaaacatacaaaaattagccaggtgtggtggcttatgcctcccagctactcgggaggctgaggcaggagaatcgcttgaacccaggaggtggagtttgcagtgagccgagatagtgccactacattccagcctgggcaacagagcaagactccatctcaaaaaaaaaaataataataataacaatattttgaagctatcagcatcatagagaatacccatatgggttttaaattcaaggaattcacagacttattgttccagttgaagatgacatcatcctacaaaatcacaccgtctctgtttcacatccaaaccagtccccgctggcattgacagcatgttttgagatggagaaggctcctctccaagggaatttcaagcaacagatttgatgatatatattctcactgagaaacccctcagtgagatttcttcattaacggttaatgatcagttaacctttaagaatgtttatatccttatgacaaacctaattataaaataaagatagatttgctatgaatgcttgagtgtacctatttgagatgtgtgcaacaagattttaactttcaccaaagaagggaaaaaaaccttattttacttctcatacattcagaccccaagggggaaaaagtacattgtctaggtagttcacactaattagtgaggagaaaactagcattgggctggcaagctatccgatctgtgcctacaatgatcagattatctgaataatcttccgctcccacctcagctttcatggacccagctgatatctggtcgtggcatcttttcgcagggtgacacagctcctttggtaggaagcaaaggcagaatttaggcaaaaagaaacaaagagaagcctttgaagtgattaaagaagaatctcccaagcctatctaggttaacataaatttcattaacaggccaggtgggcgcggtgactcacttctgtaatcctagcattttgggaggctgtggcgggcagatcgcctgagatcaggagttcaagactagcttggccaacatggtgaatgaaaccccgtgtctactaaaaatataaaaaattagccaggggtggtggtgggcacctgtaatccctgctacttgggaggctgaggcaggagaatcgctcgaatccaggaggcagagattgcagtgagctgagatggtgccactgcactccaacctgggtgacagagcgagactctgtctcaaaaaaaaaaaaaaaattccattaacgtcatcttgttttagtacgcatctcaaatattctctctctccatcacttttctctcgtgaatttttcggcaggctgttctagctatggttcacaccacagcatttaattctaaggcctgtctttggagatttggagtttggtttggtttggtttggtttttagagacagagtcttgctctggcacacaggctggagtggtgcagtagctcgagtgaccctcgcacctctgtaactgaacttaggtttggctgctcaccactcaaaagccaaatacgagagatgaggttggtgagaggaaaagcaggtttattgggaaagccagagaaattgagaagatgatgagctagccttctaaagtaccatctccaggccaggcatggtagctcacatctgtaatcccagcactttgggatgccaaggcaggcggatcacctaaggtcaggagtttgagaccagcctgacccacaatggccaaacaccatctctactaaaaaatacaaaaattagccaggtgtggtggcacatgcctgtagtcccagctactcaggaggctgagacaggagaatagcttgaacctaggaagcagaggttgcagtgagccgagattgtaccactgcactccagcctgggcaacagagaatccatctcaagaaataataattttgtaaaaattaagtaaaatctccaattttttaggctggttggagggtttttatgggaggggggtatggggggagacgaaggggttagtatcgaggagactgaggaccatagacatttgggcaccagtgagggttcaagaaggttgagaacttctttgtccttggtcaggtcataatgctccttcagtctttagtatttttaatagagggtttcaccatattggccagactggtctctaactcctgacctcaggtgatccgcccgcctcggcctcccaaagtgctgggattacaggcgtgagccaccgtgcccagccactcctatcagtctttaacaatatatagttagttgtttatatacttcccctttaatcccagagttagtttctaaaagtacatgattgttgtttgtgtatattatctcggtgccataaaattatcctagcctacgtgcaggaaagggtaaaaccctttaaacaaaaatggagttagttatgttcgttcttttgctatttcacaattgtacctcagcctcccaaagtgctgggattacaagagtggtgtctttggagttttgagatgcggaaataatgaaaggctttcaaaatgtccaataacattatgaagtctttagagggaaacacgtgtatctgtatcctgacttttgcactaatcaattatagtacctgttataaagggcttgtagacatttcttaatgagtctacagatacttggtaacgtggaaatcctcagataagtttacctatgagaacacagtagatgttattttcagaaaattaaatattgcctgccctgtgaagtgtgtataatgtggctcacacaccaagggcctctccatgggtaggtgtccggccatctgccagcaaggagacagggagttatccgggaacacgcagaaccagaaaagaggctgacatgtttggaactaaggcttctggtcttctgaatgtcacattacctctgcctggtgttgggcaagaataagcaaaccgcaactctggtagagagtcttacgagacagatgttaacacctgagagttttatttttatgacttggatttgcagcaaaacaatctccacttgatgtgggattggtttccttctgttcagtttatgttgttaatgactctaagaggtttgcaagaggatctatggagccagttccagattggtcctcctacttagaatacagtgggtatccccatctgatacagtcacttgtaagtatatttgtctatgtatatatgcacatatatgtttctgtgtgtgatgtaaatgtagttttgaaaccaaatagtgtcacacacttgtacagggtaactagaattgtatgagtggctataaggcaaacactgcatcacaattatctgtaccatggaacaagcccatgagctcatgcctttggatcctacttatttcagtcaatattcaccactgttggggggtagcaggaatgcttagttcatctcttttggtggcattgtaatgtctttgctcacaagggtagaggtcaggaggcacagaaaaaagaaaatgggtttgggggccaatgactgggataaaatcctaaacccattagctaatagctatgacattaggcaagtgacttaatctctctgtgactattcgtaaaatttacaaaattggaagagcaatactattccatactaatactattatgaacattaaacaaaatactttttgtaaagtttgtacctgagagcttgacagagagtaggcactcaaaaacttttagcttgcttcacattataaaaatagcccagaacaatgaaactttcccccagtaatacacacaggagaaggggttcatgcttacaagctgccatatgaatgtactcaagttgtctcttctaaaaatatgccttgtatggatccagtaaagtctgtcattctagaaatgtatcagaactagatcaatcagagttaacaaaggaaacaaagaagatgaagtagaaaagcaacaatctgtggaaatctactacttttaaagtttttttggtacttcaattatgcatgtgtgtttttgtgtgtctgaatgtgtataaaatccaatggaggcctgacacggtggctcacgcctgtaatcccagcactttgggagactgaggcgggtggatcatgaggtcaggatatcgagaccatcctggccaacatggtgaagcccccactctactaaaaatacaaaaagtagctgggcgtggtggtggtggtgcatacctgtagtcccagctacttgggagtctgaggcaggagactcgcttgaacccgggaggcggagattgcagtgagccgagatcgcgccactgcactccagcctgggcgacagagcaagactccctctcacaaaaagaaaaaaagaatccaacaatattttaaatattgttacatatagccaatattcattcagattcaccatgtatctaccattttcattcctcttcattcctccctgtacaaacttcaatctagatttgttttttctctacctaaagaataccttttagtattttctataatgcagatctgttgatggtgaattcttttaattactgtttgtctgaacatgtctctattttgccttcattctggaaggatctttttgctccatatagaattcgccattgacaattctttttctttagcactgtaaagatattccattgtctccattgtctactggcttccattatttttgttgagatgtaaactgtgagttccattgttgcttatttggagataatatgtattttgttctagaggctttttttttttaatggagtttctctattgtcgcccagtctagagtgtgatggaatgatcttggctcactgcaacgatcttggctcactgcaacgatcttggctcactgcaacctccgcctcccgggttcaagtgattctcctgcctcagccccccgagtagctgggattacaggttcctgccaccatgcccagctaatttttgcatttttagtagagatggggtttcaccatgttggccagactggtctcaaactcctgacctcaggtaatccacccacctcggcctcccaaagtgctgggattacaggcaggagccaccacacccagcctgttctagaggcttttaacgatattttttcctgtttagtttacaagatgtctttgatttatagcagtttaattctcatctgcctcagtgaggatttctttttgtttatttttcctgtttggggctaggccttcttgaaactgtcttattatccttcttcagtttgggaaaattcttagccattacctcctcaagtattaacttctgccctattatctccctctcttcctcctcctaggattcaaattatgtgtctgttagcccctctcaatgtatcctatgtgtctcttaccctctcctccatattgaccatctttttgtctctatgttcactctgtggagtctcttctaaagctctaattagagaatccagttcctgaattctttcttaatccatgtctattcaactggaaagctcattgcattcttgatttcagtggtgtatattttaattctacaattctcatagaccttttttaattaattaattattattattattattatttattttttttttttttagagacagagtctcactctgttgtccaggctggagtgcagtcttgtgatcatagctcactgcaacctctaactcctgggctcaagatcctcctgcctcagcctcctgagtagttgggactacaggcacgcatcaccacactaggctatttttttttaaatttctgtagaaacggggtctcattttgttgcccagactggtctgaaactcctggcctcaagtgatcctccctgtctcagcctcccaaagtactgagattacaggcatgagccaccatgcctggcttcatggatcttttaaaaacagattctagtttcctatcaaaattctcaagctgtctttaatcttcttaattattgtaagcatagtctttgtaaagtctatatgtatgactctatatgagaagccctggtgcatccttttttaagatctgatattttgctagtgcttatacaagctatctggtctcctcatgaccaccaccccccttttttaaattgaatgcttttatttgcaaaattgtgaaagtaattcaagaccttaatccagttttagggactcagatgagtcaatctgagcttcagaccttgaaaggcctgttggcttgtggttcactgtctcctctaagggacagtgctttggggtcacaactcaaaagaatggggctcaccagagaacaccctcccttggtgtatcctgaactccattacctgttccctatgctcttaacactatcaaaagcccacttggtttcccaactgctccactttggaatgttcaagtgccttcaggagaaaacaggcccccaacaccagcttcacctctctgggccatcatcttttcctgatccaacccaggaagtgtgtgtgtgtgtgtgtgtgtgtgtgtgtgtgtgtgtgtgtgtgtgacggagtttcactctgtcgcccaggctggagtgaagtggcatgatctcggttcactgcagcctccgcctcccgggttcaagcgattctcttgcctcagcctcctgagtagctgggattataggcgcctgccaccacacctggctaatttttgtatttttagtagggacagggtttcaccatgctggccaggctggtctcagagtaaagtggcacgatcttggctcactgcaaccttcgtcccccggactcaaacgattctcctgcctcagcctcctgagtagctgggattataggggcccaccaccacacctggctaagttttgtatttttagtagagatggggttttgccatggtagccaggctggtctcaaactcctgacctcaggtgatccacgcgccttggcctcccaaagtgctgggattacaggcatgagccaccgcgcctggcctttttactatcttatttgctgtccagtactataagaaaaaaagtttaaacattttgtccagagtttttaaatttatttgtttgcttatatttttgttcagagtttttagttgtcctcagaaggagggttggtccaaattacctagtctactacatctagaaaggacattggaaattgactttttttttttttttttgagacggagtctcactctgtggcccaggctggatcgcccagtggcacgatctcggctcgctgcaacatctgcctcctgggttcaagtgattctagtgtttcagcctcccaagtagctgggattacaggtgcccgccaccacgcatggctaattttttttttttatttttagtggagacggggtttccccatgttggccaggctggtcttgaactcctgacctcaaatgatccacccaccttggtgtcccaaagtgctgggattacaggcatgagccactgtgcccagccaccaagcatccttttaggggctggggactcagtgataaacacactgtgcctgcttcttggaactcacagtctcactctgatccatgtttagtcctgtcctgtatgataatagcagttgtccattgagctcataaaatctaagaccgcgctgggcttgtgagccacctgcagagcctagcttggtgctgaaagctaagtgggtgctctgtcattactggggttcgattgactggttctaacagagaccagctatagagctaacacttgatggaatattttgaatattgatgaccttttcactggcttctgcctatggcaagtagaggtacaacccaaagagaagagcctcatttatagtgtgtggctgggggagagggaggtttgcaaactgagtcattttcccccattcagcctgtgtgtgtctgtgtgagttcatacctgtgtgtgtgcataaaatcaaacaagaataaaatgttttcatttgttcccttccttcttcctctctctgtctctccctgtttccacaggtcagcgttgaagttttggtagagtatcctttttttgtgtttggacagggctggtcatcctgctgtccggagagaaccagccagctctttgatttgccgtgttccaaactctcagttggggatgtctgcatctcgcttaccctcaagaacctgaagaacggctctgttaaaaagggccagcccgtggatcccgccagcgtcctgctgaagcactcaaaggccgacggcctggcgggcagcagacacaggtatgccgagcaggaaaacggaatcaaccaggggagtgcccagatgctctctgagaatggcgaactgaagtttccagagaaaatgggattgcctgcagcgcccttcctcaccaaaatagaacccagcaagcccgcggcaacgaggaagaggaggtggtcggcgccagagagccgcaaactggagaagtcagaagacgaaccacctttgactcttcctaagccttctctaattcctcaggaggttaagatttgcattgaaggccggtctaatgtaggcaagtagaggcagcgtgggggaaaggaaacgtggctctcccttatcatttgtatccagattactgtactgtaggctaaaataacacagtatttacatgttatcttcttaattttaggtttctgttctaaccttgtcattagagttacagcaggtgtgtcgcaggagactggtgcatatgctttttccacgagtgtctgtcagtgagcgggcgggaggaagggcacagcaggagcggtcagggctccaggcatccccggggaagaaaggaacggggcttcacagtgcctgccttctctagcggcacagaagcagccgggggcgctgactcccgctagtgtcaggagaaaagtcccgtgggaagggtcctgcaggggtgcagggttgcacgcatgtgggggtgcacaggcgctgtggcggcgagtgagggtctctttttctctgcctccctctgcctcactctcttgctatcggcatgggccgggggggttcagagcagtgtcctcctggggttcccacgtgcaaaatcaacatcaggaacccagcttcagggcatcgcggagacgcgtcagatggcagatttggaaagttaaccatttaaaagaacatttttctctccaacatattttacaataaaagcaacttttaattgtatagatatatatttccccctatggggcctgactgcactgatatatattttttttaaagagcaactgccacatgcgggatttcatttctgctttttactagtgcagcgatgtcaccagggtgttgtggtggacagggaagcccctgctgtcatggccccacatggggtaaggggggttgggggtgggggagagggagagagcgaacacccacgctggtttctgtgcagtgttaggaaaaccaatcaggttattgcattgacttcactcccaagaggtagatgcaaactgcccttcagtgagagcaacagaagctcttcacgttgagtttgcgaaatctttttgtctttgaactctagtactgtttatagttcatgactatggacaactcgggtgccactttttttttttttcagattccagtgtgacatgaggaattagattttgaagatgagcatatattactatctttaagcatttaaaaatactgttcacactttattaccaagcatcttggtctctcattcaacaagtactgtatctcactttaaactctttggggaaaaaacaaaaacaaaaaaaactaagttgctttctttttttcaacactgtaactacatttcagctctgcagaattgctgaagagcaagatattgaaagtttcaatgtggtttaaagggatgaatgtgaattatgaactagtatgtgacaataaatgaccaccaagtactacctgacgggaggcacttttcactttgatgtctgagaatcagttcaaggcatatgcagagttggcagagaaactgagagaaaagggatggagaagagaatactcatttttgtccagtgtttttctttttaagatgaacttttaaagaaccttgcgatttgcacatattgagtttataacttgtgtgatattcctgcagtttttatccaataacattgtgggaaaggtttgggggactgaacgagcataaataaatgtagcaaaatttctttctaacctgcctaaactctaggccattttataaggttatgttcctttgaaaattcattttggtctttttaccacatctgtcacaaaaagccaggtcttagcgggctcttagaaactctgagaattttcttcagattcattgagagagttttccataaagacatttatatatgtgagcaagattttttttaaacaattactttattattgttgttattaatgttattttcagaatggcttttttttttctattcaaaatcaaatcgagatttaatgtttggtacaaacccagaaagggtatttcatagtttttaaacctttcattcccagagatccgaaatatcatttgtgggttttgaatgcatctttaaagtgctttaaaaaaaagttttataagtagggagaaatttttaaatattcttacttggatggctgcaactaaactgaacaaatacctgacttttcttttaccccattgaaaatagtactttcttcgtttcacaaattaaaaaaaaaatctggtatcaacccacattttggctgtctagtattcatttacatttagggttcaccaggactaatgatttttataaaccgttttctggggtgtaccaaaaacatttgaataggtttagaatagctagaatagttccttgactttcctcgaatttcattaccctctcagcatgcttgcagagagctgggtgggctcattcttgcagtcatactgcttatttagtgctgtattttttaaacgtttctgttcagagaacttgcttaatcttccatatattctgctcagggcacttgcaattattaggttttgtttttctttttgttttttagcctttgatggtaagaggaatacgggctgccacatagactttgttctcattaatatcactatttacaactcatgtggactcagaaaaacacacaccaccttttggcttacttcgagtattgaattgactggatccactaaaccaacactaagatgggaaaacacacatggtttggagcaataggaacatcatcataatttttgtggttctatttcaggtataggaattataaaataattggttctttctaaacacttgtcccatttcattctcttgcttttttagcatgtgcaatactttctgtgccaatagagtctgaccagtgtgctatatagttaaagctcattcccttttggctttttccttgtttggttgatcttccccattctggccagagcagggctggagggaaggagccaggagggagagagcctcccacctttcccctgctgcggatgctgagtgctggggcggggagccttcaggagccccgtgcgtctgccgccacgttgcagaaagagccagccaaggagacccgggggaggaaccgcagtgtcccctgtcaccacacggaatagtgaatgtggagtgtggagaggaaggaggcagattcatttctaagacgcactctggagccatgtagcctggagtcaacccattttccacggtcttttctgcaagtgggcaggcccctcctcggggtctgtgtccttgagacttggagccctgcctctgagcctggacgggaagtgtggcctgttgtgtgtgtgcgttctgagcgtgttggccagtggctgtggaggggaccacctgccacccacggtcaccactcccttgtggcagctttctcttcaaataggaagaacgcacagagggcaggagcctcctgtttgcagacgttggcgggccccgaggctcccagagcagcctctgtcaccgcttctgtgtagcaaacattaacgatgacaggggtagaaattcttcggtgccgttcagcttacaaggatcagccatgtgcctctgtactatgtccactttgcaatatttaccgacagccgtcttttgttctttctttcctgttttccatttttaaactagtaacagcaggccttttgcgtttacaatggaacacaatcaccaagaaattagtcagggcgaaaagaaaaaaataatactattaataagaaaccaacaaacaagaacctctctttctagggatttctaaatatataaaatgactgttccttagaatgtttaacttaagaattatttcagtttgtctgggccacactggggcagaggggggagggagggatacagagatggatgccacttacctcagatcttttaaagtggaaatccaaattgaattttcatttggactttcaggataattttctatgttggtcaacttttcgttttccctaactcacccagtttagtttgggatgatttgatttctgttgttgttgatcccatttctaacttggaattgtgagcctctatgttttctgttaggtgagtgtgttgggttttttccccccaccaggaagtggcagcatccctccttctcccctaaagggactctgcggaacctttcacacctctttctcagggacggggcaggtgtgtgtgtggtacactgacgtgtccagaagcagcactttgactgctctggagtagggttgtacaatttcaaggaatgtttggatttcctgcatcttgtggattactccttagataccgcatagattgcaatataatgctgcatgttcaagatgaacagtagctcctagtaatcataaaatccactctttgcacagtttgatctttactgaaatatgttgccaaaatttatttttgttgttgtagctctggattttgttttgttttgttttttaaggaaacgattgacaataccctttaacatctgtgactactaaggaaacctatttctttcatagagagaaaaatctccaatgcttttgaagacactaataccgtgctatttcagatatgggtgaggaagcagagctctcggtaccgaaggccgggcttcttgagctgtgttggttgtcatggctactgtttcatgaaccacaagcagctcaacagactggtctgttgccttctgaaaccctttgcacttcaatttgcaccaggtgaaaacagggccagcagactccatggcccaattcggtttcttcggtggtgatgtgaaaggagagaattacactttttttttttttaagtggcgtggaggcctttgcttccacatttgtttttaacccagaatttctgaaatagagaatttaagaacacatcaagtaataaatatacagagaatatacttttttataaagcacatgcatctgctattgtgttgggttggtttcctctcttttccacggacagtgttgtgtttctggcatagggaaactccaaacaacttgcacacctctactccggagctgagatttcttttacatagatgacctcgcttcaaatacgttaccttactgatgataggatcttttcttgtagcactataccttgtgggaatttttttttaaatgtacacctgatttgagaagctgaagaaaacaaaattttgaagcactcactttgaggagtacaggtaatgttttaaaaaattgcacaaaagaaaaatgaatgtcgaaatgattcattcagtgtttgaaagatatggctctgttgaaacaatgagtttcatactttgtttgtaaaaaaaaaaaagcagagaagggttgaaagttacatgtttttttgtatatagaaatttgtcatgtctaaatgatcagatttgtatggttatggcctggaagaattactacgtaaaaggctcttaaactatacctatgcttattgttatttttgttacatatagccctcgtctgagggaggggaactcggtattctgcgatttgagaatactgttcattcctatgctgaaagtacttctctgagctcccttcttagtctaaactcttaagccattgcaacttctttttcttcagagatgatgtttgacattttcagcacttcctgttcctataaacccaaagaatataatcttgaacacgaagtgtttgtaacaagggatccaggctaccaatcaaacaggactcattatggggacaaaaaaaaaaattatttcaccttctttccccccacacctcatttaaatggggggagtaaaaacatgatttcaatgtaaatgcctcattttattttagttttattttgatttttatttaatataaagaggccagaataaatacggagcatcttctcagaatagtattcctgtccaaaaatcaagccggacagtggaaactggacagctgtggggatattaagcacccccacttacaattcttaaattcagaatctcgtcccctcccttctcgttgaaggcaactgttctggtagctaactttctcctgtgtaatggcgggagggaacaccggcttcagtttttcatgtccccatgacttgcatacaaatggttcaactgtattaaaattaagtgcatttggccaataggtagtatctatacaataacaacaatctctaagaatttccataacttttcttatctgaaaggactcaagtcttccactgcagatacattggaggcttcacccacgttttctttccctttagtttgtttgctgtctggatggccaatgagcctgtctccttttctgtggccaatctgaaggccttcgttggaagtgttgtttacagtaatccttaccaagataacatactgtcctccagaataccaagtattaggtgacactagctcaagctgttgtcttcagagcagttaccaagaagctcggtgcacaggttttctctggttcttacaggaaccacctactctttcagttttctggcccaggagtggggtaaatcctttagttagtgcatttgaacttgatacctgtgcattcagttctgtgaatactgccctttttggcggggtttcctcatctccccagcctgaactgctcaactctaaacccaaattagtgtcagccgaaaggaggtttcaagatagtcctgtcagtatttgtggtgaccttcagattagacagtcttcatttccagccagtggagtcctggctccagagccatctctgagactcgtactactggatgttttaatatcagatcattacccaccatatgcctcccacaggccaagggaaaacagacaccagaacttgggttgagggcactaccagactgacatggccagtacagaggagaactagggaaggaatgatgttttgcaccttattgaaaagaaaattttaagtgcatacataatagttaagagcttttattgtgacaggagaacttttttccatatgcgtgcatactctctgtaattccagtgtaaaatattgtacttgcactagcttttttaaacaaatattaaaaaatggaagaattcatattctattttctaatcgtggtgtgtctatttgtaggatacactcgagtctgtttattgaattttatggtccctttctttgatggtgcttgcaggttttctaggtagaaattatttcattattataataaaacaatgtttgattcaaaatttgaacaaaattgttttaaataaattgtctgtataccagtacaagtttattgtttcagtatactcgtactaataaaataacagtgccaattgca

SEQ ID NO: 325 - DNA, 116114 bp, Homo sapiens
  source 1..116114: mol_type = genomic DNA; note = NC_000001.11:227563556-227679669 ZNF678 [organism=Homo sapiens] [GeneID=339500] [chromosome=1]
ctttgtcttgtgctccagctggagctttggtcccgtattctcggctatttatccccagctgcgggaggccctggtgactctgctgctgcagtgtctggtttccctgtgacctgcaggtactgggagttacatagctaagatgccaggacaccccgaaagccggaaaacggtgagagttcccgggagggtgttccaagatggcggtccggcctcccggcgtcagcactagagtccgcggcccggagtcccggctggcacctgtgggatctgtcacctctgggtaggggcggggccaggccgccgcgggattctcctcccatcactgcgccgcggcttccgccccggcctctctgggcggctatgaagccgcagccccgcgggtcccccagactgtgtgctttgtccagaggggagggtcatcggggagaagccaaatcggtgtgcgaaacatgcgtgggaagagctgttccatggggcttatcttagctgtgcagtccatcctttttcctgtgaaaaatggagtcacttttaaagctttgaagagtttgaggaaagggagtttcatgaatgggagagcgcccagctatggtgtgtggcttgtgggtttatggaggaggtgcttgaaggaaaaacttttttgtaaggtgcatgaggaagcaagccaaatttaataattgacgacagttacagtcaccttatttggactgtccaggtggaaatttcctggttatttaattactgattaattggagttttgtgattggttgaacttggattttgtttctacttaaggcagtcattaacaagaaatgcatttgagctattaatattctttttcatgtagaaacgcaagacactagagccacctcagtctaattgcctgctaattattttaacactgcacaagagactgcttttcccctgcattttccaaataacatggaaagcagggtcttaaatccactcctctgttctcccagcctgactctggcctgcaataaaatactaaattttcagtttctttccaaaattcataaaaaccaccatcacctcttcagttcacaacactgtcagctatttgtcttttattgcgtactccaggcacaatattttaattaatcattttttcacagaacattggagggcactctttgttgttgctgttgttgttttgtttgtttttgttttttctttaagaaggagtctcgctctgtagcccaggctgtagtgcagtggcgcgatcttggctcactgcaacctctgcctcccgggttcaagcgattctcctgcctcagcctcctgagtagctgggattacagacccgcgccaccacccccggctaatttttgtatttttagtattttgtattttagtttcaccatgttggtcaggctggtctccaactcctgacctcgtgatcccccgccttggcctcccaaagtgctgggattacaggcgtgagccaccacgcctggcctgttgttttttccctacccggcttttttttttttttttttttttttttggttgagttggagtctcgctctgttgccaggctggagtgcagtggcgtgatctcggctcactgcagcctccgcctcctgggttcaagcgattctcctgcctcagcatcccaagtagctgggactacaggcgtgcgccactacacctggctaatttttgtatttatagtagagacggggtttcaccatgttggccaggattgtcttgatctcttgacctcgtgatctacccgcctctccctcccaaagcgttgggattacaggggcgagccaccacgcctgacttgttgtttttaagaggatcttgctctgtcatccaggctgctggaatgcagtgacattgtcatagctcactgaagcctccaactcctggactcaagtgatttttctgcctcagcctcctgagtggctaggcttaaatgtgtgtgctgccatgcccagctaattctttttattttatttttttgtagagattgggtttcgctagttacccatgtttgtggaactctttaaagatttgttatctgtttgtgaaggcagagaataacctcttggcactctattgtaaagaaatatttgtgccactctgctttttatctttcctaggcacagacgccttgtacaaaatctttgaaaactttggaaactttacagctggttgtatcctcagccactcttttttatttttatttattttttgagacggagtctcgctctgtcgcccaggctggagcgcagtggcctgatcttggctcactgcaagctccgcctcccgtgttcacgccattctgcctcagcctcccgagtagctgggactgcaggagcccgccaccatgcccggctagctaatttttttgtatttttagtagagacggggtttcaccgtgttggccaggatggtcttgatctcctgacctcgtgatccgcccacctcagcctcccaaagtgctgggattacaggcgtgagccaccgcgcccggctcctcagccactcttatcctagtcctgaatttcagaattgtctgggaatggcccaagatgcccacagtggctatgtctcttggagtatctagtgaattttggttcctgggttttttcctcccagaggacagcctatggcatggagatggagcctctcagtgaagcagctggatgtcctggggctgagagaagtcttctggtacacccttcacctaaaaagctaaccccttagacattctcccccaacccccaatttcattgcctggagacacatcagtggtgttgggaaaagacagaaataattcctgccctctggattctcagacttgtgaagggagaaaaactagtccaaaggacaagcaataactactccagtgagctggtgcgagaacatgcaaagcaaaacatccctggggcacaccgtgaggcacagtgcagtgtctccagacagaatggtcagtgagcacttcagtgagcagaatgaggggtgggagaatgtcccaaattataggatagcctgacttgacgcttgagtcggatgtgtctgtgttccaggtagtactgcttctccctgagtttgtcaccttaaaaagatttgttcacttatttcatcatcagttttttattaagtatatattacactttatcagtagagcttgaaaggttagaaaatatttacaaagggtatgaacgtggtgaattctaggaaaaaaatatgtagtcatatacttcatttgttaaaaaactcatttacctttttcttcatcagagtgagtgtagtaagtttcttagttctgttctattttaagggtgatttcaaacagaatctcagggcttaagtttgggaattctatcggggagaaaaataggaaacgtctctttttcattatgcctataggaaactcactttcacaagacagtatggtagattaattggtaaattatatagattcatgaaacatcagttcctcttttttacagggtggataatttgtgacattaaatgttctgtatttaattatctggacatccaaattcaatgctaagttttaggagatgggacatggctcctcttagaagggttcacatttagtaagtgtttcctaaatgatctgttatagaaatatttaattgacgtttttgttatctgaaaggaatagacacttttgcctttccttttgaaatataaaatgtaagtgtcttacaattttattcccttttataaacactgtctttgagtgattttgctgaattcttcaaactgggcattttctcatttaaaactaaatgaatagccctgactggaaagtagaagtctgagcccagtgactctaagttaaggccaatcttgagcctgcaaaagaaggtcattgaaggcccggttcttcctgaggagcctcctctgcaggtgtcccagcctgctcacacaagcacggaagagccctttacattgagagaagctacggatctcctggaaagtgggagatccataggcagatgcaaatgtagttgggttggaagacgggttcagaagctctttctgaggataaatttcattgtcctgggctgtttctagactttgtcaaataaagctaatttatatttacataaaaagttacttaattcttttttttttgattttttatttttatttttttattttttttcctccagaatttttctttattttccattgtagtttgggtgatttttttaaaattattattatactttaagttttagggtacatgtgcacaatgtgcaggttagttacatatgtatacatgaaaagttacttaattctaaaggaatattgcaacgggaaaaataccaactatatctgcagtcatctgaaatgttaggcagaaaagggctttatttaaagaggaacacacaaaactagaaagaatgtgggaaggggaggacaggatgaaaggtgccaaaattagatcctagatcagagaatgtttcaccctgaggtcagcctgtgtttaggaggggcataaagaggaattatttgttggctcaggctgagtgtgtgtcaaagttcaggggcctgttggaaagagagaagctaacccatttatgcctagtgttccattattggagcactaagcttgtgggagttatttatacttcctactgctagatgaccctactgctcagggtcatcaccatggtctgatttttcacacacaaaaaaatttgccacctccagcataaatgggttaagtggtggttggtgaacaagtactttttttttttaccactaaagagaattgttcaggtgattgtttatgagacaaaaatgggaatttgcaatccgtgtctggctttgtaataggttaaaaaaaaagggagcatcatctaagtcaaaatgagaagagtgtttcttttcattcagctgttctttgagaacataaaggatggggaatttcttcaatcacatgcatttaccaggattgcctacgcacccaatcttctcctgccactttcctttgctgtatacagatctttcatttggctgttttgagatgtactttcatgacaaactggtacatgttttgctgagttctgtgaggagttctgtcaaattattgaacttgagtatgcggttatgggagtcccagagttacaggcagtcactcaagaagtataggtgggtccctggtgcatgtgactggcctttgaagtgtgggcagtgatgtgggactgaggcctggccttgcaaggtctgtgcaaactgagtggtgtcagtattgaattattgagcaaccagtggtgttggagaactggttggtgatcaggaaactccacacatctggtgtcagaagttttgtcaaaagtgcaggagcggcagctggaggcagatgccctttcttagcgaagggaggctctgttctgtacacaggctgtcacactgcactgtcctgtgattccaggtgtcctcccaagatgagaggggactgaggacttagaggtgttgctggagtgcaatcatagctaactgcaacctggaaatcttgggctcaaggacttcctgcctcaccctctggaataactaggactacaggcatatactaccatgcctggctaatttgtaaagtttttgtagagacagggtctcagtatgttgtccagactggtcttgaactcctggcctcaaggttgctttctacctcagcctgccaaggtgctaagattataggtgtgaacccccatgcctgatcgggacaacttaatatgtattttttcttctgcttcttgaaatatatgcaaattttttttaccagctaaataaatttgaatcattctttttaactcatggttgtctttatctaagacctggattctgttgcattgttttttgtttgttttttgatttggcagaaatttattgtttttaaaatttttaaagttgattaagagcacgcaaaagttgagcccaaagaatagatctttcaccacattggttgaatttattgctaagaaatctattattttgttgctattgtaaattagttttttttactggtttattgctactctgtataaacaaaactgatatttgtatgttaattgtatattctgctactttactgaatgcatttattagtttaagctatttcttggtggactatttatgattttacatatataagattatgccatctacaaacagtgactttttttcttcttttcaattttgatcttctacgttttcttgcttaattatcctacgtaggacttccagttctatgttcaaatagaaccattagaatggtcataatatagacttgcattggtgtttgtgcatttggaggagcaaacacctcttttcatttttatgaactggtttcagtaggtaaagatcttcatcttttgggtctcaagcctgatgagatcttttctgggcttgcagtaaaaagggttgtagctgggtcacaaagttgctgccaaatctggagtgggttttacctttagtgggcttattaccaggagcacatgtggttgtgagtcctatcatgtttttgggcagactggattgtcttcagggctttctgtggagcaggcactagggcagggttctgctatatggtgggcctaataccagatgcgtggatgagtgtggctcccactgagtacctagcaaggtttccccaggttatctacaaacagtgacttttgaactgttttgtgtgggtcactagtatgatgccctcagcttttttcttattcctcatgattggtttagccattcagtatttcttgtagttctatgtacattgtaggcttgccttttctgttactatgaaaagtggcacaggagttgtgatagggatttgagttaacttacagattgctttggataatatgacacttcattaatcaaagggcctgtcttctcaaagtgactcttcttgatcttgggttttagcacagtttcctaatgccctgtatcccaaagctcactatactgtccaggctgttcttgaactcctggcctgaagcagccctcctgcctcagtcttctgaatggaggggattactgtcatgagccactgtgcctggctctctcataaagttactttggttaatggatggctgactagtttttttttttttactgcaagggaatataaaagtagggaactcctattccatcatcttgataatgtcactgtctccatacatttctgccttattttgttctcctgtatgtttgtgtgttattttaggttcaaacattaagaacaacatggtagaatttatacattgtgtaaaaagtaaattagatagctagtaggtactctatatatattataatattcacctgtaagattaagtttagtgcagacaaaagggctcattaagattttcatccacttttttcaacctctgtccaaactataatatagtttatgcccaaatttttattttatcagttactcttaaccatatttcacaaaatttgtattttttaaatttagaaatgtgaggctattatttgcttttaaaggctgtattacaggttatttattttgtaaaataatagtatcaatgtattagtaatataaatagttatttgtagtgtaaatacttattcattaaaattttgacattagagaattttattaattattgtagcacattttctgtaaaattgtactgccatacaccacagggcaatgattcagaatgcctggtcttcatagatgcacagtcacatatgaacatggtagttatttagaaaaattcttttctagtgttgtatccatgttccaaacaagattttatgggtaaatgtttctctcattctagttttacagttccatgttgactgtatttttattttagggtaggttccttgacatcggtttattgtattcttggttttacctaagcattattttggatgacaatgtgcagctttttatgtacagtttatgtcaatttgcagtttaattgcaatatgaattagccatatgtgtattcacaattcaatttaagttcaacagagttaatgaaaactaagcaaactaatgttacatgataaagccccagtcagctgtcttatacttaagcaaatacaccgaataatagtttgtagctttattgctgcttttgttcaaactatgttttatatcctctgtgaccaaggaaatttctgatattgtcctatcaggctaaagaaacaaaaagccgggcgcggtggctcatgcctgtaatcccagcactttgagaggccgaggcaggtggatcacaaggtcaggagatcgagaccatcctggctaacatggtgaaaccccgtctctactaaaaatacaaaaaattagctggatgtggtggcgggtgcctgtagtcccagctactcaggaggctgaggcaggagaatggcgtgaacctgggaggcagagcttgcagtgagccaagatcgcaccactgcactccagcgtgggcaacagagcgagactccgtctcaaaaacaaacaaacagacagtgattatactttcaagtggcagtttatcccagatactccatatgtagacaactatgctcatatttgtttgttttaataaggctgtggtccaaaaccttacgtttttatagaaattaaagcttttcagttccattctaaagaaaggacagccccatgatctaaatccaaaggtgatggcttagagtgaggaccatttcttgttgacatggagatggttgagatggtctacaataaatctatgggagaagcaggttgtgatgacttggaagtgttggctgccttcatggtctcaaagttctttgccaagttcacctcagcagtgctgtactgttctgctgtcagattgggaatgcttggccagtagtggttctctgcatggtccaaaactgcggatgcttccttgatacactgcctgccagaaatgcaattgtagcaaaggaggtcggtaaggggacagaaactagctggccactgcctggtggggaagagcgatgggcacccaatcctagctcacatgccaagtgccatcatcatcccggtacccaggggtgtctcccataatgtgcactgcctggccttatgtaaatagagagctcagctaaggcctaaagttgtaaaggggcctttccggagccccaagtgtgctggacaactcactagccatggaaagagcctggttccttgtggccacagagaggcaatgattgctgcatgcccacatggcaaggccttctggagtcttcatgtgagagttcagctctggcaacagaggacatttccggtgttagagattctcagtgtctggcaggtgggaaactgattgatggcatctgctggcttctagagcactgcctggcggtccttatctgtgggccccagccaaggcacttcagaaagcttgatctccggctagcattctggactgcgagacagcctggctacagctagcgctggatggagagagtagagtgtggtgaggtgggaacagtgtgcattctgccacgtggcatggggtttcttgtgattctgaactacccaggtgcggtgacaagaaggcaatcagggagtggaaacagtccaactcacacacatggttatttattgtcagtagagagaagttcattgaaggagatacagcgtgggggtggtgcattaacgtaattctcagggctgaaaatgccaccttttaataattttttttgtaggaccccacaagtgtgtcattgtctgtttttaattccatgtacaaacatagtgctctcctcaaataatgaaagtagcactattattatattgggaagagtgcggcagcacttacgaataaaagcccattgacagattgagctcataatgcatacactaatttattcatgatatgatttcaggtcatgcataatgtgtgcttgttaataaaaatatgaatttaaaaaattaaacagtttctcttaaaatgcagctattttagcattgctctttacattatacctaacatatataagggtttttgactcacacaaatggtccacagttttagtaaatgtctattttttcccagtaaaccatattcttaatacaaatgttagcactcagtactgctttttatttttattttttatttgtaacttttaagttcaggggtacatgtgcaggtttgttacataggtaagcttgtgtcatgggagcttgttgtacagattatttcatcatccaggtattaagcctagtattcattagttattttttctgattctctccctcctcccacttctaccatcagataagtcccagtgtcttttgttcctttccatgtgtccatgtgttctcatcatttagcttccacttacaagtgagaatatgcagtatttgtttttctgttcctgtgttattttgctaaggataatggccttcacctccaatcaggttcctgcaaagggcatgatctcattcttttttatggctgcctaggatttcatggtgtatatgtaccacactttctttattcaggctattattgatgggcatttaggttgactccatgtctttgcaattgtgaatagtgctgcagtgaacatatacatgcatttgtctttataatagaatgatttatattccttcaggtaatacccagtaatgagatagctgggtcaaatggtatttctgtttttagttctttgaggaagcaccacactgtcttccacaatagctgaactaatttacactcccaccaacagtgtataaggatctttttctctgcaaccgtgccagcatttgttactttttgactttttgataatagccattctgactggtgtgagatggtatgtcattgtggttttcatttgcatttctctaatgatcagttatgttgagcattttgaaatatgatttttggttgcatggatgttttcttttgaaaagcgtctgttcatttcctttgcccactttttaatggagttgtgttttggttttttttaagttccttatagatgctggatattagacctttgccaggtgcgtagtttgcaacagttttctcccattctgtaggttgtctgttcctctgttgatatttttcttttctgggtagaagctctttagtttaatcaaatcccatttgccaattttgcttttgttgaaattgcttttggcgcctttgtcatgaattcttggcccatttttatgtcctgaatgatactgcctaggttgtcttctggggtttttatagttttgggttttacatgtaagtgttctatccatcttaagttaatttttgtgcatgatgtaaggaaggggtccaatttcaatcttctgcaaacggctagccagttatcccagtaacatttattaaatagggaatcttttccccattgcttatggggttttttgttgttgttgttgttgtgatatagtctcactctgttgcccagactggagtgcagtggcacccattgcttatttttatcaggtttgtcgaagatcaaatagttgtatagttgtaggtgtgcagccttatttctaggttttctgttctattccattggtatatgtgtttgttccaataccatgctgttttggttattgtagccctgtagtatagtttgaagttgggtagcatgatgcctccagctttgttctttttgcaagggattgccttggctattcaggctatttttttggtctatatgaattttaaaatagttttctctagttctgtgaagcatctcattggtagtttaatagaaatagcattgaatctataaattgtttttgggcagtatggccatttttacaatactgattttttttctatcttaagcatggaatgtttttccgtttgtttgtgttgtctaattttttgagcagcattttatagttctccttgtagagatctttcaccttcctagttagctgtatttctagggatgttactcttttttgtggcagttgtgagtgggattgtgttctttatttggctctcggcttggctgttgttggtatatggcaatgttagttatattcacacgttgattttgtatcctgagactttactgaagttgtttgtcagcatagggagattttggggcgagaccgtgagatttgttaagtataagatcatgtcatctgcaaacaggtatagtttgacttcctgtcttcctatttgcatgcccattatttttttctcttgcctgattgccctggccaggacttccattactatgttgaataggagtggtgagagaaggcatccttgtcttgtgccagttttcaaggggaatgcttcaagcttttgcccattcagtatgatattggctgtgggtttcttgtatatggctcttattattttgaggtatgttccttcaatatctagtttattgagagttttaatcatgaagcattgttgaattttattgaaggccttttctgcatctattgagataatcatgttatttttgtctatagttctgtttatgtgatagatcacatttgttgatttccatatgttgaactaaacttgcatcccggggataaagcctacttgatcatggtggataagctttttgatgtgctgctggattcagtttgccagtattttgttgaggctgaggtttttgcattgatgttcatcaaaagtatcagcctgaagttttcttcttttgttctgcctctgccaggttttggtatcaggatgatgctggcttcagagaatgtgttagggagcagtcccttctcctcaagcttttggaagagtttcagcaggaatggaaccagctgttctttgtacatctggtagaattcagctgttaatttgtcttgtcctgtgctgctttttggttgggaagatattactcaatttcagagctcactatttgtctgttcagggtttgaatttattcctagttcagtctggggagggtgtgtgtgtccaggaatgtatccatttcctctagattttctagtttatgtgcatagaggcatacataatattttctaatgattggttgtatttctgtggcatcagtggtaatatcccccttgtcgttttctattatatttatttgaatcttctctcttttttactttattaggctagctcatggtctattttattaattaaaaagaaaatgcctccaggatttgctgatcttttgaattgtttttcatgtctcagatttcttcagttcagctctgattttggttatgtcttgccttctgctagctttgggatttgtacttggttctctagtcattttagttgtgatgttaggttgttaatttgagatctttctaactttttgatgttggcatttagtgttataattttccatcttagcactgccttagctgtgtcttagagattctggtatgttgtatctttattctcattagtttcaaagaacttcctgacttccaccttaattttattatttgcccaaaagtcattcagaagcagattattaaatttccatgtaattatatggttttgaatggttttgagtgaatttcttagtcttgatttttagtttgattgtgttgtggtctgagagattgttatgatttcagttgttttgcatttcctaaggaatgtctttcttctgattatgtgattgattttacagtatgtgccatgtggctatgagaagaatatgtattttgttggttttgggtgtacagttctgtggatatctatcaggtccatgtgatccagtgctgagttcaagtcctgaatatctttgtttattttctgtctcaatgatctaatactgtcagtggggtattaaagccccctactattactgtgtgggagtctaaatttctttgaaggtctctaagaacttgctttatgaatctgtgtgcttctgtgctgggtgcatgtgtatttaggatagttagatattcttattgaattgaatcttttactattatgtaatgcccttctttgtcttttttgatctttgttggtttaaaatctgttttgtcaggaactaggattgcaaaccttgcttttttctgtgttttatttgcttggtagattttcctccatccctttatttttagcctaaatgtatcattgtgtgtgagatgggtctcttgaagacagcataccagtgggtcttggttctttatctatcttgacattctgtgtctttttattggggcatttagtccatttccatttaaggttagtattaaaatgtatggttttgatcctgccatcatgatggtagctgtttattttgcagacttgttcatgtggttgctttatagtgtcactggtctgtgtacttcagtgtgtttttgtagtggctggtaacagtcttttctctccatattaagtgcttttttcaggagtttttgtaaggcagatctggtggtaatcaattccctcagcatttgcttgtcttaaaaggatcttatttcttttttgcttatgaatcttaatttggccgaatatgaaattctgggatggaatttcttttccttaagaatgtcgaatattggtccccagtctcttccggcttttaaggtttccgttgagaggtccacttttagtctgatgggcttccctttgtaggttacctgacctttctctccagctgtctttaacatttttccttttatttcaacctcagagaatctgatgattatatgtcttaaagatgatcttgttttgatgtgtcttactggtgcgttctgcattttttgaatttgaatgttggcctctctagctatgttgggaaagttctcgtggatgacatcctgaaatacgttttccaacttgctttcattctccccatttccttcagggacaccagtgagtcttagattcattctctttacataacatgatatatcttggatgttttatttgttccttttaactcttttttttacactattcttgtctgattgtcttattttagaaagtcagtcttcaagcactgagattcttttctccatttggtgtattctgctattaatacttgtcattgcattacaaaattcttggaatgggttttttagttctgtcacagttatgttcttttctatactggctattttgtctgacagctcttgcattgttttgtcatgatttttagctttcttgcattaggtttcaatgtatgcccatagctcagatgatcttcatttctatccatattctgaatcctatttctgtcatttcagtgatctcagcttggttcagaacccttcttggagaggtgacacagccgtttggaggaaagaaagcactctagctttttgggcattcagggttcttgcactgattgtttctcatctttgttagtttatctaccttcaatctttgaggtagctggcctttggatgcgctttcttcttcttcttttattgtatttgattgccttgagaatttgattgtggtaaaatgtggattcagccaactggttttgtttctggcagattttagggggccagcactcagttcccaaatcttggactttgtgctctctgggagacttgtattgaaccttgtttgttttctggctcctggaggtttggaatccactgcactgtatatatggtggggggtgaggtgcagcagctgcagcagagtgctagtgggtgctggggtgcttgccatgctacaggcgttcattggaatggtgaaggcaatacagctggggttaggagtggtgggagtccctgttgcagagtgtgtgtgccattgtgctggaggtggtgttggcttagggccagggtgctagtggtgcaggtctgggtgcttaatctgtgccctacaagcacagattgctcaggagtgttgctcaggggaagacccactgttctctgtgcagtgttagtgcaagggtggggtgctagtgtgggtagggcttgctggctctgtgcctgccaaggctgaatctgcaatggtggttggtgggggggtccaccagcacaggtggacaattaaagtaaaacctgcccatatagacatgcaccagcaaagtgatgtgggaagttaccatggccctgggggaagctgcagtatggggagggaacagacaggcttgtgcatggtcataggggtcatctcgctggaggtcttcaccagtcgggcatagtgcatcagtgcaaaagctacagtgtgggcccccaggacacccaagactgccctgcaagcagacatggccaggctggggccccaggacaggccagcagaccaagggatgctcaggtcagaccagcgccatctgataggcaagacagccctgtggagatcagatctgacagttcccctgggctgctaaagtctcctactggagcaagttgagcctgtggggatggttggccaagtccacacttcactacagatgcttctttatcaaaccctttgggctctgcatcagctggcttgctatctctaccaagtaggggttgcagctctaagggacagcagctctccctgctaactcaagtgtctctggtggtcgaggggtctcttcctgctcggggttccagaggcctgtgagagtggattgcttcttgacagttcaacttgttctcctggagctattgtggtccaaaaatgagtcccggtgtacagtagccccatgcattgtttccagctttctgctgcttcagaccagcttctgtgtcttccctctgtccactctcagcgcctttcctctgaagatctgttaaaagcatacctgtcatctcagtccctctgtgagagctgttctacctggctgcatctagttggctatcttgccctcccctgctgctttttaaaataaagcaaaattgactttcattagtcatactttcacctttaatactaaagcaaatgatataaaattgaagttattcaaacctaaatatttttgacagaaattatatccatatttctggaaaagctgttaatgtcctgatacacagtgaatttttgttttcattacttttgatgcctttatgaaactaagggcttccttgagtctctagtctttctgtcaagaacattaacatcattcttttatgaggaatgaaagtacatgataatttatctaacttctaagtctattttggccaaaaattaccacaaaaggccaggcacggtggctaatgcctgtaatctcagcactttgggaggccaaggcaggcggatcatctgaggtcgggagttctagaccagcctgaccaactactaaaaatacccgtctctactaaaaatacagaattagccaggcgtggtggtgcatgtctgtaatcccagctacttgggaggctgaggcaggagaattgcttgaacttgggaagcggaggttgcagtgagctgagatcccgcctttgcactccagcctcaagaacgaaactccctctcaaaaaaaaaaaaaaattttaccacagaaaattgataaattaatattgcaagagtgatacatttagagtatggacttctatataaaggtcatgtacaattttcactggataattttcaaagtcttcaatatgaatgctgaaatgaaaaaggtttaataaatatgaagaaaaggaggaaaaagaatagaaaatgtagtatggtttcttagaaatataaaatccttatatttatttataatttgtatcctgtcaattgctaagaaaagtattagggcttgtcattaaaattatattgaagtatattatacatatataaatatacataagttataagtatatagcttgataaatgttagaaaattctgcaacatacctaggtaactagccctcagttcaagaaggagagcattaaaaagaggaataaagaaagaaaagaaggaaggaaggaagagaggaaaagaaagaaaggaaaaattaaaggaagcatggattactagaaatctagatgccctcttgtagtttctgcctatccaccaagtgcaaacattaccctgatttctaaaaccattaagtagttttgtctatttatgaactttatggtcataaaatgtgtactctttatgattggcttcgttcactcaacattcttagtggcgcattgcttctttttcatccataatctaatctatctatacttattgctgtattgtattccattgtataaaatcaacttgtattgttgataaaatttcgattgtgtctagtttgggactattatgaatactcttgctttgaactttttagtgcatgtctttgttgccaaggtagtcacattgctgtatgctagagacctagaaaaagtgctagattataggttatgcgtatgttcagctttagtatatactgccaaatggttttctaatgtggtccttacaatttacatttccaccagcagcgcatgagagtttcatttgttgtacaccttggcaaacatttcgtatgttttcttttttcatgttaattattttggtggctatgtaactgaactgcattgagatataatttgcatttccttgataactaataaagttgatgtcattttatatgtttaatggccatctgaaggtaatttttcttaagtatcagtttaagacttttgcattgttatattgcattgtctacctttttcttattaatttgcaaatactctatacattctggatacaagtatattgtcagatatatacacacgcacacacacacacacgaatatcttcttccactctagttttttattttcttaattttgataataatttcttaaattgaatgtagtcacatcaatttttctttttttctggttatttttgttaattaatttgttattatatatgtatatatgtgtgtatgagataggttttactctgtcacccttggtgaagtgcattgacattgtcatagctgactgtagccgcaaacttctggacttaagcaatccttcaatccttccatctcagcttcccaggtagctaggaccacaggggcatgccacttgcccagctaattttttttttttttttttttttgtagagacgcattctcactatgttgcccaggctggtcttgaactccttccctcaagtgattcttctgcctaatcctcccaaagttcttagattacaggtatgagacaccacacctggtcctggtttctatttttaaaagttttgccaattataatacatatgtcactcttatgttttcttctaagagctttataattttaacttttgcattcagagctacagtcatctataatcaatttatgtgtgtggcctgagataagaatcaagatcttttctgtgtgtgtgtgtgaatgtctaataggcttggcaccactagtgccagtataagacattatttacttactgcactgtcaactttgtcattaataagttggtcatatatattttgtaaaagtagttcttaaaaggattatattttagttgaaggttaattggcaatttctgataggtaaagtccctagttttgtttgttctgtttatattgcattctggctttcttacttagaaacctaaagcactggaactgccactataatagcctccctgttaagatttttaaacacttgtttttatttattttacttattatgtatccgttgctctgactccttagaaataatagatccgttgggtctattatttctaagttctattggtaacctttacatctaataactgttcacagcatacctgatgtcttattccatgtatgattcagtagacatccaggcaacaaatattatatttatgaacccctactattaattcttccttttctataatgataactttgcaacaattcaataagtccattttagaaaatttctttttttttcttttttctttttttttttttttttgagacagagtcttgccttgtcgcccaggctggagtgcagtggcacaatcacagctccctgcaacgtccacctcccaggttcaagcaattctcataccttggcctcccaagtagctgggattacaggcaattccacttttgatttaactttgtcaggagttccttgaccactgtcagaattgatgactcattagaaaaactaaaaacacttagaaaaactgttacatttatggctacaatttattaaatagaaaagatacagattatatttagggaaaaaaaaataggaggtaggaaagctttcaaaggagaccaagtgcatgcctccagttgtcctgtcacagtggagtcacacaagcagtacataattttcccagtcataatgtgacatgtgcaaagttttgccaagtagagaaaccaaccagagtcttggtgtccaaagtattttgttgggattcaattgcataggcatgcattgggcacatgattggctctagctactcaatcaccatttctactgtagagatcaaactaatacagcatggcccagagacccatgcatccaaaaacaagagattcacttccacttatatggttagaatcatatatctgttgctgcccaagacctcaagtgagctaagacaatctttcttatcaggtagaattttccaaggttgtggaggttaccttctaggggcaagtctagagccagttctgaagacctttaaaatgtacattgttggggaagtccacaccaattgaattaacattttgttgcagagctttatactgtcattggggcaggatattttatattgaattatttgttcatttgtcacaaggcctaaagcagtcaacagctcactgttgaatgaatacatgatttccaggtacctgttctcaggcatgaaaatgttcaaggcttaaataggaaaattaatgactaccttggtgatacaagaacttccttaaacgaaccgtttatccactctcctctcaaaccattaatatttaaaatatgcataaataagcaaatatgactattaattgagatgagctaacaactgagaattctgaaaaaaactacagctaggtatttaccttgctctatctccagctaaggctgatcacttttggctgtccatgtgtgaggaacactatttacaaattacatgtcaaacatgttaaaaaatattccatgatacttgttaaagcataatgagaaacactttattcagaataataagatgggtatagacaccactgcagtaagattttgtagttggggagaaagattgtgctcaactctaaatacagacagtatggataagtaagaacttataggcaaggagcaggctaagggttgatgggtgaaaacttactaagaggaaacaaggatgaggggtattctggttaaagtgaccaaaccaattcttgctggggacagccagggtgatcagacttgtgcgatggcggacagtgagaaaccttatgaaacattgaggctgatcagatattaaggatgaagtgttcttgctaaactgacttttcaaggtaatttgctacaactgaattttacaagaaagtttatagatgggcctagagtaaggtacagaagtctgacaacagcaataacagaacaggagtcactctgagagagacttgaaactaggacctagaatttgaattacttgcttgataaagaagagacaaattttttctattatgttttacttgaaaatgtgatttaagactgtagagtagtagaagatgagaaaaggagacagagcctgcatccatgacaaggagatggccagttaatcgttttctgtctagatctgttatgttaaacatgggctcgtggacatctgagctgaattatgcatggtcagtggagcaaaactattggaggtgccaaaggtagcatagctgaaaacacaggtatctttgggtaaatttagtcccaattaagtaggaaacgaattaaagtaatacatatctatgaaccttaaatggctaataagtgaatatataaattaattttgtggagaaatcaggcaaactgagaaagtatacattaaacagaaaatgttagaaatagaaaacaaaatgcttaaagatcttggccgggcacggtggcacacacctgtaatcccagcactttgggaagctgaggtgggcagatcacgaggtcaagagatcgagaccatactggccaacatgttgaaaccccgtctctactaaaaattcaaaaattagctggatgtggtggcacatgcctttagtcctagctactcaggaggctgaggcaagagaatcgcttgaacctgggaggtggttggtggttgcagtgagctgagatcacaccactgcactccagcctggtgacagagtgagattcagtccccccaaaaaaaaacaaaaatgtgtattctctagacgtttaaaaaatcctctctcaaatctagagccaacaactaatgaaacataggtttcagtgaccacttaagacaaagaatagagctttaaaaataaacagaaatgatcactaaataagttaccacaactcacagcaaacagccacaaagcctagggagggaggagaatttgatttccagatttactacagtatggtattcaacatgtccacttttcagcaataaaaaatgatgagccaggcaagatgatttgcgctacaggtcccagataactcaggaggctgagatggaagaattgtttaagcctaggcatttcagtgccctatgattgagtctgtgaataaccactgtactgcagactgggcaacataggaagaccccatctccaaaaaataaaataaataagcaaataaaaaaataattagtcattcaaatgaacaacaaaatattattcacaggaaaatactaatgaattaacagaaactgtcttaggaagcacagacgtaatatttattaaactaagcctttaaatcaactttcataagcatgttttaaaagcctaaagaaaaatgaacaaaaagtaaagcaagtgagtaaaacaatgttccaccaaatagaatatatcactaaacaaatagggattttaaaaaagtcaaccaaatagaaattctagaacaaaagtatcctaactgaaataaaaaatttactagagggctttaacggagcacttgagcaagcagataaacgaattgataaacttaaaaataagtaactaagagtctgctaaaaagtaagcacaaaagaaaaaggtaaggcagaagtttagaaacaaaactttcaaaatctctgattatcaccaacatttaaactctgcttgcaagcaccactccctctgtgattctgtgtggtgtccaaggtgtttcttccttggcatgtgagaatatgtagttaataagctaaagtcagttttaccagtgccaggcatcatgtgtttggtcatattcttaaccctaataggcaatttttccctcatcaaggtggtgatcaggaggtagatgaaacaaagcattccctaattactgtggggcaggaatgtaagggagagctccacttacagtctccctgaatgcaaagcccatgggggtggggtgataggctgcacctaaatggcaggatgagaatggaagacagagccctgttcagtatttgctttaacagtgcattcaattcaatttgggttgggagaagctaggcctcaatattgcagggtgaggatgaaagagttctgctcctagtttttgtaacactagcactgtggaaagagaagtgttatgtcttacttgtgtgtgatgtttgccagaatatgaaaaagtgtcgtcaagtaatcactttctgcataggccatctttatcccatgcttctttggctagagagagcatgttagattttttttttttttaattctttttcagttgccttttccaggttactgtgttctctgctactgaaccaggatatataggaggcaaaacaaaacaaaacaaaacaaaacaaaagacatacccagggcagtagccgttaaaccactcctgctgttccaagttagtctgccttcttttctgtactttcagagtctttagactgatgctttataagtttttacaagcccattgctataatttttgagaatagaatagagtttgcttatcctatcttgtctagaaccaaaagtttcaacttttggtgtgtcaagaacattttgagatatttaaatccattttatcttgtatttcctgcattaagcagtagcctgtcagttcttacaccttctaaactgctgcagactcctgaaattttgggtatcatcactgcatttacaaagtgcatgatgcagccaaagatgttaggggaagttatgggtaaaatttggagcttctcctccatgccttcttatctggaacatctctctacattttagccactgtggaaaccctgaaattcaccctttcctttttttttttttttttcaagactttaaaaaaaattcaggggtacatgtgcaggatgtgtaggtttgttgcatagatgtgtgccatagtggtttactgcacagatcatcccatcacttaggtattaagcccagcatccattagctattctttctgatgttttccctccccccagccccccaacaggtgcccagtgtgtgttgttcccccaacatgttcatgttttctcatcaattagctcccacttataagtgagaacctgcaatgtttggttttctgtttctacattagtttgctgagaataatggtttccaactccatccgtgtccctgcaaaggacatgatctcattcctttttatggctgcatagtattccatggtgtgcatgtactatattttctttatccagtctatcattgatgggcatttaggttgattctatgactttgctattgtaaatagtactacagtgaacatacatgtgcatgtatctttataaaagaatgatttatattcttttgggtgtacatctggtaatgggattgttgagtcaagtggtatttctgcccctgggtctttgaggaatcgccacactgtattccacaatggttgaactaattacactcccaccaacagtgtaaaagtgcttctttttctccacaacctcaccagcatctgttgttttttttactttttttttttggaaacacagtctcactctgtcaccaggctggaatataatggcatgatgtcaactcaatgcaacctccacctcctgtgttcaagtgattttcatgcctcaacctcctgagtagctgggattacatggtggcatgcaccaccatgcccagctatttttttctattttttaatagaggcaaggtttcacttgttggccaggctggtcttgaactcctggcctcaagtgatccacctgcctcggcctcccaaagtgctgggattacaggtgtaagccactgcccccagactgttttttgactttttaatagccattttgattggcatgagatggtatctcactgtggttttcatttgcatttttctcatgatcagtgatgttaagcttttttttttttcatatgtttattggctgcatgtatgtcttcttttgagaagtgtctgttcatgtcctttgcccactttttaatagggttgtttttttcttgtagatttgtttacattccttgtagactctgaatattggacctttgtcagatggatagatttcaaaaattttctcccattctgtaggttgtctgttcactctgatgatcatttcttttgccgtgcagaagctctttagtttaattagatcccatttgccaatttttgcttttgttgcaattgcttttggcattttcatcatgaaaactttgcctgtgcctatgtgctgaatggtactacctagattttcttctagggtttttatagttttgggttttacaaatgtaaaagtctttaatccatcttgagttaatttttgtgtatggtataaggaagggatccagtttcaactttctgcatatggctagccagttatcttagccccatttattaaatagggaatcttttcccaattgcttgattttgttaggtttgtcgaggatcaaatggctgtgtagcaggacgagctgcagacaaaactcctcagacactgagttaaagaaggaagaggtttattcagctgggagcattggcaagactcctgtctcaagagccaagctccccgagtgagcaattcctgtcccttttaagggctcacaactctaagggggtccacgtgagagggctgtgatcaattgagcaagcagggggtgcatgactggggactgcatgcaccagtaatcagaacgaaacataacaggacagggatttttacaatgctcttccatacaatgtctggaatctatagataacataacaggttaggtcaggggtcgatctttaactatcacgcccagagcacggggccgggctttctgcctgtggatttcatttctgccttttagtttttacttcttctttctttggaagcagaaattgggcataagacaatatgaggggcagtctcctcctttattcccccactttgagactctcactcattttattagtgggagttctcacttttatctttaccatctgtgtctccctgcatgacagatagtgatttattgtaatacacttctgctgaagcattctggtgaactagagtagcgatgaaaccttttaccatttgaatgagtgcaggtagtaaataagggatcagtaagcaggttcctattactactataatttttattataagagttttaaatcctcctagcactgggaaccatttttaaacatggcctcagggtcaaatccgtgccacacttgtacaggcacttgccagtttcatcatgtctttaactgtatcttcgactacttgcccctgatcatctatgtgcaggcagcagttggtaaggttaaattttctacagacttctctttcagctgctagcaagtagtcgagagtcagtttattttgatagataacatttctcatctgagtttcttgccgggccagaacagtcaaggttttaccagttttattagtgataatctccaagacagcaactacatgatttggttgagcatgttaatgggggttgggtatccccacgagccgtcttgtgcccaagcggcaggcccatagtattgtataattttttcaggaggccgtttatcatctttttaattatctatggctatgcttctcttttcgcaggaagcatagacagggaagcccaggagttcgcctgtttttatgggcagtaggaagaaagatggtttaatagtgccaataacacaactacctgtccactgatcaggcagcttagtgtaggctctatgtccacatatccattatagcccggtgggggccgtccagtcccagtggaattctgggtaggcctaaatggtctgcagctttggaaatttactctgtgtcgtttgaactccaccatgtggtcttcctacaggaagggtgaactccttccccactcttgctatacagtattgcctaatcattgaggcttttaggacctagaagtgatcagggtgattcttttgggccgggaattcattcaggaactgggtctgtaggtactaattctcgggcttcctatggccattgatctcctattacagttcctccacatacataacatgaagtgacattgagagactgcgctacatgctcggctaattgcaaaaacaaatttcttgtttttcttggaatttttggtactggcacatttagtttattgtagaaggtttgaaatactggctcaggagagcgtttataaactttttctcaaaccacgatatttacttgaagatccagtccagctctatcaatttttagggttacacgttccccttttttctaacgaggattaagggttattactagttctaaggggttacactgaccactggtacaggaagggccacttttcccttgctgaaggtagacaggatttttttcatttttttaaatttaagtagcctaaatgacacaagaccagtatctacatttattttcacacagtcctaattcatgataaatgtacttattttctgccatatagcctctttcctaattaagagaaccacatcctatttttaacttattaatgacagcacaggcatcaaattttaaggtgacttgtttgggcacctcttttttttctgttttggctcacactttactcgtatcatttatgagcccccaccagtcttcagttcttaatcttattttaaaaactgtggtcatgggaggctcagatgggtcataacacacatcaggttggtcatttcctgggctaaataccttgtatagaataacattgtacaaacaagttctttttagagttccagtacacttataataaccataaaataataggaccatagcaaccttttctcctacctcagtgacttgatgtatacactgcgaacagccctcagtctgaggaaggtcagttgaagtccttactgtacaagtccaaattttaaggaaaatgagtcccgcgatgagtttcctcatgcttcagccgtgcgtggaccagtcagtttccgcgtgtgactggaggagggcttgtcttcttcagagtcactttgcaggggtttgcaaagctgctcccatccacgtacagctcccagtctactggatgtttaaggatggtctcagaggttgggcccactagaataaactgagtccaatacctctacatagttatgttcaactgggctctctgataccgggagcaaggtggcggggtttagggtgttgtaaacttcagtggttatgcggggattttcacagagcaagctttggtatctagttagtctagcatttgtcagctaatgatgtcctttggtatttattaaagtcaccacagcatggggggattttaggtttaggttttgcctaagagttagcttatctgcttcttgtgctaacagggccattgctgccagggcccttagacatgggggccagactttggaaaccccatctagttgttttgagagataggccactggccttggccagggccctacagtctgggttaaaacttcaactgccatttttctttttctgacacatagggtgtaaagggatttgtcaggtcaggaagccccagggctggggccgacatgagtttttctttaactcatgaaaagcttgttgctgttggttgtaatagatgtagtttatctaatctacatttttattaactgtcacccactaaaatattgacttaaatcctgtaggtatttgatttcaagctttaaattgatctggtattccttgcggggctccagttgcatctaaatagatgtgagagttgaaagacctataaggggcttctcttgctttacgatgtcttatttcttctccctctggttgatgaaatgccagggtgaaagggatagccaaatggactaaagcacaagtgccactccagttattcggcagagtgcccagtaaaggtccaccacagtaccaccacacatccactcggggatgaacaagggctgactgattcataagctcttgaaaattcttaagctcatcacatcccttcaggtctccaaggaatggtaagttttctccttgtcgtgagagacacaaagtgaacttagtgttgggagacggaagctggatggcccttgggggctgacccgcagggtgccggacttcaggatatggcagagagagcttggcatgacttactactccaggctgtagaatcctggaaaagagctaccatgcagcctacgcctggtctactggaggaccacattagtggaagggggacagtttgggcctctggcctgccatgtgcacaagtataacaattgcctttgtttaatgtgcagatggattatttgatccattttaaccaggcatttgcatcttggtatcctgtctttattgctaaagtttgttttaagtctttaacttcgatgaccctctagtaaaatgaaggtatgattttaggaaattacaaaaaccggttggggcagtccatccttgccctttagtggtccacagaatgttggaccagctatggcatgaaagctctacattggggggcaagactcctggttggcactggggtctttatcgaaatctccctggattaatggtcctagtttactaatgcccagtctgaggagggtcaggagggacagaagtacttttctgaagtagaaagctgtctttgacttgcaagtctccacagggtataacaaggcaagcattaaatgcaatagtttgaggtgaaattaacatggttatgttaataactagatggtcagcaatagaatgaggaaagaagaaagagtaatagaatagatgaaaagagttacatttttcttagctttggtagggttttcccctgggaccatggcccacaactctggatggggtggtgctttcttgactctggtgttatgagtccatccccccccccccttttttttttttttgatgtacgaacagcagtcttggtggttagcagcacaaggtagggtacttccaggctggctcaagtttttcttctttccaccctttgatgagaacgtgatcttcaaactggtgctgatttgccggaaattctaggggtggtacatgtgctaaaagactgagtttttgagggaaaggaaagtggaagataaatgaagtatataattttaaagaaattgaccttttgttttaaatgtggggaccttggcagtggacttcatagtcctaagtgcctttttactgagaaaattcctttagcacctatttttattagtttttaaaccaaagaaagccagataccattttacatttaacaatgctttttgtatgatttttataccagataagctaaattttacctttgtattagtgtgttattaatgttaaacctaattttaataaaacctgatagacgtatttatccaattgttaatgtttgaccataaggtaagattttatggactctttttaacctttcataatttttgttaaagagcaggttggtgctttaagaaaaacctgctgtgcttttattttaatgtccagtttacagaaaaactggatgatacctctttaactttagccagtgtttacacacagaattttctttccaattaacattttaaaacttgattaaacctttaaaacaaagtatacatatttttaaccttttgatgtaggtaaaaatttatagtcttatgcctccttataattcttttaccagaggtatattttactttccttatacatcttgcacataaagtgtttttctataacattttcctctttcacgacttttgcagacaattctttgacatgcctcaactttctgacttattacaaatatttgtttctttaaacagctagttaatttatttcaggacaagagtttaccatataatactctttttacataaattccgccccccccttttttccttaggttacttctgaactggtgaggtgtgctcacaatgaggtttcctctaaaagttattttttttactgtttttctgttagcaaagcagttgctgctacagatcgaatgcatttgggccatctgtggattactgggttaaggacttttgataggaaagcctcagtgctttcgggatacgcccttgtttacagtgacaacaaagtggtattggagtgttatagggttacggagaataccttcaattatcaattacaggttttaaatttacctttgcttttaaaggaataaggtacgctgtttttttttttcttagctacttgtatatatctctctctctttctttctgtctttgactttgtctctctctctttgactttccttttgcctctgtctcttcctctctcttctctgtctctctctctctctctctcagcctggcttatgctgcagttctctcaaccactgtggagagatctaaaaccagctgtaaccaagcatctgtgtaagggaactggtctgggtgccctggctttacaggttaccttgtgccatacctttgaaacaagggacctatccaggcttctttctgatggccaatccacctctaatgctggccagtctgttttacacaaagttttacattttcctggtgtcatagtactccatagtctcctttaaatccttttttgaaattttttaacatagttcctagtagggtgggcttatttgtgcctgacccatgcttcttcgagacaaaacaccatgctcaaaccacacgcacaccacaaaacaaagaacgggtaaaaagggcacacacacacttttgcagtttacaccaaaccaaaatcaaaaccaaaatcagagtatccagaaatccaagccaggtcaaaaccaaaaccaaagtatcaaacaatccaagtcaagtcaaaaacaaaaaccagagtgctggtacaggcacaccgtgggtgatcaggccacgcttccactcaaatggagtaggcaagttcccaagaccagtcctgtcaagcaatttaaaccaagtcaaaaccaaaaccaaaaccaaagtgcagataaaggcacgctgtgggtgatcagtccatgcttccactcaaatggagtgggcaagttctcgagactagtcttaccaagtttcagatgtccggactccaagtactagttccttcccggtgtttagccactgcattgatcctccatgggagcctgccacacactgctctggtgaggcatcccaccagggcaaatgcctacccgggagcactctcaggatctgcgttgcttgggctggttggagtcccccgcagggatgttccacagggcaggcttaagctgcataaggagctgccgcaaccatccgccaatcacctcacttcccagtcagggaaccaagaaatatagcaggacgaacctaagacaaaactcctcagacactgagttaaagaaggaagaggtttattcaaccaggagcattggcaagactcctgtctgaagagccgagctccctgagtgagcaattcctgtcccttttaagggctcaccagtaatcagaacgaaacagaacaggacagggatttttacaatgctcttccatacaatgtctggaatctatagataacataaccagttgggtcaggtgtctatctttaactaccacacccagagcctggtgccgggctgtctgcctgtggatttcatttctgccttttagtttttacttcttctttctttggaggcagaaattgggcataagacaataagaggggtggtctcctcccttagctgtaggtgtgcagtcttatttctgctgaattctttactaggaatgttaaaataaattaataattcattttcattttacatttttatacaatcaggtaacatgaaatataacttgatgtacaattttgcctgttacaaaggatgtgctaaatatagtggtatatgcacagaacatattggcatgacaacaggctgaataaatagctattttacttaataaaaatgaaaaaagaaaattataaaataaggaatatcaaacacaaagtccaaattcaacagcacataataaaagttttttctaaaatctagttttttctttgaattcctgaaattaatacccttctgaaaacatctactgtatttagacataattaagatataactgaaattaaagaataaaattctcctaccacttcattgagaaaatcctgcctcattctgattactggtgtcagtgataagctttgtttctatagattatagattaactaaaattattccttattggaaacaaaggggtgggccaaaatggatgggtttggctagttatctgcagcaggagcatgtccttaaggcacagatagctcgtgctattgtttgtggtttaagaaggcgtttaagtggttttctgccctgggtgggccaggtgttccttgccctcattccggtaaacccacaaccttccagcgtgggcgtcatagccatcacgaacgtgtcacagtgttgcagagagtttatttttggccagttttggggccagtttatggccagattttgggggtcctattcccaacataaaacttagtataaaacatgcgttttagaatcttcagctatcaagttcaaaaagtaccagtgtctatttaaaataattcctctcccaagccaaagtgtaatcaaaattaattcaaatgacatagcacattctaatgctaaaaaatattcattattattgaagtggaggtaaatcccagagcttttggggctttctcatgctgcaaatggctgtttctctggttcactcaaagcagcatatgacagaacatattggcatgacaacaggctgaataaatagctattttacttaataaaaataaaaaagaaaattaaaggatgacactaagctcagtaaaggatgacactaagctcagtaaagggcaagactgctggtacccagctctgacctctcagtgaagtgtggctactatgtccacaatacaggatgtgtgaggatcaaaggcacactattctgctagctaaagagatagcaaaccagctccgcaaccctaaaagctccttccccaggtaaataaaagtatacgaggggaaaaaattaaaatatgcttctctacagagtaagggttttgaaatattaatgtaatccctcctccaaaaattttaactagagtcatctggtcatttctgactacatctcaaagatgtatccagattcaatttctgttggtttatcctaggacacttctagctaaaagtattaattttattcccaaataaccactagtctgactgcagagtattatctcccagaattatcaagcactggaagagaaaaaaacagatgttcaagcggcaggcaacatttgtggccctttcacacagtggcatctgagtggctactgaatagtccaggaataattctaaacacaagaaaattcgtggattttagtaaatatgttgtagttttcacagttgaaatttcctcagacattgcactttctttataagggaatcctgatttttcttaatgttatggtgagtcaggacttgaactagcagccttctttttcttcttactatgtttcttatgcttctttttctttttttgttttttttctgttgctttttctcatttttcactgcttttcttcttttttgctcgtacctcctcagtaaactgtgattctgacaaggacttggatgataaaggtttatcttaagaatttatcgttctctttttgctgagccctttaatgtccttttctttctccgttgcatcttttgacttctttttcttttttaaactatccttactgtctgattcagattatgacatggagctttcagaagatttatgtcaacggttctttttctttctctgttttccttgtttcttatcctcattttcacaatcagaagaactgctggaagaattagagcttaatgaagaagaagatgaatacctaccaaatttattcttttctttttttgttttgatgagctctcacttccacttaacaatttctccctgtctctttctagttctttcttccagttctcattcatttttttcttcaaattcagccaaaaccttggagcctttcttttctcctcttctagttgctcttttacttcttcccaggtaggccttggtcgattcaaataatcctgtattgttggccctgaagactggattggaccccttgatctcgccattgctattgggtttatataggccaggatgtagaacatattcctccagttctagaatcattttcttgttcaaataacctttgttaaatttaactggtttcaggtttttgtttttgtttttaacagtattgatcacattctaattccgttggtatcatgtcataattttggcagtaccacgcggttgtcccacttccccatggtgctgggctgagtgcacagtcgcacgctgagggaaaccaggccagagagaaggccgaagcaggcccactgcaggtcctcctgccgcctcccctataattttcttttaaatactgtatgtaattaggtgaaattttatctttgaaagcaacagatatctaaattcagaatgactgagttatacttttttttaagtttggaggcactttagtgtatttataatattttaagactgattaaaattatgtcataaaatatgagattattttacattttgtattaattagattttagattactatgaagaccatttagttttattatgccatagtagttgctattagagaatttttttttcccggctaccatataatatctgaaaatagaactttctgttgtttatcaaatctttgaagaattaataaacaccgtacatgaatgttgctttaatattcagcgtgattgtatacaccttcttaaaaataaattcagctttattattttttctttatttttttatttcaagcacggggtacatgtgcaggtttgttatataggtaaactcgtgtaatgggggttggttggttgtacagattatttcattacccaggtattaagcttagtacgcattagttatttttctgattctctccatccttttgctgtctaccctccagtaggcaccccatgtctgttgttcccttctatgtgtccgtgtgttctcatttagttctcccttagggaaatgcaatatttggttttctgttcctgcattagtagctaataataatggcctcccactccacccatgcttctgtgaaggacatgatctcatttttttttaatggctgcatagtattacatggcatataggtacctaattttctttatccagtctaccatttatgggcatttaggttgattctatgtctttgctattgtaaatagtgctgcagtgaacataagtgtgcatgtgtctttatgatagaatgatttatatttctttgggtatttacccagtaatgggattgctgggtcaaatggcagttctttttttcagtctttgtgaaatcaccacactgtgttccacaatgtttgaacaaatttacagtcctaccaacagtgtataagcgttttgttttgttttgttattttctgactttttagtaatagccattccaactggtgtgagatgatatctcattgtggttttgatttgcatttctctaatcagttatgttgagctttttaaaaatgattgttggctgcatgtatatcttttttttgaaaagtgttcttgtcctttgcccactttttaatggagttgtttttttcttttagatttgtttaagttccatatagatgttgaatatgagacgtttgtcagatacatagtttgcagaaattctctcccattctgtatgttgtctgtttactctgtcagtagtatcttttgctgtacagaagctctttagtttaattagaccccatttgccagtttttcctttcagtgcaattgcttttggcatcttcgtcatgaaatctttgcctgtctgtatgtccaggatggtactaggttgtataccagggtttagttatggattttacattttagtctttgattcatcttgagttttgtgtatggtttaaagaaggggtcccgtttcaatcttctgcatatggctagccagttctcccagcatcatttattaaattggaagttctttattcattgcatgtttttttaagctttgtcaaagatcagatggttgtgggtgtctgggctctctatgctgtttcatgtgtctatgtttctgtttttgtatcagtaccatgccactttggttactgtagccctgtagtatagtttgaagtcaggtagtgtgatacttccagcattgttatttttgctttggattttcatggctattcagtcttttttaaaaaaaagttctgtgaagaatgtcattgctagtttgttaggaatagcattgaatctgtaaattgcttcgggcagtatgaccattttaataatactgatttttttaaatgcatgaccttggaatttttaaaatttgtttgtgtcatctctgatttttatttgagcagtgtttgtagttctcattgtagagctctttgaccttcttggttagctgtatttctaggtttttctttttttttttctttttcttgtgacaattgtgaatgggattccattcctgatttggctgttggctttataattttatttatttatttttattttattttttttgagacggagtctcactctgctggccaggctgaagtgcagtggtgcaatcttggctcattgcaacctccacctcccaggttcaagcgattctcctgcctcagcctcccgagtagctgggattacaggcatgtgccaacacgcctggctaatttttgtatttttagtagagacggggtttcaccatgttggtcaggctggtcttgaacttctgacctcgtgacctgcctgcctcagcctcccaaagtgctgggattacaggtgtgagccaccatgcctggcttggctttataatttttggtgtatagaaatgctagtaatttttgtacattgattttgtgttttgagactttgctgaagttgtttataaccttaaggagcttctgagtcaaggctatggggttttctagatatagaatcatatcatctgcaaacagggataacatgacttcctctcttcttacttggatgtcctttatttctttctcttgcttaatgttctggccaggacttccaatactatgttgaataggagtggttagagagcatctttgtcttctgctggttttcaataacaaaacaaaaacttatataaagttttctgcttatcagtttggcagagacagattagtaatgagataataattgctgaatttgataatttgccagattattaaaataaaaatcctgctgttttctctgaaagtttcaaattacttatcagttaaaatttatgtttactgtgacaagtaaaatttttgagaatttttagttgtatgcattaaaaatttgtgtaatatacagtacttttcagaagcacaaatatccacattgtacacataagtaaaatatttcacaattttttttggacagacagtagtgtttcatcagagatttcaagtctcttatttggaccacacaccctatcctatataccataagataacagtaattcgtagagtgcaattatttttagtacttgaaaatttatgttttgtgtaaattgttgaaataatagtgcttcactgcagaaatagtatctgaatatagccagaattactgtttgtttataacaaaggctagaattggtagaattattttaggtattgggctctaagcatccttcctcctcctagcactttcctgactgtgcaaaaatatcagtttgaatatttcatttaaaccaggtgttaacttaaaaaggtcttaaatgaagtttgcatatggctgaatagtacttgttggttacactttaaagaatgctttttgatccaggcagagttgcatgtacctgtaattccagcttctttagaggctgaggtatgagaattgcttgagctcaggagttcaaggctataatgtgtgatgattgtacctgtaagtagccactgtgccccagcctgggcaacataccaagatctcctggaggggaggaaagtaaaacataacttgtgacccatacaagcatgtgcatcttcctggaatgggctgctgctggttgtgccgggttccctcttgcaggtactgcctggctgcctcagcatctccacgtgtgaatgaagtctcaggctttgtgaggagaaagagcagctccacaggcagctaattgtctccagagctccaaatctgttcctcccacgtcatgatgggcatggggcggggggaatgttgcattgttttcagaggaatcaggtacaatccctggaaggatgaatctattttgctactttctgttgccaggttgggggaagtgctaggtggttcgcctttatttgtatggggtactcagatgccctgccactgtgttacttgttttactaccatagaatgagggttcactttcaaacttggcatgtagatgctatttgccaccagcacagaggaggactgctgacttgggacagtgtacttggcagcctcaggtgtatctggccaccccagtgtgacccactgggcccgactccaggtgctgtagtcctgctagtatgtagggagtcatctgattcctcacccgccattgctcatgggctccagggtcttggcaccccaacccagcccccttctgctgcttcatgccagctgtgggaagatgtggactggtgccttgtccacttgagctcttgtgggtgctccaggtctgttgacaaagcagtaagtggcagccactaaccttgagcttctaggatgtattcagtggacttcaagtgcctcttagaagcctgattccattaactcccccaaaacttaatgcaatttgaggctacttctcattctcatcttagtgttacacaaccattaatctccattctatctgtagacattcactttctggacatgtcttgtataattggaaccatacattatcagtcttttgcttctggtttctattagtttgtttgaggttcatatctgttgtagcatgtagcattatttaattcattttgatggccaaataggattccaatataaaatgtacttaactgtttttccttatattaactggttgacattttgacatttgagtatttccatttttcatatttggttataacaaacaatgttccagtgagtctttgtgtgaaccaacattttcatctcttttgggcacatgagtgagagtggagctgatgcaccaatatggtaattccatgttaaacatttcgagaaactaccaaattgttttgtaaagcggctgtgctgttttacagttttatcagcagtttgtgagggttctatgtttacatctctgccaatgcttacttttgtttgttgttaaatcattctactgcataagaagggatatctccctgagggttatttttttgagacagggcttcacttggggacccaggctggagtgcaatggcatgcttatggctcactgctgcctccacctcccaatctcaaatgatcttcctgcctcagccacctgagtagctgggactacaggatgtaccacccaccatgcttggctaatttttgtattttttagtagagatgggatttcaccatgttgcacagctgatctcaaactcccgggctcaagtgatccacccacctctgcctctcaaagtgctgggcttacacgcatgaatcactgcacccggcctccctgaagttttgattagcatttttctaatgactaatgttaagtgtagttttatatacttacttacaatttatatatatttttgacagtgacaaaatgttcattaaaattaccttttaaaaaatgtgtttttatctttttattaccttctttttcagttagcacttttattttattttattttttagatggaatttcgttttgtcgcccaggctgaagtgcagtggtgcaatctccgctcactgcaagctccgcctcccaggttcatgccattctcctggctcagcctcccaattagctgggactacaggggcccaccaccacgcccaactaattttttgtatttttagtagagaccgggtttcaccatgttagccaggatggtttcgagctcctgaccttgggatccgcccgcctcggcctcccaaagtgctgggattacaggcgtgagccactgcgcctggcccagttagcacttttttaaaaggtttttctctttagagtttttatttggttttattttgaatgatatagttttctttgttgtattttcagaaagttcatagctagtgtacagaaatacagttaatatttgtatcttcacctcatagtctgcaacattgctaaacttatttctttgaggttttagacagctcctcaggatttcttttatatatgaaataatgtctcagaaattaaaagaattttactcagacaatgtagagtcactttctttatcttttcgtatatgacttttaaagcaaaattttccaggacaatatttaatagatgtggcaaaagtgaatatttgtcttgttcccaatgttatggaggaaacatttttttcactaagtaatatttaccgtacattttatataggtgccctttaacaggttgtggaagttctcctcaattcctagtttgtttaggattacaatcataaagtacatttagccaaaatttttttctgtcaatgatgttatcacatcttgatctttattttattatgatacattttatggatattattaacagctttattaaaatatttgataaacaaaaaatgtcaagctcaatatactcaatttcatgagactggatatattcctgtgacacttcaccactatgagaataataaatatagccatgttaagtgtacttataaaacacacacacacaaattggggaaacttgtggaagtataagcataaatggataaattaattgttctctagatgttataactacatgtttttgaaacaatcccacttggtcaaggtgtataactctttttatatgttatttattatctcctttttattgaaagtgaagggggcctgcccctccacaccggtgggtatttctcatctcaccggtgggacaagagactgagaaaagaaataagacacagagacaaagtatagagaaagaacagggggcccaggggactggcacactcagcatgcaaggacctgcaccggtgccggtctccgagttccctcagtatttattgattaccattttcactatctctccaaggggagtgtggcaggagaacggggtgaatagggtgatggtggggagaaggtcagcaggaaaacatgtgagtaaaggaatctgcatcataaataagttcaagggaacgtactgtgcccggatgtacacataggctagatttgtgtttctctttacccaaacatctcagtgtagcaaagagtaacagagcagtatcaccactagcatatcttgcctccagccacagggcggttttctcctatctcagaatagaacaaatggtcggctttacacggagacattccattcccagggacatgccggaatcagaggccttcctcttatttcagccgcaaagaggccttcctcttttactaatcctcctcagcacagaccctttacgggtgttgggctggggaacagtaaggtctttcccttcccacgaggccatatctcaggctgtctcagtggcggggaaaccttggacaatacccagcctttcttgggcagaggtccctgcggctttctgcagtgcatcgtgtccctggttaatagagaatggagaatggcaatgacttttaccaagcatactgtctgcagacatattgttaacaaggcacaccctgcacagccccaaatcccttaaaccttgattcagtacagcacatgtttctgtgagcacggggttggggctaaagttacagattaacagcatctcaaagcagaacaatttttctttgtacagataaaaatgaagtttcttatgtcttccttttctacatagacacagtaacaatctgatctttcttttccccacagaaagtatttgggaagggttgatattaattctccaaaaaatttggcagaattatcagtgatgccatccagatctgagatactctatacatgatgatttttaattgatttaatctctttatttattagaagtctattaacacatcctgttttgtctagaatttgtttttataatttttgtcttcatatacgtttgtctatagtttctaatgttctgtgtctctagattctcatggcagttgatattttaaaataatgtgaaaaaatgaggctttgaggctgtctgttaataccctctttctgagggtctttgtagaaaataaaacaaggctacaacttcatacctaccactcagacatgtcattttgcataagacaaaaatgcacctaaaataaactagaagattatgtcatttgactttaagttttatcaaatgatggctggcagcctactgtcctctttggtgtcagtatttagataacacaggaaatgtaacttgtaatgagaaaaatacaaaataacattgtaagtaaagaatgatatcagtggttgatcatttgacgaatcagtggttaacacttacatagcacagagtatgtatatttccaagccacttacatgtacgtcttaaatatatagctatttaaaataactatatataattttaaatagttatatatttaaatatatttatattttataatatgtattttatatatttattttataatatacatttattatatattgtatatgtattaatttataatatatgctatattatttagttatatattcaaatatatatttagttatatatagcacatacgttcattcagaaaataaattggcacagttatagttttcataggggacattaaaactattataaaataatttgttttagtatataggaaaaattgacacaacaaatgttaactaactttattagaaacattgattagttagaaagatagacacatgaacaacaattattgtggtaaccagagtatacagattatttttgattacttaaaaaaaaatctttaaaactttaaagtttaaggctccaaaagtataaataatattatgaaagcagaactcctacaggttgcattttctgtgaataacaataaaatgtaccagttaaaattgtaaattgtaaccaaaaagtattatctagccatctagccacatacacatataatttgaggttacttaaaatagcatttgggttaagtagaaaattccaactgattttttttttaaggattaggtgagtactaagaaggaagcatggtgattggaatccagttaattcaacaaagctatcttaaaataggtaaataaatactcatttgggtcatattcagtaaagtagagaatgatgtctttacaaatttattcaacacataaaattattttttgaatattgaaaattatttggcaaatgatacgtatagaaatttcttaaacacataaaattatttacatattaaaaatcatcacattctacaaattattactaatatatggtacactgttgggttcagaagctattcttgaataagaaacttgagatttctcatgaggctctattgtcagccacaaaatatctatctgaaatattttacttatgtattttttgggaataatattctatataacagcaagtttcttctaaggcaacaaccgaaaatgctcaggatgttataagagcacttaaaatgcccggtagagttgaaggaaaaatgcagaaacttcaagaaggaaaagtaaatctagagaaggatctagaaaaggaatcaaacagagatgcagttactgccctcaggacagttgatgatcttgtgatcatcaaacctgtatgagtcctcagacttgccctcaggtaaatttgaataaaacaaagacacgtaaaaactggactcttgacaagaattaaggtattccaaattagaatttataagccacataggaaatcaaccaccagaataaaggttcagaaaaactagatatttccaaaacgtcaaatactaaaatttttaaaatatttaaatgtatataaaggaaaaaatgggaaattgaagtgatatgtaaagatcaaggagcaacaaactttataagccatacttggaaaagaactaaaccaaatataaacatttgaaaaataaaataaagttaatatacaatgcacagtcaaaacattaatgcataaagatcaaggaaaaacaaactttataagccatatttggaaaagaactaaaccaaatataaacatttgaaaaatataataaagttaatatacaatgcacaggcaaaacataaaaataagttaatgagaggattagtgaactgtaagatttagctgccaaaatgcattacagaggaacgatgaaatagaaatatgaatacagatggctagtacctattagttatttatttaaatcctctcgctcctccaattctccaccctccaataggccccaatgtgtgttgctcccctctgttttaaaatacgtagatacttcataacaataggtttattgaatgctgattttaccataaaatttgtgacgattcaataactacattaaaatttacttgtaactttttgtgaatatatattttaatccaacatcaatatttgaaacctttaaacagcaaaaatactaacaggattatctttgaaaatggaacaccatttccttcacttttttttttttctctttgagacagagcctcactccgtcacccaggctggagtgcagtggcaagatctcggctcactgcaacctctgcctcccaggttcaagcgattttcctgcctcagcctcctgagtagctgggactacaggcgcgtgccaccacgcccagctaattttttgtatttttagtacagacagggtttcaccttgttagccaggatggtctcgatttcctgacctcgtgatctgcccgcctccgcttcccaaagtgctcagattacaggtgtgagccaccgcgctcgaccctccttcactttttaaaaagtttttctctcattagaaaacaaatctcacacaaagtaacatacagagtgttctaataagtatgagtttatacagaagacctagggagctcttattctactttttcaaatggagactgtcccctaaaaatagaaaacctgacgtactactaataaatatgtttaagctcatggtgaatatttccagcccctatcatcactaagttagtcaataacgttacaaggatttaataaatagcagagaataatatttccacatactttcgtggtagccagaaaacaagataaacaaaaacctacatatatagtagttcaataccttacttgttttgattactatagctttgttagtgtagttttaaatccggaagtgtgtgccctaaaacccatgggcatttatggcctaatttcacactgatcataggttactctgatttccacatacccagtgtagttcaccagtcttgttgtgcccatgaatggacttggaggagaacaagcctttagaatacctgccagggtcatcattaagggaggacccatcattttttcacaagctctggtgttacttccagtcacctctcagtgactatttcctgtcattggcctggacattctggtgccttggatccccacctggaccaagcccaagtcttttgtactgatgactgtacaatccaacaagaaaccggtacagctttccaacccccctaaggtgatcaacaccctataatatccactcaagtagggcatagaagggattcatcctgttacatatgacatgatagaaggggggttttctgaaaccactttcttaaccttttaacttcccagtctggccctttttcaaggccagggaaaggaatggaggctcactgctgattaccacaacctcatcaatgctatacttaaatctccttacatcagacattgtcaccatcttggaagaagttcagaattcctctgcaacttggtttactgttactgacctggcagacatgttttgttttgtctcaatttgtagagaaattcaggtgcagttcacttttacttttaaaggccaaagatacatttttatgaagcttccaatgggctacctcggtagtcctccactggctcatgatctgtgtagagaggacctagctgccctctgacttccacctgtggcattatgtgggtggtgtcctgggtgataacccaaaggaagaggtaaaattgacccttacgttgagaaccaacccttgacccatggggatgggccatcaccctatctatacaagattcaaggacctgccatctccatcaattttgggggctatatttagagtaaggaaggcaggcagacttcacaatcagcctccctcactcactcacagagttcttttcttggctaaagaggcccagcatgttggcatttgtgtcttattgagataacacattgatcacctctaatgcgttctaagatgcatttatcaggccactcacaagacattcaccttcatctgtgttcttctcaagaagaagctataagagctgcccagtggttagtccaggaggctcttccactagtcccatggggaaaggacttgcaatggtaggtaataggtttcaataataatactgcttgactcatggagtctttagactactcactctggatcttgactcacagtgggcttttggtgtatgcctgtggttaatatatgcttctcaagacacagttggttgcagtttatctagttctgtctgagaccaagacactgacaggatttgaattcatctactgaaaacagagatctccactgtgccttggatctgagaaccctattctagcaaaccaggtgctgctaccaagcatctcttgtcaaatggaagggatacttgcaggactgagacaggcctggagtttcaggtgtttctgtacttcacaagactgtcagtttctgtccctccagcatgccagaagatgatcgacaaccagagaccattttgcctttagctagctgggtcctttccaacagctggaaagctattgcactgctgcagcaggggtgtacctactttagtgatggacatgcagaggtgcccaagtcacatctggatgggcaacatctatcatctggcatcagataaacccttccagctgcagaaaaaggaccactcagtatgcagaactgatggcccatttccactaggtcatgaggttggttctcaaagtgagggcccttcttatctcttcctcttggttatcttttcatcctcctggctgttgagcagtctgccatgcaaggccagtctgaaacccacatcttcaccaattctggggccatcactaatgggtaatcagtggtggtcacaaactggaaaaatcatggtcaggtactgtggggtgcctccctttggtggaacggtgctgatttctgtgccacatggtctatttttattcaccgtgtctagactcacaccagtaagatcctgcctctcaatatgacaaggcaaattaccttacctacatccttactctcatagaccagactttggtacctgggatagctttctactcctgggcacacctgactttgagacatcttatcaacttggattttattgtggggcttctctgttttattcaactcagttgcttaagccatccagaactggctgctctggtaagaagacttcttgtctcttactgtcttttggtgacataattacccacatgtcaaccagaaagttcattttattgcccaccccaacaaagagcacgcctcaccaaatatgcccccactgtgggtgacacctacaacctacactgcactgcctcctgttctttgttgttgattagcagcccaaaaacatcatcagtgtctgactgtgtcagtcctggccccttttgggaacctccatgttactcagtctgagcagggtgtccatttttcacctaaggtcacccaaaattgggcactggggaatggcattacctgagcctttcacctttaataccagcagacagcgatgggctaagtgaaagtatgaatgggctgatgaagactttgaaaaacagcctccctttggactccttcttgtcaccaatatctgcctctggtactagctcatatttacagctactcactacctctactcctcatctccattcccagtggccaacccacctttcaacttttctgcattattcttcaggccaagctgcctaccctgacttgggaccacaggattttgacactgccgcagctattgccctggccccaggacagcaattctcagattacgttttcctcttatttatcctcccagagatgctacccacaactttgggcaacaccacatgggcattggtgtctcattaaggtctctgcacttctctttttccagttactgttacaggggtggatgtgccaccagccactgtgcatttgatttcacctcgagatgtggcagttacgacattgctgcctcactaggtcttttgaaaaatgactccagaatcaaccctggttgaaagtgagccagcagcttgaagactagcaataagttaatgttggctgaataagatttcaaactcacaaacagatataccccacccttgttattgcaacctctgcctttgctttctgttagcacttctcattcagggcctcatctttgatagcctgtgcaaacccctcccatggtgactcccttgcaaaactctgtactgggagccttcctgttggagtcctctactgtgtgtcctgtgtgtttactgtgtaccttgcctgccacaagccccacgcccaaaactgtttctctggtgccaacaagtactgctggagtcaattctacccaaaacaattgattattgagaataggactctgctcatcctgctgaaatatcaacatgattagcatctccagtctttgaaggagtgccttgacatttgctcctgctattgctatcagaaagctagtgagctgtgatctgattgagacttatggtctctattagaaattcttgaatggcaccatcatgttcctcatgtagaggccatctgctgggcccagttagacctcctgcagactaaactccttatggtcttctggactgggctgactcagagtcctattgtcagccccacacttgattgatttttactatgctatccataagagttacttctagatttgactgctgctttttattttgattttatccctttgttgcttccactgctttattgccagaattctgacaattaatagcaggatacctactgcaacataaaccttatgacacctttaccctggcactcatgtctttcctcgtattaaatgaaaacggactttgctgccacttgactcctatcctgctggctctgccatcttgcatgtgacaaggctattagctaatatcactgcttgcttgaccacaggtgatgttcttgtgtcacagaccttcttccctatttataaaaaaatcacctttcttccaacaaatggcaaagcctcccttctagatcggcttccataaataccttctcaccttttttcttagcttttgttcagacccctctttttgtatgacagagataaaggctagcgcttattcagcgctcctctagcccttgaccccagctcagatcttcccagtctgcaaggtgctgcctcatacacatgactgtgtgccttatttccctggtggttgctttatgtccttccagaccatgtatcagttattccacctgctgaaagataccctcacagttaccatctctgtcctgcacccagaatgcccacacagactgtcccaccaaccctgaccacattgctacccagcaaaacctttacttgtgttttttcactagttttttaaataagaaaaatcttagaaaaagttaacagcgtttaattgaacaaagactgatttacacattacgcagccttcagcaccagaagaggcaagagctctgctccacagtgtgggcaggaggatttatacagaaaacagaaacggaactatagtacagaaacatcttaattattagttacagcttggaatttgccattttttgtgagaaaaggtctgactgattgtcagcctgtgatttactgaatctcaactactgttattggatgaaacttagctatttgttacaaaaagatactcctaagttaggcctccagttggtttacatactcaggatgtagttcctcacatagaggctcagtgcagaggtagtttcaggtcatgtttagtttaacagtttcttaggccacctccttcactgttcctacagcctacgccttttggaaacacttggtacctcagttgtatttggcagccatttggatggacaagacccaaaactcaggcttgatcgggccacctccaaaatcaagcttttgtacctatgatatcacctccagcacacacagtgcctctagacttaactgcttagttctgagtcctcctggtcctcctgtcccactccagcctgccattgctcacagtcaagcaactccgaacctactaccaagtccatttaactcattttacttccccatgcaattgttttttcaagacccagtgtacttacaggtttttgtttccccagatggcctgatgtccctcctcaaattgcagcttctctagatttattcacagattactcagcattgatgtcactgacaatttccatcacagggtcatttcagtgacatgtcaggcaggcagcctttcaacttgctggtcatgcctttgctgatattctgctactagtttacttttggtagtccagccctggttaccatctgttgactgttcttttctcaccattggtaagtctgcccttggacagctgaccctcggtcttgtgatctcccctaatttttcaggcaacacgggacctataatgccctctctgctgatgatgcagttcagtccccaccagactgttctgaggatgccaccaattcctgtcttaccatcacaaggtgcccttctagaggatactctcatacttatcagggcacctgcactggctggttgggcacctctcacctgacctcccccaagaggccgtggtggtcctgtttcaggaacacctgtttacctattttcttacccacctctttcttgtattcctttaccttcaccaaaggagagataggaccctttgggaatctggtcaactaggacagtcctaaaccatcaagcacaatacactgtaagaaaaataacaccttaaaatagaaataaaggcatatatatagggtgaacattttgcctctggcctcaggctcagggtgactccgcaggtgctggcccattcccgacattccctgatactgtcccagtgctgtttctcagtaattcttctttttctgtgccagaatttttccccagaaacaaatctgacatttgggtgtcagagagtaggaaataaatctgactgaacttttgaggccttctacctcagggaaatttgtaggagttaagtggctgaagcatgttgaaaaaatttttctaaggtgaaaggtgtttttgcctttggccccttctacaaaccagaaagaggcacaataccttttgtgtttgggggaggcagcatattcctcatttgagtgtgttactgcatttctcttcaccactgtccgggggtgtctcagaaaggggttggagtgctgcagctgtccattttttggtggtgcattcatattatgcagaaaaaatctataagctaggccctaaccttctcttcctctgagagctgattatagggtacccccatgaggccataggtgccagcttgaagagataaagtggttttgctgaatgacatgaaaagctgttcccagtggggtccagagcaagagaagtctctgcagcaggtccaggctgctgtacaaggtgctctgccacttgggccatgtgatagcagatcccatggtgcttgaggtgtcatggcagataaggatgccttttggatcctttgcaaggcttctattagtgaatgacatgctaacctttaggattgtgaagctagccctgccatcatccatagaacactacttttcttttgatagaaagttcttggcctattaggccttggtagaaaatgaatgcttgaccatgtgccaccaggttatcatgcaatgtgacctgaccatgatgacctggttgttgtctaacccatcaagccattaagttgggcatgcatagcagcactccattatcaaatgagagtagcatgtgtgtgattaggtccaagcagatgctgaaaaacaacaaagttaagaagtggcccaaatacagatggtttcttctcttgctaaaccactgtctctctccaaggcagtacctataccgtcatggggagtaccttatgaacagttgacagaggaagagagggatagggcctggtttaacaaatggttcggcacaatatgcctataccaccccaaaatgggcagttgcagcactacaacccctttctgggatatccctggacagtggtgaaaagaaatctcagtgggcagaagtttgggttgtgcgcctacctcattatgcactttgcttcaaagtagaaatggccatacatactatggcgtatcagttcattggccatgaccaatgtggtttgcctggatggtcagtgatttggaaggaacatgattgaaaaattgatgaaagggaattctggagaaaaggtacataaatagatgtctttaaaatatcctccaaaatgaagctacccatcttctatgtcagtgtgaaccaaagtgtgatcccagcaggggacggtttaaatcacgtggctaggatgacccattttgtggatactggtcagcgtctctctccagccacccctgtctttagctaatggagtcatgaacaaagtggccatggtctctgggaaggaggttatgcatggacacagcagaataaatgtccgcccaccaaggccaacctgactatagccacccctgagtgtccagtctgtcagcagcagagaacaacacttcgcccctaatataactccattccacaggatgatagccagctacctggcgcctgccctgagttgccttgtgttacctttgggtgcctcttgccaaactgcttaagcatggggctgggggaattgagggtgaagccaacatcagcatcttcacaaaaggctctcactctgggtgccgctcagtccagtgcatagctgtggtcccatctgggcaatccttcactccccatcaccattgtgtttgggtagtgggggaattgggagatgagaggagccctctgtagactggcataggttgttaggtgttggaactttggtgggtctgtcatgttcacacccagatcacggttggcaggatgagtgttgggaatcaagcttgtctgtcatttaattctgagacctcaagctttcatcttattttctcccaggctgcaggtctatggagaggctcctctgtgcctgatcttgagagcagaatttctaatggtggtctcctcttgtggggacagccaggcaggccactgtcattctttgaccaggcttcatctaattgtcttaagaagcaaaaatggagagtatgtgtctggctttttgctaggtaaaaaaatcaagtatcatccaacttacaaaggaaagggtggttttttgtttttgttgtttttgtttttgtttttttgtttgttttagtaagctgctcctgatgaacacaaaggatgggagatttaattgcagctatttgccaggattacctgggcacctatattagtttgttctcacactgctataaagaaatacctgagactgggtaatttataaagaaaaggtttaattgactgactttcccatggctgggggggcctcaggaaacttacaatcatggcaaggggcaaaggggaagcaaagaccttcttcacctggtggcaggagacagagtgaggggggacctgccaaacactttaaaacaatcagatctcatgagaactcactcaccatcacaagaacagcatgggggaaaccatccccatgatttaattatccccaccagacccttccctagacacatggggattacaacttgacgtgagatttgggtggggacacagagccaaaccatatcatcacccatcttcccctgctactttctcttgccctacacatctcttccatttggctgtttataagttgtacccattttaataaattgataaacagtaaaatgtttctgttgaattgcttgagtagttgtatcaattattttaagcttgtggagaaggttatgggagcccctgatttataggcagttgctcgaaagtatagttgggcccctgagtcttgcagctggcatctgcactgtgggaaatgttgtgggacggagcctcgaacttatggagtctgtgctgactctgggttgtgtcatagttaacccttttatgcctgaggttgcaattttttttttgtttttcgacggagtcttgctctgttgcccaggctggagtgcagtggcatgatctcggctcactgcaagctctgcctcctgggttcacgccattctcctgcctcagcctcctgagtagctgtgactacaggtgccgcccaccacgactggctaattttttgtatttttagtagagatggggtttcaccgtgttagccaggatggtctcgatctcttgacctcatgatccgcccgccttggcctcccaaagtgcctgaggttgcaattttttgaatttttgcaatcagaccttggtgatgaccttgagcagttggatataaataactcccacatgctaagcattccaataatggaacactacgcataaataagctaaaatcttagacaaccagttggtgttggagaattgatttttttcagcaaaccccacacatttgatgcccgaggtgttttcagaaaaaataaataaatcacaggtcagaacctttaccttactccaggtaattggtcacttgtgagagttgagactctggaggagcatctccatatggtgaaagggaatagtagagtgtatggagctcccagaattaaattcctgagcttctcatgtttctctcattcagtacctaggagtgagccaccctgggctacatttccatagtgagagcaaactgcaagcttgaaatcctatttaacatacaaagtatggagtaaactgtagataaaacaggctggttacccaagttgctcctttttccccccttcctcccctccatttttccttttttgagttttcagtaagttaacgttaccattaatattccacttacattgtgctgaaaaagtttgtgtgtgtgtgtgttgccttcgtcttttgcacacgttctttctcaggctgtgggtcacccagtgtactcacccttttcactgcttaagggacttgcgttgtttcacgtctgttttattatgacaatattattgttgattttaacaaatgaaattgaggcacaaaatatacttgtaaagtttactggagccaagtgaagactgctgtgtgaaagactcagatccaagtaaatgtaaatatgagttccatttggtctttgttaaaagcaggtttttaaagataaaaggggcaacacagagtgagatggtaaaaagtttgttggaaattctcattggttttcaaaaataatatttattaatgattggttatacattgttgggctgtagggtatgagtaatagcgtacagtgtgtggcattattaggttaatctatagctacttgtgctgttagtctagagtgcacatagcaagcagctttaagaaataattacttagcttaatagtcaaggtgtagggaatgggacatgtttgcttcttcctgtgtccttttgggtctgatcattagaggtagatcacattactcagattaaaaagtttcttgccaggtgccatgggtcacacctggaatcccagtatttgggaggctgaggcagaaggattgcttaatctcaggagtttgagaccagtctgggcaccatactgagacctcatctctattgaaaaagtcaaccagatgtagtggtatgtgcccgtagtcccagctattctggagagtgaggttagagaattgcttgagcctgagagatcgaggttgcagtcagctgtgatcgcaccactgcactccaacctggacaacagagcaagattctgccttaaaaaaaagtttctattttttctcattgttaataaactatgtattcccagtatggggcttagtgagggagctttcctataacaatgtaggcataagtaccccaagcatgagctgccaggctcagtggaggaggtaaatgacagtagggttcagcatgggcagtgactcatgcagtgagtagctcttttggagctggcccgtcttacaaggaagttcatatatgtctccttagatacacaggcagctttcttttgatgcccacctgtgtctggaagcacatctcagtatctgatttgtgctctaagcagaaaacttatctttaggtttgtcttcagctgcagagaatgatgaggttgtgtagaacctcagaaagagagactgtagattagtgtgagtgtgccttttactaaaaaaatgataggcattcaaaggcatttagcaattttggaatataagccagtaatgcaattctaagccccccaactgaatgaatggacttttggccaagggaatcccaatgaaacctgaaaaactaatttaggctatgacaagaagggagagagttagatatgcctcattatagcttctccctttggagtttaggtaccactgaccaccatcaacattaattaaaatagagatcataaaactgacaaaacagactctgtagcaatagcacgtccaattctaacctaattctggtatagcatcacatgacagacagcaggccctgaaggaaataaaagtattttaccccaaactatattttgttgtacatatttttaaatggccctgcaaaaccatctcttgtggaagaaatttgcattctgtagagaatctgtgtcccttactaggtcttttctggaaagtctgacatcttttaagttcccataagaaacatttaccatctattctctctgaagcgtggtacttagagacttcatcaacataacaagaactttggtgtccacaacttgccttgtcttattcacacatttctttcttctgactttataggcaaagctaaattctttccaacaattgccaatacaaagtctttgcatccacctatgatttgtcagcacccacatattccacctttgtaggccaaaccaatgcatactttacatgtattgatttatgtttatgcctggaattcattctctttaaaatgtataaaaccaagctgcatcccaaccaccttgggcatatgttctcagaaccacttgaggctgtgtcttgaaccatgatcactcgcgtttggctcagaataaacttcaaatattttatagagtttgatagagtttggcttctttcatcaacaggaggcatacaaaaatatttgtcataattacttatggtagtgagacttgggtggggaaagagttttatttgtatgcctttatttttttactatttatttgtgccatataatgtactatttttacattttaaaagccaagagagcccctcctgcctccattgaggtgggggttaaggctgaaaccctctaatcacattgctggtttccctggcaaccagcccccatcctgaattctctaggagcccccagccatcagtcatctctttagcatacaaaagacatttgtcacttcagacatcctgtgggttttaggggctgcattccaggaaaccgggacagatcaatacatgcttcttactattaatataatcacattcttgcaatgagggaacctccaggcttggctcaggtatggttcaccctatctatggagctttactacaccttcctccttccaattagaaccagcccctctatgtactacagctctcctgagccttcacacacattcataatagtggcagcatgttctgacacttaaaaattcctgaaataatcttagtgtttattgtttacttctttatatatttgctcctatgggttctgtgtacttcaccactatattcccaataccaagcatagtgatgcccttggcaggtgctcagtaagtaactatttaatcagtgaataatagcactgtctatggaaggaatgcagaaagtagtaggttagagcaaaccttagctcagccattcactattaaggtgaccttgggcaagtccctgattttttctcccttcagttacctcatctgtgacatggggaataactaaacttacctgacaggtttgttggcaagaacttaataagtaaaaattaccaaagagcttcaaagcactggctggtatagtgaaaatgttccatacatgtgaactattgacagtatcatttcactggtcgttgaaattttttttatccttcctttcactcaacattaagccctgaattttctctcactttgttgcatatacataaaccatttttgagttatgttcaatattttatactaaaattatttaaaatgttaataattaaatactattagttgataattacttttcctatatgctgcataacttttgtagtacagaaatgtttatttttgaggtaatctactttattaacctttttcaatcatactttttgtactttttatccagtttataaagagcttttattctccgtggaaatgaacatagtcttactgtcaggtaataatactaactgcagcattcttttgcatattctctccaatcatctggaagatttgaggtaataatctcattttatatattttgaatggatagacacatttctggactctatgtttcctaacttttattaaacattttaaatgtatccattatcagacactcccacttacttgaaatacatctttttttatatgtactataagtagtaggtagatgataggcagagagatcacatgtatagatacagatacagatttaggtaaaggtatagataaaaatacttatctgtttggacaatgctctttctacagtcatggacaacaatcactttttactactttaattcaatacattgaaatattttacatcttatgtcttcaagtatatttgcatttcaataacaaatacatatacagctggaggggcagagcatgatggctgaatagaaatctccactgatgatccctccacaaagaccccaatttaacaactatctacataaaaaagcaccttcataagaaccagaaattaggtgcatactcagagtacctggttttaacttcatatcgctgaaagagatactgagaaatccattcttgattcaagcattgccacctccttcctcatccccactgaaggcatggcagagagcatttttgtgcactgcagatgttaccggcaggtctttgttcttagagctcccgagatggtggtggaccactcccaacatggcagcaagccttttgttctctgacctggggttgttggcctcacggattccaaggaatggaaccttgggccatgcagtgagtgttatagctctattagaagccatgggtcacagaagagaactgtggaacccagcgactagtgttcagttcagttaggacaaacccgggcacttacccacgcaggaacaatagtgagcctctagcctgattgggagcggcagtgggcacctcgctggatcagaagtgcagcagacaccctgccagatccagagggatggaagtcagcagtgggtctggcacagcagcgatcagcagtggtggacggcaagtgaaagctcagctcgagccgcaacaaacgcggaccggaagagtgtgcagttgcaaaatttaatagagtgaaaacagggttcccatacagtgggaagggacccaaagggggttgccactgctggcttgaatgcctgggtttatatcccaatcattgtccctccccctgtgctctcaggcaatagatgattgactatttctttatctcccacttttagcctaattgatattttagtgagctctctttactacctaattggttgggtgtgagctgagttacaagccccgtgtttaaaggtgggtgcggtcaccctccctagctaggcttaggaattcttcgtcggcctaggaaatccagccagtcctgtctctcagtaccccctctcaacaggaaaaccgaagtgctgttggggaggttggccgacgatcgctctaactgcttcctgctgaattggggcctggtaggggttgtgcagttgagatttcctcaggaggggttccttcaatgtcatcaacattggagcatgggctagcaggccggtccaggggtccgtggtagatcttagtcatggactgcatctgggactccatttgaagaactatttgtagttttacagctttgattttggaagagacaaacttaacaaggaggttaaagatacagggattgaaatgtatggcctgaagtgcagggggatgtacatccaacagttagtagggtttcgggccaaggcttcatggagcccagtgagggtggtattaaataggcttaccgggtgagtataggtatggaggatttcatgtagttttgagaggtctagtcctttgtaggggctaggggtgctttgtaccctggtcagttgggagattgcttcctttacgtgtttttctcttgcctgatcttgaactccacccccatcagacataccggtatgggtgaagtaagtccaatagacagtggctccaagccctccaggacaagtaggattattttccctgtccaataatgagtatttgcatgcatgcaaagagtggtagagttatagtagttgtggggcatatgggtgtgggtggtgaaagtggggtttcctttagaaaaactcctatacgatggggcatcaatatttctgggaagctgcattctccctagaagctcttcctgctggtagtacagcagtatggagctactggtagtacagcagcatggaggaggtgcagtgagagtgaaagggggtaagagaacagtaaagagaaaaatatgacaagggagggccatggcgatctacgattgtagttactttcctcacggttgtcgcttaaagagcaggcacagatcctctagaagttcacaggaataactagtgttgtctcctggattttctggttcctttggcagtatctagggtttgactcgaatgtgatgtatccaagattctactccagccattttaaccgcggttgggatagataaaatgactgagtagggtccttcccaggatgtatccagggatggggagttggagggaagggacttcactaataccatgtcaccaggttggaataattcctttccctcctctcagggacaggttccctgtgatgttttaagaacttgttgatatttggctaaggagggatatctgcaactaagttggccatctctaggtcaagcacaaggtcattggttaggaagggccgtccatacagcatttcgtatgggctgagtcccgctttttggggagagtttcggattcttactaaggctataggcaacagagcaaaccatgcgaggtgggtttcttaggttagcttttttagatgtcatttgagcgtttcattcattttctcaactttcctgaggattgtggcctccgggctcagtgtaagtgatattgtatgtctaatgtctgggatactccctgggttactgtagccttgaaagtggggccgttatcactctgtaagccttggggaagtccaaatctgggaattatttcatgaattagtgcctttattacctcatgggcctgttctgtcctacaagggaaggcctccgcccaaccagtgaaagtatctacccagactagtagatactgaaatccctgagatttgggcatgtgggtaaaatctagttgccagtcttctcctgggtaatggcctgttcttttttctcctgaaggagcttggcgataaggcaggggattatttctttggcacacttcacaggccctaactgtctgcttgatagttttgaaaaggtgtggtctagtaaataatgatttggccatctgatgggtgctatcaatgcctaagcgaaaggtttggtgaagggttttaagtaatttccattggttagctgcaggcaaaagtatttttccttctttggtggctagccatcctgaggggaggaaactatgtcctcatgaggttccccattccatttcttctgctgagtattggggcttggtttcctgaaggggattaccctgtactaggggtccttctataagcatttctaatggagggtcccgccttgcagctcttttggcttcaatatccacttggcagttcccttctatttccctttcttttcctttctgatgatctcggccatgtaagactgccacctctaggtttctgtacagccagtaataatctcctaatggcttcctgatgtttgataggtgttccctcagaagttaggaattccctttctctctatattgctgcatgggcatggaggactaggtaagcatacttggagtctgtatatatatttactccttttccttctcctgtgttctagtgcccaagtgagggctattaattctgccagctgagtgctagtttctggagtgaggggattactttcaagtattccattatcactggccactgcataccccgcctttcgaagtcctttttctacaaaggaacttccatcagtatacaagttgagctcaggatccgtcaagggaacctctagaaggtcccctcgagcggtgtaggtttgaacaatcacttgttgacagttatgttctatcttttcttcattgtctggaagaaatgtgggtgggttaagagttgcacaagtgcacagtggcagcactggcccttcaagtgatagagcctgatatttaagcaaatggttgtctgacagccacagtctcctttagcagtgagtatgccgttcacatcatgagatgtccacacagtaagatctcttccctgtatcattttaactgcttcagatgctaagactgctactgctgccactacctgtaaacaatgagtccaaccctttgccactacatcagtttccttactcaggtatgccatgtgttgtaagctggtccctcggacctgtgtaaggacttctagagctattcctgtttttttttctgtgacatataaagaaaagtcttgctccattggcaagcttaacactggggcttggattagggccttctttagggcctggaaagccgcttctgcttcaggtgtccattctactaaatgggtattggctttctgagttcccgtaattagtgtgtataatggcctggctatttcattgtacctgggaatccatattcaacagcagccttttatgccaaggaaccctcttaattgcttcagggttttgggatgaggataagccagtataggctggatacgttcctcactgagggccctggtgcctttggataattttagccctaagtatttaacctgctgtaagcagagctgagcctctggtttggaaaccttgtagccacaggtggcgaggaagtttaagagcacttggttggcttgatggcacaaggtttctgaacaggtggctaaaagtaaatcatccacataccaaaggacaagagtgtccaagtatgagaactggctcaagtcttgggctaatacctggccaaatagatgggggctatcccaacagtccaggtgagttgagatattgggtttgaaggatcttcaaaggcaaacaagaattgagagtcaggatgtacagggatgcagaaaaaggcaaccttaaggtccaggactgtaaaccactctgcttcctttggtatttggaaaagcaaagtgtaagggttaggtgcagctgggtatagagggacaacagcctcattgatgatcctgagatcttgcactaacctccactgtccattgggtttctgtacattggagtattgcaggggctattgcatggttttactaggccttgggcttttaggtccttaacaatcttttggagtccttcttgtgcctcgggtctaagggggtactgcctttggtagggaaaggaggtggaatccttcagtttaacttgaagggaatgggcattctttactcgtccatattgtccttctgttgcccagacttcaggattaattccttcctcaagtaggggacaacaaatgggtgttccttctcctatgttcaggtgtataatggcccctgcttttgctagaatgtctctccctaacaaaggagtgggcctttcaggcataattagaaaggcatgtgaaaagagtaaagttacccagtcacaacttagtgactgggagaagtatctagtgactgcatgtcctaggaccccttggatagtgacagatctggaggacagttgtctgggacaggagagtaagactgagaaggccgtgccagtgtccaggagacagttaacctccaggccttcaatggttaagcatacctggggctctgtgagggtgatggcatgggccggcgcttgccccgggaaccctcattcctgctgctggatcatctggttagtggcttctgactcagaggaccttcataccctggggtgcggtgggccttccagtgattcccttgacataaggggcatggacaagggggtggcttatttttattcggacaatctttttaatatgtccttgcagaccgcactggaagcaagccctattaggcattcaatttgcccagcctttcccttttccagagccaccaaagtccacttgcctgagggccatgactaaagtgatggccttttttttttttaatcccattcgtcccattccaccttttttctcctgatctctattataaaaaactgagtttgccaagttcactagggtttctaagttttgctccgggtctaaggcaaacttttgaagtttttttctaatgtctgcagctgactgagtgataaacttatcctttaagattagttggccttcaatagagtcaggtgacagagaggtatgcttcctcaatgcctcccttagtctctccagaaaggcagtaggattttgttcctttccctgtgttatagtggacatcattgaataattcttaggcttcttcctagttttccttagtccttctagcttgcaagttagcaaatgtctgcagcaccaatctccatgttctgattctgcatcccaatgggggtctacactggaaactgcctgctggcctgtgggggaattgttctctttcctctgttgtcatcctgtcattgacctgactgagataccggagatcaccaaactcttgggctgcagttatggcagcacttctctcatttggggttagcatctgatctagcaataacattatatctctccatgtcagatcaaaggattgccctaacccttgtaaaacatcagtatagccatcagggttatctgagaatttacctgggtctattttaatttgcttcaagtctgagagggaaaaaggtacatgcactctgactgggccaaattctcctcctcccactgcttggaggggacataatcagggaatactggcacactttggttcattgtttacacctttatctatctgcttttggaccatttgggttgaaggggggtccttattagttggggaaggagccaggggaatgctgaggtaaggaggtagactctgagagcttcctgtagggcataaattacactttttacataattgtgagttgtctcttaatgaaaagaaagtttgaacatatggcacttcactccatttgccctcttctacaaaagaggtctagctgtaagatggtgttacaatttatacttccctcaggaggccaggtttctccccttgaagaggatattgtggtcaggcagtgctgcagaggaatataagttgtttctttcttagcgtctgagggtcaaattggcccaattctccagaatacatcttaggggcgtttttgccttggagggaacgtttcccatctgaaaaaaggacatagggatgccagtacccctagtcattttccgatgagcattagtcctagagcatcctctatggtcttaatgcttattcatttccagggtgcgtaaccacccatggacctctgcttatcggattagttatgctcaccaatataacagtcctgcacccattttcccacctttcttgaccacaaagaaaggggtctgggctactggattctagtgatcctttaccagtgtgcccaacattgcctttgcactcagggatgagttctagagttgggctgtgttcctgagtatttcataacaacccaattgccccatcaaggtgcattcccataaacaacagttcctatgcaaattcgtttcagagagggtgtaggtaaccttttgagtcaggattgagctagagtttttgcccactagggcctttgtccttcttttcctttgtaggaatatgccctaattattgatcttaaactttttgttgccccagattaagtccttttgggtatgaaatatgacagatggatcctacttatcctatgtgcctttttcctgcgagaaggagaatgaggagaaaaagatgggcttgctggtttttatgtgctaaagtccagttgttaaacttctgggcgccatgttgtccttccagtggtattgacttatgtaggatcactaggcaaagctgtgagagagataattcctctcttggcagatggattttgggaacacagtggaaggacgtttgctcattgcccccatttgccactataggagtatgcacctcactttagacctagttccagttgttaaagtactgggtcatcagttctaaggccctggccaaggagccaaggcttggagattgtattgcagaggggtaagctgggtagaaattgggggagtagagcaccttacacaatgggagagcaatcttcctagccatttacaaactttgggccctggcaagggtggtggggaatgggtcccacataactgcctatgtcaagagctgtgtacctaaattgggagggacaccaggggaaagactccctgggttcatagcctagtgcctaaggatgcagtgtagagcttccttagatccctttgaagttacaaattgctctaatacttgggagaggaagtgaaagtctgacgcattagtacctaggaggcaggggtcggaggaagtagattcagaggtaaggagaattttggggctacgctttcaagaaagtcgtggctgggacctaggaggtatgggtcaaaaggagaggtaggggcacatgcatgggcgactgttgagtagaggcttctggctttgccatgatctcgaccggccaatgctgtgagttcgggacaacagctttctgcctctagtcggccctcggcttcccccaggaatattgtgaaagtggaagctagttccagggagatcaacgctcccaacccagaagggttgggagttagaaagccttttcccagaaagcctaacactgagtcttgagtctggcagccacgctgatcgtttttaaccagctgacaggtgcctggtattttcctccgattctaaggaaggataggacagaatagcaagcgaaaatcgtccaatattactcactgctttggagaatccctgtatgggctaccaaatattaccggcgggtctttgttcttagagttcccaagatggtggcgggccgctcccaaatggcagcaagccttttgttctctgacctggggttcttggcctcatggattccttggaatggaaccttgggctatgtggtgagtgttatagctctattagaagccatgggtcacagaagagaaccgtggaacccagaaactagtgttcagcttgattaggacaaacccaggcacttagccatgcaggaacaatgacaagactctagcccaatcaggagtggcaatgggcacctcactggatcagaattgtggtggacaccctgccggatccggaggggtggaagtcattggtgggcctggcatggcggcaatcagcaatggtggacagcaagtgaaagctcagctcaagtcggaacaaacagaccagaagagtgtgcagttgcaagacttaatagagtgaaaacagagctcccatacaacgggagaagacccaaagtgggttgccactgccggctcaaaatgcctgggtttatatcgcaatcattgtccctctccctgtgctctcaggcaacagatgattgactatttctttacctccagcttttagcctaattggtattttagtgagctctctttactacctgattggtcgggtgtgagctgagttacaagccccgtgtttaaaggtgggtgcagtcaccttctccaggtaggcttaggaattgttagtcggcctaggaaatccagctaatcctgtttctcacagagaggaagagtacagcagttgtgaggcattgaactcagtgctgccctgttacagcagaaaacaaaactgaaccaaactcagctgacacccacccagggagtgagcatttaaacaagccctagccagaagggaatttctgatcccattagtcagaacttgagttcccagaagccttgcagctgtgggctaaagtgctctggaaccctaaacaaatttgaaagacagtctaggccacaaagactgcaactcctaggtgagttatagtgctgaactgggcccagagccagtggactagtggggcacatggcccactgatacatgagctagggcagctaagggaatgctgacatcacccctcccctaaccccaggcttcacagctcatgtctccaaaaagagaccccttccttccacttgaggtgaggagaaggaagagcggggaggactgtgtcttgcatttttgtataccagctcagccacagcagaatagggcagtggtcatagtcaggaggctccctttccaaaccctagctctgtcatgacatttctatacacccgctgggccagagggaaacccactgccttgaagggaaagacccagtccttgcagaatttacctgctaactaaagagcccttgggtcctgaataactagcagtgattcccagttactacactcaggacttcaggtgacactttgagacttgctggcttcaggtgagactcagcacattcccaggtgtggtggctacagggtgatacttctgcttgagaaaagcagaggaaaaggtaaagagggttttgtcttgcatgtgaggcaccagcttggccacagggaggtatagcaccaagtgagcttttgaggtccctgataccagacttgattcttttatggcatttctggaccttcccttgggaaaagggaaacacactgccctgaagaatgagtcccagtttgggcagcattaaccacaagctgattgaagagtctgaagggaacagtggtggtattatggaagtactctccatggtctgtgatcgtggtagccacagagtgaggctcttctgcctttggaacaaaatgaggagagagagaaggactgcattttttgtttgagtaccacctcagccacaatacaatagaatgccagatagatttctaaaggacttgactgtagtccctggcttgtgaacagcacctctggacctctctggggcctaggagaacttactgccctgaagggaagaacacaggcctggctggctatggtacctgctaattttagaaccccagggctttgagaaaacataggtggtagtagccagggagtggttccggcagactttgggtaagactcagtgctttgctggcttcatgtctgatccactgcaattctagtcattttggccacaggggtgcttgtgtcacccttcctccagctccaggcagctcagcccagaggcagagactctgtttgttttggagaaagtgagggaagagaacaagagtctctgcctggtaatcaaaaaaaaaaaaaatcttaattctccaagttgaatacgtaagtgaagagattatgcttttctccctttttataaaccacttaatttagaaaacttttatatgtattttctttgaaatgtatgcacatcttttaaaaagctaaatatgtcttttgtcatttcatttgactcaggtgtacctttattttaaacctggaaatcattgttttgatataccaatagcaaaaggtagagcatcctattccagaatttcttttggagagaagagcctaccttcagcaggacctggctccaagttccaaaactatcttatgtcatgaagaaatagaaaatttgtatttcttttgaatataggcagttcagttttttgttgactatagccaaaacacagatgacctccccagttaccaggtgaatttagggtgaacatttgtgtgtgtgtgtgtgtgtgtgtgtgtgtgtgtgtgtgtgtgtgtgtgtagcaacatgctgttttaatgagcacctgagtgccggcaggctgaggcctaaaatggcgtcagcaccaagtgaggacggggcaaaggttttatggtctcctgcaagctggaagtgtcctagtctgatgtaactgctacattgttgtacccggatggcctctttctcaatcttcaggggtacgtgtcttctggcaggctctcttgctgcttctgctatcttgccggcacatgctgctggtgcaggtagccttgcaccgtgggactgggcctgagaagggaggagttattcatctccttaagctttcaggcccagggaaagaatcttacattcctgtctatttggttatagaaaagggaaaacagatgactttctcaataactacttcaggcgtgacatggggtggcgtgggcatcttgggcaaagaaaaactgaattttgggggtattcttaagagacgggatggtatccatcgtgtcgttgtagcaggagcatcgtctggattgtctggcggttaactgtagttttaacaagagttttaatggcttttattatcagtgggataacacaccggagaaacaggaggggcccgatgatgaagattactgcccctaccagtgttttaaatcctcctaaattagacaaccaccctcctagaaggtttgttcggtcccatcccttccaggtttgggctggtacatgggctacttttctgatgtttgaagcgatttctagaaccgtttttctgttatcatctatgttaagacagcagtttagagatattaaacttaccacagactccaccctcttcttctaataagtagtttagtgctagcctgttttgataaattgctacacgcatttggttttgttgcgccgagcatttccagggctgaggcagtttggttagtgattatctctagaacagcctgtagtctagttattctatttagcatatatatagaagtgcaataaccccatgaatcatcctcagcccaagtggcaggaccataatattggatgatccgttgtggaggctatttgtccctttgccatcttttggcttcctcctacctttaaggatagtttttttctttgtttaggttattatatacagggactccgagggtgctgcccactgttaatgttttggaggaaggagtagccttgggggtgagcttgaccctggtgcagtagacccagtgggggagtccttggactctcactgcagttggcctgctgagtatcacagtgtaggggcctgtccattttggttgtagcttttggtgagggtcaaattggcagataaaccccattctttccagacggatgagtgtgaatgcactatgtggaacgcataacgagaatttgaatatatgttgatctgttttctggctgctagagtcagagctcaagtgagggcgatgagttcagctttttgagaggtggtgcctagaagtagtggattggctttaatagtgtgtgtttgtaggtgacactatagcatagccagcattccagtatccttgatgtaggaaggagctgccatttacaaaccaagtagaggaggcatctggaaggggttggtcttaggtttggaagaggtataagtaaggtttgaacagtgttcacacagaagtgtatagggtcttgggcagttgtagcttcaggtaagagcatggctgtgtttagacgggagctggttagcacagtgctttggggggtttctatgaatagagaatacagttggaggagccgtgaggcagagatgagacttagtacattgcggtgagctagcatgtctttgatcttatgggttgaataaactgttaggttggcatggagagatagttttaggctttcaagggtgaggacagcagctgctgccaatgctcagaggcaggcaggccatctgagaactgtggcttcaagctgtttagagaggtaggcaacaacctggagggtgagtcccttagactaggttagaacacctaatgcaactccatgctgttcatcggtatagttggagaaaggtttggtgaggtctgggagagtgaggacgggggcctgaaatgagagccttttggagtagatggaaaggtcgggtaataggctgtgcaggttttaagggctcatggagagggcctttagcagcttcgtataacggtttggcaagtaaagcgaaggagagaacccagagcctaaaatatcccactagttctagaaaagagaaaatttcttgcttggtttgcggaggcaggagagactggaggagggatgtgcggtcagttgtgagccctcgggttcacgggctaagagctaggcctagataggtgactgagggggtgcatatttttgctttcttaggggagacccaatacccctgttctgtcaagaagtttaaaagagatagtatgggtgtcgaagtctctttgggaggggctacacaggagcagattgttaacatattgaaggagagtggacggttttagggataaggtagagaggtcgtgagcaagggcctgtccaaaaaggtgggggctgtctctgaaacattgaggtggtagtacacaccaggtgagctgacgtgaaaggtgggtgtcggggttttcccaagtaaaggcaaagaggtttggggaattagagtgtaaaggaattgtgaaaaaaagcatcttttatgtttagaatagaaaaatgggtggtattggagggaattgcggaaagtgaagtatatgggtcaggaactactagacagcttggttaatgagcctgaggtcctgaactaagcgataagttcctggctttttaacagatagaactggtgtgttaaaaggggattttgttgggcagagtaggtgactagcaaggaggtgagaaacgataggctttaggcctacaagagctgcttgggggatgggatactgcttctgtgatagaaactgggtgggctctttaagggtaatgcagacggtggtgtggtgttttgcgcctaaacagcggggttgactacagatgggggataaggaaaagttgcatgttttaaggtgggaggttggaggagtagaagaaagttagaagtaccacaggggtctaggtggatgtcttgggtactatgggaaatgtggaagtagggagtaatgtggagttttgaaaggatgtctctgcttaggagcagagttgggcatgagggcagaactaagaaagagtgagtgaaggaaaaggttacgtgtagggagcagaagagtggagcaggggcttggggtttggagagttgtccatcaattcccacaacagagacttgggaggactgggtgggtcctgaaaaattaggtaaagcagagtagcttgcctggtattaatttaaaaaaacatactggcctacttgccaccatcagggttaccacttggctcggatgaagcgatggtagttgccagggtgtcctttccagggcaccgtcagtcttcagtggcaaggccaatgagatccaagtatgaggttttggcctgctcgggaagggatgggggcggtccttgctgggggcggtccttgctggggccgctcatagtccaacttccagtggggtcctctgcagaggggcacagcctggtgggcttacctgggtttgggcattgtctgggccattggccttcattgccgcacttgaaacaggtgccagccaggtggaggtggattgctaggaggcttctgtgtggagctgccacccagtgggccagcagggggcccctgatggcagaggcaagcatttgaaactctgcctgtttttgccttttactttccccatcacgattgttaaagactttgaagggtaaattaagaaagtctcaccgtggggtttgagggccgtcatcaagcttctgaagcttgcaccaaatatcagggttggattgggagatgaaccgaaggtttaaaatagtggttccttctggcctgattgggtctaggttggtatattttctcatggcttcagttaaatgagggagaaaaagggttgggttttcctcaggaccttgggtgatttctaaaaatgggcactctttttgagtgctgcaaggagacacacaatcatgtggtctcaaaagcggtgtccagaggccccgtcttgataatcccagtgggggtcctggttggggactgcctctgcaccagtaggctgggcaggagcttggtgatgaattgtatcagcatgtgcctgagctagggtgcagatacagtcccggtcttctggggtgaggctggaagagaggataacatagaggtcatgccaggttacttcgtaagactgggtaaggtcctgaaactccctaatataagaggcagggtcttctggaaatgaactgagtcttttgttaatttgagagagatcagtgagggagaagggaacatgaactctaacaatatctttggttcctgctacttcctgaagggggcactctagcacaggtgctgaaataagggtggggcatgggccaaagatggtgcctgagcgagtatgggcaggagagaaggaagaacctggaagtggttcctgctgaggatgtgaagggggaaaggggattgagttaataggcagtggaggatagatcggggcataaggtggtgggatgagtttacaggcttcaggagagggtggtgaggaaggagaatgagtacaggcaatgctagagttgtcctgaggagaggatggtgtaggaaaagaagtggatacagttgactgggaagatggcagctgggaagatggctgagaagacaacaaggaggcttggggggttaaagaagatggttgagaggaagaggtagggactgggaggggtgggcagcagtctgctggatctaatgaggaaaaagaggtagggttgggaggagaaaggtgatcagggcagcgagaatggaggagaagggaatggaggagaaggatttgaacaggtgagcaaaaattgcagaggtcggggtgtaatctgagtgcaaaaaggcccagacataaggaatttctcctcatttttccagttgtcgacaataattgcttatgtcagttaaaattgtaaagtcgaatgttctatttgtgggccatttggacccgttatctaattcgtactgcggccaggctgtatcgcaaaaaaagacaaggtgtttagggtggatatcttgcctgaggcctaaggtttgcaggttttttatggggcagcctagagggctgttttttggaatggaggaccgggagtttcccataacggagggtaggcttgggagaacagggaaaaggagaccatcctggatggctggagggagatgataaaaggagcgatcatcactgctgcctttttcctccccaaacggaatcaaatggcttggaggcgtcctcctaagaccagatgatcattgagtacctggcacacgccagagccttcttggaccaacgttggattttcagaccggagaaatcaagagaggccgtgtggattttcccctgctaaccaggctcccgggaaacttaccagtaggcgagatcagtgaccgatgtgcatgcagagagaggcgactggaggctgaggagtttcctttgtctggctgctatggcctgctctccggagtggaggggtaggtccacaggtgcagatctgagcccctcctgggtctcagcaccagatgtaaggttcttgtattggttcaaaccccaagagagtgccaacacacaaggcagtgtggagcaacatgctgttttaatgagcgcctggatgcaggtgggctgaggcctaaaatggggtcagcctgaacaatatattttttaaaaagattctgtcttctacttttttcattacttttcattacttttatttttgtttttgcagtctcttagcagatgacgtgatatatgtcacattgtggttcaattttataaaaaaaagcaacagttttctctctgttctaccattgtggagagtttttctggagttgaaaataattttgtttttagttgctttttaaacactgtccagaattaccaaacatgatataaacatatgttacccacaaggtttcactgtaaaggggcctttcttttttggggcgtccagtcacatctcacaattgtacagcaaaatattgcacaatttttagatagaaaggtctctctatttggaatctacagttctttgagaggaattagaccatatttctacaaaaaaaaaaaaacttcacaaaacagcaaacagaccttccagctctttcttttaatgccccggcatcttcagacccaaaactgagtcagagatagtgggacccagaaacaactgggctcacatctgtgtattgagtaggcgttaagactctcaactttcattccttctcctgttggaatctgcagagggcacctgtcacattcctgcccctcaaagacctaaatctgcagcttaaacttttgaatctaggtcctggggttcttcagcatctgttagagaaggcttcatgagggctatctctcctccagattttctccccattctgtagctccacgaaatagtaaaccaggttgactctgcctacagtccatacagaggggctggcatttgcctaagattcaaaataaagggctagactttgaactgaggatggatagaaaactcaggggagacatctaccgtgtgagacatcaacatagactttgtaaagtccctcttttggagtgggtttctccatgttttgtagattttgtccagtgacctgctgcagttgtgcgaatagcaaaaggtagagcaccctgtctcagagtttcttttggagagtaaagcctaccttcagcaggacctggaagaatctttaagtgtaaacaagtaccttagcaatgagaggtcagcaccacaaaaatgcccagagtcatgaccacaactacacctcacatgtgaactcttactagagtaggatagttttgtctttcctcttacccaagagttagctgatcagggacaggtagtatcccacatggatccagggtcagctgctttacaagggcagtttaatttactttcctggcctcataggaataccttgaattggtcctgcctgattcatcatggggatatcagcctaggcttactggaacccctctcatcagcatccgagattctgtgagacatttagggatgtcctgtgaagactgttgatggggttgtattctgctttcatctcagtggaagagaaataaggcatctggggtttgtttctcccctcacagaatgaatcttcttggttggtacctagatgggagtttcttcagtttcctggtacttggatgaagaaccaagaggagatctggagatgcaaactaatatatagaccaattgcctccatttgatgtggctattagaaaagcaaatggagctgtcatggctccatcatccgggaactttcagtctagaaaatgtagataaatgcttgaatttggaagtatgtggcctgtttttttaaaaagtagagagagaggtgcacagggaacttgggcttcatttgagcttcttacttccctaatgttattgtgagttctgatgtcactacctgaatggccattcctgaacagaattattagtagtaggaggaggaggaggaggaggagttagtagtagtggtagtagtacagcaatggtggtggcagtaaatgcttttaccttcttaggaataaaatatttagcttctaatatattagtgccagaaaattctaaaggtttatattatatttattattaggttacagaatagagaattgtcttaattgaaatcacacaaactgtgaaagtcaggtttctcatgggcagccttaggaaagacgtaactgaaaataagccagtggtataaagatgtgaagcccaaggtcccagccctgcccagattcaccctcttcgaaaccttgtctaaatatgtttccaccctggcatttcccctcacgcaactgattaggggagatcagaggtttgagtagctgctcttgctgcctccccaaagctggtacccacaattttcccaaatccaaacagataaatgggagccgaagactatattttggtgccttaatttttattttttaattaaaatctgtgtttctaaaaacattttgctcagtaacctgttctctatttcctcagattcagtagttgctctccaagttataaaacagtaaatataaatatataacaataaaaagttcctctgacctatatgccacacttatttctgtgtctcttccatctatatttagcttttattttatatattttcttttcttttcttttcttttttttttttttttttgagatggagtctcgctctgtcacccaggctggagtgcagtggcatgatctcggctcactgcaatccccgccctccgggttcaagtgattctcctgcgtcagcctcccgagtggctgggattataggctgccaccatgacgcccagctaattttttgtatttttagtagaggcggggtttcgccatgttggccaagttggtctcgaactctggaccttaggtgatccgcccgcctcagcctcccaaagtactgggattacaggcgtgagccaccacgcctggcctatacattttatttttaaaatcagtgatagagaaatggaaaaagaaatagaaaggatatgccctgtatttacatcctggcaattatgagacacttcgcacctacctctcggggttttatgaagattaactcacataatgtgaggttccctgtgtaatgctttgtagtgtacttccgagcacatagtacatgctccataaacatggcattaatgtttgtgcacaagttgtttcccaaatggagatttgcccagacattgtggtcctctttaaactttaaagggctagcagacaatgccatgtttcagaattgtgattggtggtcttcactttggatcataaatatttgtattgggctaagagtattgtgtaaagggactctgtttgttgtgcctgtttttttctagctaagtgctactcatgatgggcctaggaggatcaacattaacacgaacagggacttcttacagaagccagttaatagacctcttccaaacctacagaatcacattacttaaattggggctcagaatagcaaatgatatatgcacattgaagttccagaagcaatgcttagctaagtggctctcagcccaagcttccaattaggatcacatggccagtttaaagaaatactcccacttctaccctccccacaggttctgtctgttggtctgggtaagaacatcggtgttgttttagtttagtaccccatgtgatcctaaggtaaggtcagggtcaagcatgagggcccttagatacatttgtgagagttgagttcagcctttgttccagaggaaggtcacagggcctgctctcttttggtttggtgtggtcaagtcagtgcagccagtatttttattgtcgtagccaaaattgctggcttccatggcagagaagggcacttgatagcaggaaaatgaaaactcacattctgacctttacgtaggagctcattgttcctgtcctgtatgatgaagaaacaggagagtagctttttctgcatttcaaggtccttctgcctgtgtgtatggtcatagcaggtgaaggagttgtgctgacatctctaaaggcatattctcaagatgtgtgatttgtccagataatctcatctgaacagaaatcagaaaaagaggaagaaatggctggttctcgggtaaatgagtactaggtcaagggctgggtcagctgtttctccagaaatgtcatgtgtttaaaacttgcagacttttatttatatatttgtaatgtttctgcctaataaatttatttcaagtacttttaaaatttttcttcttatgatagtcagggggctctgaaaaatatttctttcctatatatcaatgttttatatccattcaggctttttaagtgccataagcaatctttactataaattttgacctgcaaaatgaatgtttcttttgtatctgttgaacataggcaggtgtggatgcccaagattcccattggagatggatttgggtccttggattagttaaaggaaagttgatggagcttcgcatgaaactgatgtttctttatgattagattcagattttgccttcttgacctatgctatcatagcaatgatgttgtaacctcctcctgtgcatttttacacgtgataccagtttttttctgttacagttgatgttaattttattcactaggttaaggtgctctctgacagatttctgcactataaagcaaattagttttctctgtattattaagtacattggggagatttaataactgatgggcataaaccatcacatttaatttggaagttctccttcttaaattatttggcctatattttgctttggaaaatgaaggctcttgtttaatggtcaaatgaactgagataaaagccctgccacttaatgtttggcagaatattcttcttggttcagaagcattggcatcacaggtgaacttgttcaaaattcaaaaagtcaggtttcagcccagaccttctgaatcaaaatctacattttaaacagatttccaatttcttgttgtatgcgttaaaatctgagaggcacttcagatgatttttccatctgagaaatttatccagcttatcctgtgtaatgtaaatatagctgtccaatatgtaatgcatgtattggcgcccttagttttatactacaacacttataaaaatatagcatctacactggttttgtaaatcttatgccatcctctttccttagagttacagaatgcattcgagaatctttgtgttttaaacaatgtcttactggacagtttctgccagaacaagttcactttactctcttcagttggagtcaaattaagaactctgcccatggcacattttgtaaatacgtgtgtatttttcccccccccagggactactggcattcagtgatgtggtcatagaattctctccagaggagtgggcatgcctggaccctgcccagcgaaatttgtatagggatgtgatgttcgagaactacagaaacctggtctccctgggtgaggataacttcaatacacaatttatgtatttcatactacggattccatatttttcactcctgaaatgttacctgagagtttgtcatttgcatgaatgagtttttgatctctgcttctaaggaaaacttgggaatttgttggtgtagaaaataaaatcttcaaaatgtttcatcttgacataaattttaaggtggtctaaattcttcactctagatgactggtaattccagaactttagtggcataagatattgttgcccacacctcaaaatctaattacagtaccaagttttgattcagtagtattgggtagtggagctgagaacctatatgtttttgggaggccgaggtgggcagatcacctgaagtcaggagttcgagaccagcctggctaacatggtgaaaccccatttctactaaaaatacaaaaaaaaattagatgggcgtggtggcatgtgcctgtaatcccagctacttgggaggctgaggcaggagaatcacttgaacctgagaggcagaggttgcagtgagctgagatcatgccattgcactccagcttgggcaacaaaagcaaaactccgtctcaacaaacaaacaaaaagaacctatacatttaaaatcctttctaaatattgtatagttaatgtcagaaaatagtatttttggattaattttctagaaccttctaaaaattttttttcctactgagcaccataccaggttggtaactggagcatgccagcaagagtcatgttattttttctaatgaaacaggtcttgctgtgtctaatccagacctgatcacctttccagagcaaagaaaacagcctggaagtttaaagagacaggtgatagtagccaaatttcaaggcaggtaggagtaaataaagcagatgacacaggttagaggcccaaatgtcaaggagaaagccagaaatgaaaatgtggtttgggcagctctgcttcagaaaagcctggttttgtttgtcttcccctcacaggagcatcttctgccccatgctcttaagttctctaaggattccactacccatgaagtgattttcctttgaggcaaagtcctcttcatggtttataaggcactatataatctgactgcttttccattgctttgtggaacataggaatatctacatatttttgaggaactctattttacacaatttaattctctttttgcatcttgtctgaaatttgcaagagtagtggtatattggcatttggttcagaaatcccaggaacaccacaaacatgttgtattttcagctttatgattttctatcctatggaggtttcaaatgtgattttacagaagctcatactcagtgattttatcagaacactaaatataagaaaatctaaacttattttacttcaaaattttattttctaagtaaaaactgagattggtaatttaaactctatgcccacattgttacaatatcaacagtaatataatttaatatatctactccctacatttaaaaaaaatactattttattagggagcttggaagattgctgagcgtatattaaactcccaccttttaccttatttttaaataactgtattttaaatttgtttttatttactataaagcttactggggcatacacacatacgcatgcatgcatatatatttatttgtgtgtgtaacaactcttttacaaataaaaattatgtatgtccaacataaaaatttgatgtgtacacattgtactataattaacacactcaaattgatttggagtgagaattcctaatgtctactgccttagcaaattttaagcatacaagacattattattaactgtattcataaaattacacattcgatcttttaaatttattcatcttaaaaccaaacagcaattccagcactttgggaggccaaggtgcgcagatcacttgtggttaggagttcgataccagcctggccaacataatgaaaccccatctgtactaaaaaaaacaaaaattagctgggcatggtggcaggtgcctgtaatcccagctactcaggaagcagaggcgggagaatttgcttgaatctgggaagtggaggctgcagcaagcagccactgcactccagatcctgccattgcactccatcctgggtgacagagcgagactccatcccaaaaaaaaacaaaaaaactgaaaaacaccttcccaatttattaacttctaggtcctgccaactccctctgtactctctgcttctgtgagtttcaccattttggattctttgtataagtgagatcatacagtatctgccttttggtgtctggtttattttacttagcataatgtctttccagtccatccatgttgtttaaatagcagaattacattatttttatgaccgaataatattttattgtgtatgtaaaccatatttatccatttactgtctaaaaacatttaggttattgtcatatcttggcaattgtgaatgatactgtaataaatatgaggatgcagctatttctttgagatactgatttcatttcctttggttatatacacagaactgggattgctgaattttatgatacttgtatctttttctaagagccttcatactaatttttataacgacttcaccaatttacaacttttaaagtatacagtacaggatttctgtttcttcacattgtgtgctgtgttgtgtttgagatggagttttgctcttgttgcccaagctggagtgcaatagcatgatctcagctcactatgacctccacctcccaggttcaagcaattctcctgcctcagcctcccaggtagccaagattacaggcatgcaccaccacactcagctaattttgtatttttagaagagacgaggtttcaccatgttggccaggctggtctcaaactcctgacctcaggtgatctgcccacctcagcctcccaaagtgctgggattatagacatgagccactgcgcttagccggtttcttcacattattgtcaaactgttacctcactttttaatgtatatgtattagtcatcttaagtgtgaagtgatatttcatcatggttttgatttgtgattgcctgatgattggtgatagtcagccctctgatatatctgttggcatttgtatgtcttcattggaaaaatatctattgggtcttttgcctgtttttcaattttattattattatcattattattgtgttccttttgatttctgagttcctcatatattgttgatatctaccttttatttgatatatggattgcaaatattttctcccatccttcaggttttcttattttattgtttttcttgctgtgcagatgctttttagtttcatgcagtccaacttgttaatatttgcttttgttgcctgtacttttgatgtcatattcaaaaaatcattaccacaaccatatcaagtagtttttaaaatatattttcttctaagatttttaaggatttctgcctgacatttaagtctttattttgagttaatttcttgatgtcatgtaagaaaaaattgtctaatttcacttgcatgtagatattctttttgcccagcatcaattactgaagcaactatcttttgtgcattgtgtattcttgacgcccttgttaaagattcattgaacttatatgcatgggtttatttctgagctctctattttgttccctttttttgtatctattttgttccatcctactcttattaccatagttttcaaatagagctttaaatcagaaagtgtgatgcccccagctttgttcttatttctcaactattcaatgtcttgtaatgctatataaattttaaaattttattccattattttaaaaatggccattggaattttgataggaagtttattgaatctattgattgctttggataatatgacactttacaataattagtcttctaattcataaacattgggtatctttacatttatttgttttctcttgtttcttttatcaatattttatttcccaatgtaaagatttttcacttgtttaagtttttgctatgaaatttatttagatgttaccgtaaatgagttttttttattaagtggtttgtagttagtgtattagaacaaaactgatatttgtataaccttttatattctgccaatttactgagatttttgatttatttgttatggctttctacatataagataatgtcatcaacaaacagcagtatttttacttctttcttttcaatttttatggcttttaaaaaattttcttgcctaattgttctgtctaggacttccaggactatgttaaaatagaagcattgataatgggcacaatatcactttgcattggtgtctgtgcatttgaaggagcaaacacctctaccagtttttataaactggtttatacaggtaaagattttatcctattgggtctccaggctgatgagatcttttctgggttcatagtagagaggggatatacctgagtcctaaggttgttggcagggtccacaatggggtctgtctttggtgggcttattaccaggggcttgtgtgcttgtgaattctgtcttattccttggccaactgagttgccttcagcactttgatctatagggcagacacttggcctaataccaagtgtttgtatgtgtgtggctctcacccagtacttgtgaggtttttaccaagtcacaggtctctaggttggcaagactgtccacagaatgtagcttaaaggtctagaactgagttattcacctgcttcagagaccacagtaaatgtcaaggtctgcagttctgcatctatggccgtgaatgagcatctgaccccagctctctgactgggtaggacctcttcttgactatggctgggaggagttaatgacagttacagtgttacttcagaattctaagtggaatcatgttaaatgggccatttcctcgtctgtagccaagaccagcgtcctcaagtttgccacctgaaggaagacttgctttctgaaaaaggctttccttggtcttgtgcttttagcagggtattacaaccccctgcctgaatcacaaagcaatcataaatgtactttttgtgtgacagggtcttgctatgttacccaggctggtctcaaacacctggcctgaagtaatccttctgcctcaccctctcaaatagctggaattacaaatatgaggtatggtgcccggctctgtcacaaaggcacttatgtccatagatgactgataaatttttgttgctttgggagatatacaagaagaggacctcctgttccaacaacttgctgattttactcttcctatatggtttcactttccatttagttttctctttgcatttcaaatttgtgtggaattttttaataaacatatatatttgggaaacctagtggggaaggtatgttcttagtaaatcttatatgtattcatgagtgcttataaattatatatgttcccaataaatgaacacttttattattacttgatgctcatattttctcttgtgacaattttggcttaaagtatactttgtgaaatataacagttgttgacatataatgtacttttcccagtataattgttacctttccaactatcatttggttactatttgcatggaatcttctttcttcctgccgctttgtctattatgccagtcgtctaaagttagtgtcttggagacaagacatagtttgtggtttttaaaattttttccaaatctctttattcagtcttttgattgggatgttttgttgatgaatatttgaatagctgtctaaaacataattacttactattgtcatttattgttttattggattcttgtagccattgcttctactctcttcttctgtgtgtgtttatgtgtactctgtaggtattttctttgtggttaccatgagaatcactaaaacccccaaagttacaacatataataaactggtaatagcttaacttcagttgcatacagaaatttttttcattatttttaccctaaacttcatattattgatgtcactaattatatatttcatattatagagacatcaacagatgtttattgttgttcttatgcatatttcaaattgtagagcataagtaaaagtgttttcagcaccatcattctaaaactacagaattttatttttgtatatgtgtacatctttcccagacagttatgtatttgtatataattttttgtttaatgacacattttattttcaatgggctggagtccattttacattttctgtaggacagttgtactggtgatgtagtttttctgcatttggttatcttggaaaatcttcatcttctcttaattgtgaaggacagttttactgttaatagtattcttgctttaaagtttttgttttttctttcaataccctgattatatcactcaactccattttgccctgcaaggtttctgttgataaattcacaggtaatcccataggagaatgcttataaatgacacatcccttttctgttgctgctttcaacatcttattcctctctgtgatttcaaaatcttgcttataatgtgtcttgttatggttctttttgtgtttattcttgatttttttttacatcttatgtataaacatttctgttattttcttgtattcttcagtcccacactttgtttcttgttatatattttattattttgttgatactcacatttcctgattttatttagttgtcttcattcccatttcacttattgagcatcattcagatgagtcatttgaattttttagataatttatacatatttattttcttagaattaattttttatttattttgtttccttgattggaccatgttaccctgataactttgcatatgttgtaatctttggttcatatttgggcattaataaaatgccacctgtcacagtctttataagtggctttgtcctggaggaggctaatagctatttgccaggctggagattcttatagcctctcaaacctcttcttatgatctgtcttctctggaattgtgtgtttactgttcagctaaagagatttgttcatgtttctttgtaaaaacctgtaatcatgtgctacacctgatgtctgtctgtggcactgtgatctctctgctgcagtagcaattatttacctttttcttagcagaccaaagctgtcattcagagcataccaccatttctttcagcagtctttgttatgggaaacagaaaccagtctttggaaagcccctaaaagccagaagtatgggcacatgtgcaatgtattgtttttttgtttttgtttttttgttctttgctttgagggagaagccaggagtttgaagtttactcttaaaggcaccatgctgtattggggtggaagaaaggctgtatgtataaatgtaacaaactttactttctattctacatggattttgcaattgtgctcacctagggtgttgcaaactcttaactagattttattttcaaaaaggcattttggtcagtatatttttgttaagtttatatgttcaaaaaggaatcatggcatgtgatattttattatgccatcttgttaatgtctctgatataattatatttattagatttgtaaagtatatttactggagattagtaagaagaataactttttatttttatttctttcagctattttatcttattccattcaagaccttttgccagagcaggatatgaaagatttatgccaaaaagtgacactgacaagacatagaagctggggccttgacaatttgcacttagtgaaagactggagaactgtgaatgaaggtaaggggcagaaagaatattgcaatagacttactcaatgttcatcaactaaaagcaaaatctttcaatgtattgaatgtggcagaaattttagctggaggtcaatccttactgaacataagagaattcatactggagagaagccatacaaatgtgaagaatgtggcaaagttttcaatcgatgttcaaacctaacaaaacataaaagaattcatactggagagaaaccctacaaatgtgacgaatgtggcaaagtttttaattggtggtcacaactaactaaccataagaaaattcatactggagagaaaccctacaaatgtgatgaatgtgacaaagtttttaattggtggtcacaactaactagccataagaaaattcatagtggagagaaaccatacccatgtgaagaatgtggcaaagcctttacccagttctcaaaccttacacaacataagagaattcatactggagagaaaccctacaaatgcaaagaatgttgcaaagcctttaacaagttctcaaaccttactcaacataagagaattcatactggagagaaaccttacaagtgtgaagaatgtggcaacgtttttaatgagtgctcacacctaactagacataggagaattcatactggagagaaaccctacaaatgtgaagaatgtggcaaagcctttacacagtttgcaagccttactcgtcataaaagaattcatactggagaaaaaccctaccaatgtgaagaatgtggcaaaacttttaatcggtgttcacacctaagtagccataagagaattcatactggagagaaaccctacaaatgtgaagaatgtggcagaacctttactcaattctcaaacctcactcagcataaaagaattcatactggagagaaaccctacaaatgcaaagaatgtggcaaagcgtttaacaagttctcaagccttactcaacataggagaattcatactggagtgaaaccctacaaatgtgaagaatgtgggaaagtttttaaacagtgctctcacctaactagccataagagaattcatactggagagaaaccctacaaatgtaaagaatgtggcaaagctttttaccaatcctcaatccttagtaagcataagagaattcatactgaagagaaaccctacaaatgtgaagaatgtggcaaagcctttaaccagttctcaagccttactcgtcataaaagaattcatactggagagaaacgctacaaatgtaaagaatgtggaaaaggtttttaccaatcctcaatccatagtaagtataagagaatttatactggagaggaacctgacaaatgtaaaaaatgtggcagtctttaaaaactgcttcattatacatggcttcactaatttcatactgaataaaagtggtatgagcataatgactgtttaaggatgtttcacaaaatgtaagcttcagagtgcacaacactatactgaatgaaatttataaatataaaagattacaatatctttatttcaaagatcttcctgtaaacagaatctgtactagaggaaaaacccttaaacaattattcagactttattcaactttagaggattttacgggggcaaaaaacctcctacaaatgtggaaaaacattttttcaagatatatgccttagaaaacaccagagtttatagtatagtagaatatattttacagatacagtgaatacaaacaaatgtccaaaattaagtctaaataaaacattacataatttactgtagaaagtactaaggcactaacagtttcagatgttactttaaagcagtgttgattgtcgagaataattcaaagttaaaatagataatttagttgtatgtaaatttaaatgaatcaagagatgatgtctttttgaagcacagttacattcatgttatacttttttgcattaaaagtttttatatttttgattatatattttaatattgatataattcatatctcaaataacttgatttttattatatttattgtttatgttaaagtatgtggtcagttgttgctgcataagagctatgagaagttcttctatattagatgaccatcatttatatgctttttcatgaatgattaagggcaccgaaatgtaacatttataaggaaaatctaagtagaaatgctttttgttgatgtataacagtgttttaagtaacacattaggtattcagagaagtattttgcattatagtaatagggaaacattttgaatttcagtagtaaattgttttatgagttgcacattaagataatacagtagcttttgaaatgttatttttagaatgcaatttcttttcataaaacaaaattatttttaatgtgttaagaatattttgcattgaatgaagtatatcttgccacaataattaacctataccaccttacccaaagttgtaggtaacagatagtaacaatacactactgggtaacagtgaaaggacacctctagtaatctcttttcccagtggcttttaatttcaaacaacttggggaggttttttttatgtgatatgctttggtttttttgtgccttacctcatgttgaaatgtgttcccccatgttggaggcggggtctagtggaaggtgtttaggtcatgggtgtagattactcatgaatggattggtgttcttaccactgcagttagtgtgttctctgttagttcatgtgaaagctggttgttaaaaacaaaaacaaacaaacaaaaaactgatattcctcttgctttgtcttttgccatgatacccctttgccttttattatgcataaaagcttcctgaggcctcatcagaagttaagcagatgttgatgtcatgcttgtatagccaacagaactgaggctaataaacctcttttctgtattaatttgccagtgttaagtattcccttctagcagcacaaaatggactaacatcccataggttatatttttatttttttcttttgtaaatactggacaatgatactcttatataatcttcagtataaccattataattgcccactataaaggagtataatgaaaggccatgtattttgaatcacgaatgactatttacaaaatgtcatactacgtttttctttgagcctgtgacccctctggcctgtaaaaacacatacatacatttagttttgattaacatggagttaattttataagtctgtcactctaaacataagtgttagctttaagagaattacagagcatgtaattgtgtttgagtgtaggtgtgtacttttttgagaagaaaacaaaaatattggaacaaaatataatttaaaaagtattggtaatttactagcaaactaggaatctcaaagattctgaaagtaaatatttattctctgctttgtattgaatttacttctgtaaaatcttatggctgctggctcagaatcttctcatgcaaatcctgtttttttcttgtctgttgatcatactaaacctaatgtatagttttctcattccaaagttcatgaaattttctctatattcctgagaaattctaagaataactttcataaaatgtattgatgttcacaagataattttaagatgtaattctacaatatgtgtgttactacattttatttaattagtatattttatttttgtatttcaattggagaaccctattttggccaatttttacttggtttttgtttccattttaatattttacataattgaatttttttcactttattgagccattttgtttagatgtacactgggaaggcttcataattcacaaagttgttttgacatataaatgaggtgaacaaacacaggaaagtgctaggtttcctgggggtataatagatgctctataattagcagtaaatattcttgtttaagtcactttttggctacaagtaagagattagaaatattcagcataaagagatggcattaactctgcatgtaaagaaaacacatgtatacccaggctgtacaactgcctctgaaattaagaggaattgtgtttatttcatagttatctctggtacttcactgttattttattttcacccccaactatgcgtcaatcatagccctttcccttctttgcttattatggctacagatttctcactgttctctgcagcccatgtaatttcatacagtattttgtaggttgtgataaggaatttgaaatttttaatatagtgaaaaattggatttaactggagagtttgaggacatttttaagttagaaatgcaccatttgaatcatttaattggcataattgggatgtactctacacagtttataggattaaattactgagttagtaatgtttgtatgaaagaaatgttattagattctaccacaaaatatagtaaacatgaaatcagttagaataggtaaagcattaataatggtaggctatatatcataatcactatataaagaaacatcagaatttggaaaccccttaagcaaaaatatatcttagaaatcttaaggacacttaatggcaagcaaaaaagtttaaatttagttttttataaattacatatagcacaatttatgtgtacatgtagaatcttttagtttttagtgtttatgtaatatattagacaataataaacatttacatttatgtttacatttatatttaatttttcaaatttaatttaaatttctaaatgcttctgtggatttaaattttggaataatcttttcttccccattgatactggaatcttgggaagtttcttactcatatcacaatatgttttatttaaatggatgcagcttacattgcagagtttatataaataatcacataacaagccaattccttagtcattttctgtattaaaaaactcagagatctagagagcttttggattgaaatatttccttggtgattttggatgcaaacctgatttctgtgttcacaccatggccagagatgggactgttagcaccacctgcttctttaatgtcgtccatatgatcagcatcagcaccagaaactccaggtgtcccaaacttaaagtgaaagccatagagtcctttggtgactcccatgttctgtgctggttctagaacatgctggtaaatatcagagtttctatgcttatggctgataagtagacatttttaaaaatcataaaaactgtattttctatatagttcagctaagtttatgaaaaagatgcagactcagtatttggagcattgctatcgctccatgatgtgtttaaaaattatttttaaattgacaaaattttatatctacatatatatatatcttgtaacacatgatgtttgaaatgcttaattctagccaattaaaaatgctttacctcaatagttatttttattgtgagaaaggtcaacatggtcttggcacttaaaaaaaaaaaaacaatatattctcaataactgtattcactctgcactacaataggtctcttgaactaattcctcctagctaacaggcattgtttatcatttaacagataattctctaagcccccttctcctaaaacttcagcatctcttaaccttctttctagtctctacttttatgagatcaacttgtttagattccacgtgagtgagaccatgaggtattcatctttctgtgttctgctccattggtctatttatctgtttttaatgccagtattggactgtttcagttactgtagctttgcagtatatttgactgtcaagtagtgcagtgcttccaaccttcagagtcttttactgtactatatgaatttttgtgttttttttgtgaaaaattttattgatattttgatagacattatgttaaatatatacatcattttgtgtaacatagactttttagcaatattaatttggccaatttatgaataagggataacttttcatttatttatgtttaattttatacctcagttttctttagcttttaatgtagagatctttaacatttttgaataattttatttggaagtaaactttctgtaactattgcaggtgtcaattgttttctttatttctttttcagatagtttgttgttagtgtatagaaatgctactgacccttatatcttgattttgtatcctgcaactttagtgaatttattctaagtatttttaaagttttctatttataagactatgatatctgcaaacagggacaattattttctttctttccaatttggttgtctttggttttgttttctaatttctctggcctggaaattcagtagcatgttaaataagagtgatgaagttagatatatttgccttactataactcttagaaaaaaggcttacaacttttgaaggtttagcatgatgtcagatgtccatttgtcatatatggcctttattggcttgaggtatgtatgttctatatgtaatttgttttgagattttgtcataaagtaatgttgaattttctaaaattctttttctgcattcacttaaaagttataattggttctgagatccttcatctttctcagaatctaggaggatgcatctgtacctagaggaggacacaaaggcatcatatgttacattctcgtgacatataatgtctactgcttataatgtctactgtgagtttctgactccccaaatgaaattgaggcccagaaactttcaactgctttgttcgttgaataatgccaagtgtctggaaatgtgactattcagattaaatgcttaatgtgtgtgtgttgactaaataaatctcaaccagaaccttctcagatattttgttgaacgtgggacctttgtttttttttgttgttttgttttgttttgtttttgttgttgttgttgttgttgtttaccagcaggggacccctgttttgtctatgtcaagaacaaagaccaggcaaaagaaatgtcaagccgcatttacaaatgcaaaaatggacttgtttttgatatgcttttcccaacaataagggacatgagtcattggggcatgttacagagagtttcagtaaaattcagaaaaaaataataaatatgaacagccacagcatgcccagaagcctttttatggagccaggcatggttgacctgctttccatgtctcaaaacattagtccctacaagaaccctatgaggtttatcttcttttcacccattttgagagaagaaaagttcagctcagagagctgcaggaacattggggacatctccaagtcacagccaataggtggcagtcatcagtgtgtcttggaagggacaaacattgagcttctgaacagctactccagaaactatggtgctgtggtgaagtcctggttaggagcctaggaaaatggtgaaggaaaagatggtcccagcctgcaaagctgaagtcaggaacccaccaggatctcccttctccctagcctggtggtccacatcatgcagatttactctagattcagcttagactcatttttatactactcgggggacaaggagggaactacagtcagtaacagcagcatgagcctcaggtgctttggggattgaaattcagaccaggaaattccaatacatcagtgcatgtggaggacatgagtatttaaggagaaggttctaggcttccgaagtaaaattggatgtggaggttggggattgattcaaacattaatactttcaagcgtttctatggtatttgtcagctgtggagcaacagcacacatctgtattaatagcctgtgttaagagattactgtgaatcctgaaaaacatcctcattgtagagatgagaaaacacaggcttttgcacatccaatgtctccttaaagcatgtggttcagaattgagaacgtgcagagtgagagtggtatgaattttcctgtaagctacctgaagttctgtttgctgtcatgtggaagaaaagagccttggagaagttttatttttttctgtttggaaagaatacacagagcaagatgatttacaataaaccttttgacctaacgcacatacttgttttctttaacattaaggggagtcttaagaaacagctacagcagtttctcacctggcaaagacaaatgctgggaaactgcagggccaaggatgtgagcagatgacgcagggaagagaaaccccaaataagtattaaatgactgaaaggtgactcaaacttatctgttaaacaactggaaatgcaaggaattacatgagtttctttgtcacacagacaccagattggcaaaaaattaagtcttaacattcaagggaggctggatgtagggaaccagcgatattgagagactgctggggacactatacttgccacagcccttttggaaagtaatctggctatacctattaaagttttacccatgcatattctttcaccaagttacccctttctgcaggtgattactatatattatgggctgaattgcattttctcccaaaaatgtatgtgttcccatgttttaatagtcagtgcctcagaatgggaatatatttggacatatgatttttatagaggtaattaaggttaagtgagtttattggagtgagccctaatccaatatgactggggtctttataagaagtgatggtaaagatacagaaacagaagatcctgtgaacacagcaatggaagacagcaatctactagtcaaggaaaatggcctcagaaaaaacaccccagccatagcttgatgtcaggttcctagcctccaaaattgtgagaaaaaatatctgttattaaagccttgagtttgtgatgctgtattatgacagcgtagcaaactgttatagtttgttaagacacatacaatatgtttcctgcagcacgactgaagtggaaataaaatgtcttcatgccagtttccaccagcattgaaaggctgaaccactgtgggaaacagctttgattatgaaataacataaagacgtgatatcaagacatgtaaggtcagagctcctgccctgatgggactataggcatgagttctctaagatgacacattgcagagaaatgcgtaggataccttaacctttttgggttaacccccggctccccttttgtaaacacttccctcataaaaatactcgtgtgtaaggtatggagaaggagctgtctgctataagagatacctgggtgcagttatttaataaaaacagcaacatgcaaagatactcagggcctagtgtgaagtaaaagcaacagaaaaatgtcttctctgatatttctataagtatgtgaacagggatttgcgcctaaccatttgccatttaggactcatgaaagccagactcctttgggaaagaatggtgagttaccctagtggaaaagccctaggacagatcccagggtgtctacatattcaggtctttgtcctcggcccacttttgtctcctctgatccctgtctgcaaagacctctctgtgcccactcccacccaagcccagtgctagatatgctcggtggcatggtatacctgcccttcatccaaagagatggagtagttggacccatcaaacagctttttattgatctcctgcatggagctctgcaaagagagtgccttgcagctaggccaagaggcatcagtggttgcctggttgtcatcacggggacacttccattaaaagttctccaaaggttgaggcttcattgagccatgattacaccactgcacttcagcctgtgagacaaaagtgagaccctatttaaaaaaaataattatccctatatcaggcataaaagagaattcccatagaccttcagccagggaggaaaccagatcacggtttgaagtcttggggttcacatccaagaagacaaaattgtttttcaacactcacctccctgtcctgtcatgccctgtggtatgaacctgaccatctcactaaggcttccgacacttgataatctgcttgtgtccagaaatagcctcctcagcacttgctttccccaacacacggtgtcagaaagacatgtgagccttatttaataggatcacagatgaggccttacctgcatgggcctctcctgagatgccctgtgttaactttgcatgccccctgccaaatggccagaggcatcagtggtgagagttgagccaatgcctgcattgttggaaagcattctcacgtcaggccttactaaatcaagagccttggaaaagtcaggatatagcaaaagaacatcttgctctcttgagcatttcctactgagtaagttgactactggggctgtctctagaatgtaggtgcctggttaccagggttctaaattatcttggggtctgtcaccgagaaagtaaggtcacttcagggttctatccccaggaccccttccttccatatgacctacccaaaggccctggtgggctactgatttctcacgctccccaccatgtcagctccttgcctatacacagttatgcaagcacagcctctctcagtcccctacggagactggacgcagtcagggccccaggtttgtggtgacacagctggatcagaactacttttttctaaccagttctgtgaccctagaagtcattgtgtattttggtgcctacccagcctcctaacctacccaatggggattataccagcatcttcctagaaaattcttcgggtacaaatgagacaaaactcatggcatagtgtcacatgaagataaagcacaaatttagagatgaaagaattacaagaaggggtgggaggtagcgtggactacagctcaaacaggcctgggcccagcagtgtggttttggaaagtcacttctctgggcctcatttttcattctgaattagaggttaaaatccaaatattgccatcttccagctaattacacattccagtgactttccattatatgtaaaatcagacgcttgtgctgcatatcaggtggtgtgcagcatccacaaaaactcagagcactgtggggctaatgactcacttttgaccaacagaattcaacaaagacaatgggatatcacttatatttcacctcaggctggagatcagcgtctggcataattgggctttggcaagggctctcaggttgtaggccggaggcttaaggttgtacacttacctggcaaagagagagctttttaagaactatttcataaagccagtaaatccaattatgagggcttcagccttagaatataattgctttccatttcctcagctttaagatgtcaaaatatgaattagacaattatgtcatgactaagcctgagcatattttgtgtatgtaaagctattaatattttttgtgaactacaacatatcttttgccaatttttctattttgtggattatctttttctagtcaataatcttgtgattattatttaatccagggtcccgttatcctctaggcaactgctctctcctgggagggtgtgcctggtcaggtttgcctcaccttttgtagctaccctatcctgtatgccgtttggctgtggttttcttcttcaatccaatcctatctacatttcatgttttaatgatttttcctgacttctagtttagtgaggatacatcttaattttcagagtgagttattctttctaagaatttgtggtaaagaaaggttgccacagatgacctgtcagccatcttaaatcaaaagatcagaagttatctgacgtatattgcattatttagtctgatacttctgaaatggtaaatgcttctctttggcaagagagaacacaggaatattggaggatttgcctcattaatgtatactcatcttggcataattgtgctagactgattattaagctaaagagggtaaacaaaaaagggagcccaaacaggtaaaaagtctaccttcaaatcactgacagtattatctaatggaattttactaaaggccccatcctggcttttgagctgcattaatctattgtgtctggatactatttacatattcatatgagtcattttttaagttgtgaaacttctatagtcagcgttcactaatgagtcctctgggaactaaactgttttttaacaagcttaactgaggtaactggaatcaaacaggccataaattacacagggtagccttgacttgtggcttaggggaagtatttttctaagtttcttatgctcagtgacagatatgtgcccttgcagcttctccttgagtaggccttgctgcagttcgacaggggatatcctgctcatgaactgtggggttgaaaagcatcccttgctcactgtaaagggtccacgctctctcctttttcttttcttttctttcttgcttttttttttttttttttttgaggtagagttttgctgtttttgcccaggctggagtgcaatggcaggatcttggctcactccaacctccgcctcccgggttcaagcaaatctcctccctcagcatcccaagtagctgggattacgggcatgcgccaccacagccggctaattttttgtatttttagtagagatggggtttcaccatattggtcagctggtcttgaactccagacctcagatgattcacccacctcggcctcccaaagtgctgggattacaggcgtgagctaccgcacccggcctctcctctttttttttttaaacagaaactcatttcatcactcaggctggggtgcagtggagtgattttggctcactgcagcctcgacctcctggggtcaagcgatcctccttcctcagccccccaagtagctgggactacaggtgcacgccagcacacccagctaattttttgtagagacagggttttgccatgttgcccaggctggtctcaatttcctgacctcaagcgatccgcccgccttggcctctcaaactgctaggatttcagacatgagacaccacaccccactgagaacagaaaaagataaaaaaggtctactctatatctcagtcgatgtgttatttgattctgagataatagctactgggccttgctctttccccctgctgatatataaataccttggaaaaacttggttcacaggctacagatgagccactacaattaaaagtagaactggcatctacaattttgctgagaagacgaggagattggtgaccccagcttctattaatctcctctccaggaattttctcctgggaatgttgatagctgttttctcacataattagataaagaaagtaagcaagatcaaatatttcttagaacgatgacttatcagttcttgtttaagggatactttaataacttgcagcagaaaatataagttaattgtatttaatgtagtcagagaagtttactgtcaattattttgggaaataaatataccccgaacttatttatcaggctcctaatggatcagagaattttatgtcttcaataatgtgatgaaacatatgaacacattaaccatgaaattatagggaagaaaaaaggatatctaatttattgagaaaagctaaggtattcagattcaaatgggtgtatttttctttatcccactgccctgagtttattgaaaatacagatttatggaacatttagatattttatggaacagaagtcacagtatcagaagaaactcccaatttattttttaaagtttctgttgcagctcttgaaatggaaacctcaggagattcagaacaccaaacagtagctctaacaatgtagatatttgagtaaaagtgttttgtatcccccaggaagaagtcatatccctgaagttttgggacaataatatacctactagactaaattgtgaatatatccataggtttcataatagtttagcctgttgataccagttctataattagcgatttaatttctataattaaacataattcagccaagttgaattaaaactagtatcaggctcataaaggttctgcagatattacatttattaaaatgtcttttgatctgctttggtattggagctaaaaaaatccataattctggctagcaagcagattctcagtaaaatttataacagtccacacacatatatggtccatcattgtaaacataaaatgccaagctggatagagtgtcttcagatgttttctgattcatggctggtctcttgtgttcaaatacattcatggttttggcaggagaacctttattctgagttgggcatgagtatatgaacctgtggcttacgtaagccactggggtctacaagtgttcacatttggcatcacacacttgactgtgttcacagttttaaaaatatgtttaaaatataatttgaatttttaatctactttgagttaaattttttatatgatgaaaggtaaggatctatttgtattcttctgcatattgccagccagttatgccaacaccatttattgaataggaagtcgtttcttcattgcttgtttttgtcagccttcttaaagatcagatggttgtaggtgtatggccttatttccaagtttcctattctgttctattatgtggattaaagatttaaatgtaagattgcaaaatataaaaatcctgaaagcaaacctagaatttaccctcctcaacatcgactttggcaaggaatttaagaccaagcccccaaaagcaattgcaacaaaaccacaagttaacaaatgggacctaattaaactaaagattttctgcaaagtggaaaaaaaaaaaaccactaacagagtaaacaaacaacctacacaatgggaaaaaaatattcacaaactgcatccaacaaaggtctaataccctgaatctgtaagaaacttaagtcaacaagtagagaatgaatagtgccatacaaaagtgagcaaaagacatgaacagacacttttcaaagtaagacatacaagtggccaatgaacatatcaaaaaatactcatcacaaatcaccagagaaatgcaaattaaaaccacaatgaaataccatctccccacgcctgtaatcccagcactttgggaggccgaggcgggtggatcacgaggtcaggagatcaagaccatcctggctaacacggtgaaaccccgtctctactaaaaatatatatatatctaaaaaaaaattagccaggtgcggtggcgtgcgcctgtagtcccagctactcaggaggctgaggcaggagaatggcgggaacccgggaggcggagcttgtagtgagctgaaatcgtgccactgcgcgccagcctgggagacagagcgagaccgtctcaaaaaaaaaaaaaataccatctcccaccggtcagaatagctattatcaaaaatacaacacatgctatcaaggctgcagataaaaaaaacccataccccgttggtgagaatgtaaattagttcagccactgtggaaagcagtttggagatttctcaaagaacttaaaacagagttaccatttgacccagcaattccataactgggtatatcccaaaatgaaaataaattattataccaataagacacatgcactcatatactcatcactgcagtactcacagtagcagagaagtggaatcaatctaggtgcccgacaatgctggattgtattaagaaaacgtacatttacaccatggaataatatgaagctataaaaaaataaaatcatgttctcagcagcaacatagatgaagctggaagccataatctaaagcagattaactctggaacagaaaaccaaataccacgtgttctcacttagaagtggaagataaacaaataggcactgtggattcctaggagagtaggaagagagacgggcatgtgttgaaagactacctgtgggtgccatgcttactatacccaaaatacccatgtaacagtcctacacatgtatcccccgatttaataaaagctgaaattttaaaaatcacattgtacaccacaagtatatataattgtaatttgtcaattataccttaataaatctgaataaagaataaagtgtaatttgaaccaaacatttgtagaaccatttaaacgagtagtttggcctccattgtattggagtaaagtgtaagattattatggtctcaggtaggacctttaccagggtgggcttcagagggcctccctgctttgatcaggtaaatgtctgcctggctgagggctttttgcctcccaggagctcagcttttgtctgcccagaattaaatttagctgacacagagcaggtcctgcatgtctgtggcagtagcttcccctggtcaggaatgatcagaaaggtctcaagtggaagctgctcactgtcccaagattctacacagttcctatccagtaaggattgcacacccctcacctagaacttttctatccagctctgtgaagggctgccctagtctttcaggttccctgtagtcaggatttttaagcccccattcaacccctgtttactgcctcagagtctctatgcttatactctggttttaataattatgttcaactttaaaataacttttgggactgggaggccaacacaaaatcagaccaccaggaatccttctcattcccatttgtgtgttccttcatgtgaggccttttattttttttttttttatgtccagcattttcatatttgtagatgtctcaggtttactgggcttgggaggctccatttgttaggaaaattatggcaatgagtggatcacctttttttttttttttttcttaagacaggatctcactctgttgctcagactggagtgcggtggtgccatcatagttcactggagcctcaaactcctgggcttaagcaatcctcttgccttaggctcccaactagctgatactgcaggcacatgccaccatgctctacaaattaaaaaaaaaaaaattgtagagacaggaccttgccatgttgcccatgctagaatcaatttttctaatgttctgaattaagggtttataagtctgtcaggatgtcccgccatatttgcaattctgccctatttgcaattctagagaaaaaaaaacacacattttcgtcagacttatccatgcacatattggtgtgacggaccaatagggctgaattttttttcatgcccagtgtagtatgaatattgtgactgtcttttatcctacacaatcattgtttgccagtctccataagggattcttcattctccatccaacacttgcagggtgatgttccctgaacttccagccatagatcttttcctttcatatttgatattctttctcagggttaccacatctattgttatacttctgctgattattcccaaccacctttagctatgactctggagtcacaatatgactccaatctaccttttcaaagttattccaccaaacttctttacatttcttacaaactggccaaattcaatgttcttggctctccctatgcctccataaaggtgaatttgatgtaaggcccttatttccaaggagcttatcacttaatgaaaaaatattaaaaagcatatcctttttttaaaatgtaaaaaaataggacatgtggttccaggagtccaaaagaggtgcttgcagaggaaaatcagagaacattcacgcaggagctgatcttgaaggatgggtaagattcagaaatgcagtgatgcagagaaatgcattccatgcagagcaaaatgcaaaggtagaatggagtaaaaagtgtacagagaagagagtggttttgtttgcctgacattggaaaggtagattgaaaaaaactcaggaagggctttgatgtacaggcttaatttgaattttattccaggtgatgtaaatacttctatgattttagaacagagcaatgacattattagaaccctgttcctgaatattcagcctgccaccaccatatgagattagggaacagtagggggaagaaaagggagaaatttctgagttaggggagtgacagtgggtatggagagttagaaaggatatgaggtagaattttcagggcagggaagacgaagggcccataataagcttcaggtttgagcctgagtgattgggaggctcagggtactataaacagtatagagaaaagaaaacagaggggcagagggaataaatttagggcatgttggagctgatgcgatctctgggaaactcaggtggagactcctactcacatcatcatctcaaccttagtgttttgaactccagggtcaggtcggtctggttcccttccctactcctctcagctaggaaaagcctactttggtgcccaggcttgtgtgacttgagggagtaaatacttcagcagctccccctgaccttcatgctgtgggtcggtcggtctagggatgattatgagaaccttgcaggctcactctggcttctgtgctctacctcacaggactagcttttgattgtctccgaaaattattgtcccctttctgaggctctgacacagtcacctgggacaaaaacccctgcccaaagtcttgtgctggggtcctaatatctatggacaaaacctagaggatgaaaactcatccttaaagataactgtggttttctaactgttccatcagcctaggtgacaccttgtggtttctgattattgaccatttttaagcccagtagggttggctcaactcttcttcctgcaaggcccagtccccatgcctgtatcatcctcataaatggaccctggccctctctccacttccaagtgctacctcaggttcaacaccacactatgccaggaactcagaaagtgagctgaccagcaggtggtcacactccaccttgcacttacttggggtttttgatggaagcatcttgcatcctgcctcttgggttttcaacaatcccataatttttcacctctgagcctaccctggttgtagataacccaccactggacacctgacctttttgctacactggagggctcaagactgctgctgttcatatctcctgtcttagatgacgtttctgctagttgcatcttggttctaacagtgccatcatctaattccatgagagcttcctttgcatttatggtttgaggtttgcagaaataaaacaaaattggagggaggtctgggagaatccaggtcctccatgactgatttagtcaaacatctttagtcaccttcttctcattctgaagacttcacataattaaaacttttcccggccaaacactaaataaattttacacatgctgcttgaatcactgtgcaagcattctatgaattactgtggatttctcagagattaatgtctctctaaaactattcctctgggtaggctgaagccagcagctgtggaaactgaagatttgccttatccaatgaagctttaggacagggctgcctttcacatttctcagatatactgcctatttggaaaatattaacactcttggcaactatgagctcctcaaatattccagtttttcaaaaatttgaaatggaaaaggtaattgtacatatttagatcagaaattgcttggagttgctgggatttattataaaggcttttattcatatgttttaattaaacttacatttttaaaacacatacaaatatattattatgaagtatatgagaaaaaaagaaaagctttctctctacaatttatttttaagaccagaacttaagaaatgagaggcacaccaccgaggtggctgccagtgtcaggcaagggtttggcagagaacaacctaagacaggaccaaccactgacagattctactataggagcaagaggaagtttcagggaagagaaggcaatgacctacagaatcatgacctaaataaatggtggtggtttaagcctttagattataggttagtttattttgttccaaatggtaattgatacgtaagtagagttagatccttttagaaatctttcccagcaaactttcaagtaaagatggtggattgagcaaacacatctgctttcatcttctctttgtccccagtaaactcagagtaaatgataattttagaagtgcataaatccacaaggataggaatcaagtataagaaggatagacaagataaaaaatgttggaagctggaaagcaaatagtataggacaaaagattgaaacaggtatatatatttgtcacacctcatgaaactgtgaacttaaaagatgagcattttctttatgtaaattatttaagtttatttggaaaaaaaatcatagtgatattaaatataatttttctttttttttttttctttttttttttgaggcagagtttaactcttgttgcccagcctggagtgcaatggcatgatcttggctcactgcaaactctgcctcccgggttcaagcgattctcctgcctcagccttccgagtagctaggattacaggcgcctgccatcacgcccagctaatttttctatttttagtagagacggggtttcaccatgttggccaggctggtccctcaggtgatccacccaccccagcctcccaaagtgctgggattataggcgtgagccactgcacgcagcctatttttctatttctatctacaattgaaattcttttattgttttggtattaaacatgatgttgacatttgttttgagataaatacattgtattaagaaagtatttttctagtcttatttaataagaagtatatgttgaacttatgacattcatttgaacattgctatggtctgaattgtatttccctaaaatttacatattgaagccgtaacctgaagtgtaacaatatttggatatcgggcctttgggagataataaggtttagatgaggtttgagggtagggccaacatgatggaattagtgcccttataagaagatgcaccagagaactttctcactcccctccactcctgcccatcctgtgagaacacagtgagaaggtggccatctgcaatccagaagacagcccagaaataaactatgctagcaccttgattttggacttctagacttcagaactgtgggaaagttaatttctattgtttaagccaccaagttatggtcttttgtggcagcccaagatgactaagataaaaatctaaagggctaattatttgaactttattatttgattaattatatatatttatatgttgcccaaaatgaactatttctaaattctttgcaatatgtgaaaatagattgtgtttattcaaactagagggaaaagtacatcatgttttgttgaactgcaaagaaaattcaggaaatttttcctgatgactgtgaacattcacttaaaatacatttttttttttacatctttaaaattatacatatagttactttcatttctggcaacatggtacacactccatatcctgggggggtggggaaaggccccataaaaaacacctattatgctggataaaatgaagtgaacaacaatcatctaaacttgtaaaaaagtaattgtaactctcaggattcaaaaaacaaaaatgcagctgaaagccaaagtggtaaactcatgttaagaatgcaacatctgcaaggtgtttgccagtactgataatctcaagacggtatttaatggtaacagggaaaaggagagataagctgtgcattcaggttttaggtcaagataaaatcccatcccactataatgctgagatcctaaaaagattaggttcaaaatgaaattggagactggaaataatctatctttgacaaaagttggtgcttgggacatttaacaattttggagtaattgctggctaggaaaagcattccccttaagagttgataaccacaattcttccctcaagtttgaagtttagacttaaatcacctgcctatccagaaaatactaaggcaacaaaccaatctaaaacaagcctttgattgatagcatcccagagtacctcgaagaagcaaacacaaatgctgtcaggagggactcacccttaaactaggagttacaagattttaacagtgtaagactaccaaatgtaagctcatgatttcaaatcccagaaacatacagggaaacaagagccatgaatgggaaacaggagaaaccacaatagcagaactagacttccaaaaaccttaagacagtgatttctcagataaagtaaactatgtaaatccccaaaacatttttttttatttcttactataatttttttaattttattattattatactttaagttttggggtacatgtgcacaacgtgcaggtttgttgcatatgtatacatgtgccatgttggtgtgctgcacccagtaactcgtcatttaacattaggtatatctcctaatgctatccctcccccctccccctccccacaacaggccccggtgtgtgatgttccccttcctgtgtccatgtgttctcattgttcaattcccacctataagagagaacatgcggtgtttggttttctgtccttgcgatagtttgctgagaatgatggtttccagcttcatccatgtccctacaaaggacatgaactcatcattttttatggttgcatagtattccatggtgtatatgtgccacattttcttaatccagtctatcattgttggacatttgggttggttccaagtctttgctattgtgaatagtgccgcaataaatatacttgtgcatgtgtctttatagcagcatgttttataatcctttgggtatatacccagtaatgggatggctgggtcaaatggtatttctagttctagatccctgaggaatcgccacactgacttccacaatggttgaactagaatcaattcttaagtaattatttactggccatatcctccaccctgtcatctcttaggttaaaaggactactgactcaaactctgcctcttgagttcatggttcaccacttccagcctggtgacttggtgctgattaaaacttggaaagaagacaagctccacccaagttgggaagctccctatcaagtgctcctgaccactaagatggctggatgtgcaaacagctgaacaaaggtggactcactacactcaagtcaagggactggtaaaagggaccccagaaggcaaggaaaaagaccagtggaaagtgcatgggtcacctgaggaacccttaaagttaactcttggaaaaatctaaaaggaaaacatgggctggccccatttctggaagttaatatggctgggatgggctactatacaaagagcagaaggtcaaaatggaaactggcaggggactcttccctacccaatcaggttggcaattaatgtgaccaagacgatggcacctcagaatataagatttgatacctgccaggttttaacttgtgggaatttagaaaatcagagacagttctcacaggcagataaatatcttttccctgaaccaaatacagtttacagtagggcatcaccctgccccagctgggataatgtatggtggactacccaatttcagggttgaacagtaaacatagaataggtaactctgagctggagacccttaaagaataaactacatctgtccaagggctccctgccaaataactgccagaatttaaaatgcaattctatactcatcaccattgacaatccagccattgtagaccaagaaccaaaagtagaatctgggatatatgcattaggggcagaaatcacagggaaagaccccctagggtgatttgttctcaaactaatcaagaactcaacctcccatttgcctgggactacaaccccagaccctaataaacactttagtccaccaaataatgaccctaaaagggaaaaatatggtaaaggatctaaggcaaaccttagaaattgagacagggtatggggatataaacgcctgggtcgaattggtcaaatttttggtacaagccctcaacaagagtaactgctgtgggatgaccttgggcacaggtggttccatttcccctaggatggaatacccctcctaagggactacactgtatgttggttctataccaggacaaggatgcatgcggaagtaagacttgtaagagtctgtgatcgctctttcccacattccagagctcagatcccagagcaatatccttgttctctatagggaatatgaaccacttctcttgcctctctaggcaggaggaagagttcaataatcctgtgggagaactctcaacttctgcctacatcctaaacatcactggtgagtcaagcaatggcaattactcagctctccatacaccccgggctgatgtctggtggtattgtgggaaatggaacctctgtaacctgttaccatccaatgggactaggacttgtgctttagtccaattggccattcccttcaccctggcattccataagatacccaaaaatacacatggccactgacaccagagagatttgacaaattcttttaatcccaatacatatgttaactcaattggagtccctagaggtgtgcctaatgaatttaggcctaaaaccaaatagctgctgggttttaggactcttctgatggtcaactattaataagaatgtgaaaatggaaaatggaaaaaatggaaaggcatggtagctttaatccttacatctctcataattgtggcaggagtcttaacagcagtgggatgttgtattaccccttgtgtgaggggactagcacaaagattaattaaaacagctgttaataaacaaatgcccataacttaccagcaagataacctactactattagaaactgaattaaactcactctcctatggaaaaaaaaagtaaatgacttctagaacaattcaaggaccaaaaaggcttaaatgaaaatgagaccaaaggaagtaaatagaaaagagttaatagaaaaaaaaagagttaatagtaaatagaaaaaatagaaaagggcaaagttatatgtcaccattttaagggaagagaccacccctcatattgtcttatgcccaatttctgcccccaaagaaagaagaagtaaaaactaaaaggcagaaatgaaatccacaggcagacagcccagcgctgtgccctgggcctggtagttaaaagatcgaccctggcctaactggttatgttatctatagattccagacattgtatggaaaagcattgtaaaaatccctgtcctgttctgtttcattctgattaccagtgcatgcagcccccactcacgtaccccctgcttgctcaattgatcatgaccccctcatgcagacccccttagagttgtgagcccttaaaagggacaggaattgctcactcagggagctcagctcttgagacaggagacttgccgatgctcccagccaaataaaccccttccttctttaa

SEQ ID NO: 326 - DNA, 102924 bp, Homo sapiens
  source 1..102924: mol_type = genomic DNA; note = NC_000001.11:c235650608-235547685 GNG4 [organism=Homo sapiens] [GeneID=2786] [chromosome=1]
agcaacgtcgggtcagccttcgccgggttagtggcgacgcggccgcgcgaattcgcacaggtattccgcgtttctccgccgttccccgccttggccggaggcttccgaggcgtcccttggtgcagggtgggaagcggcccgcgccccaacggcccaggcgctggagctcaccccgagcgagggcggtacctgaggcttcggggagcccgcgctgaccgcggccccgtccccagacccctccagcaaccccggccccgccccagacccctccggtgatttcccccccggccccgccccgcagatccctccagtgatctcccccccgccgcgccccccagacccccccccagtgatttaccccccggccccgccccacagacccctccagtggtcccccggccacgcgggctccgggggggcggggcgggggcgcggccctttgctgggacagggggcgtgggcccgagtagcgggcggggggcgcgggcccgggctggggcgggggcgggggcggggagcgcgggagccccggtgacgcagcagtgacgtcggtggcagcgggcgggatttcccgggcgagaccccgcggcggagtgggcgcggccagcgtggaacgggggcgagggtcgcagagtcgccggctctcccttccccagtctgggcccccacggcacagggggccgagcagaagcccccagcgtccagggccgggggagggtccgcctgcgcccccaggcccgcgtggtcgggccctgcagggcgggaggcgcggcgcggggcggggccggtgacgggacgcggagaccccgcgggcggcgggaggggcacgaggcgcgcgtttgcacccgagcccggcccgcgccccgatgcggagcgatgccgctcggcctggccgccccccgcgagcaccgcgctgcagacgaagcccgcgcgtgatcccgctccgggtaagtgggcgcccggccggagccccgggtgtccgcggggagagcccagcccggtgcagccagacgcggaagggaaactcggggtgaaagtctccggacctagggagacggctctggcgccggtgtggtcctcacgccgccagctgctgctgcacgcgacacaaagacctgtggttccctcggcctcctctcccgggacctcccgccgggccccggggaagcccgcgcgcgggtgtggacagccccctcggagcgcgtccaggggcttccggggctgggggcgcccggtccctccggcatgaggcaggcgggggctcgggggtcccctcttccatttgtaggtcacagagcgtttgctgttttcccagcggggacgtcccccgtggaaaaggacctcagtggcaggagatggcgtggctggttgggcgttttctttggggaaatgtttctggcgagtgcctgaggaagccctcctggctccccagcagcccagacgccgcctcgggagcactcggggtgacgctggagccaccgcagctgagggtggttttcctcacctccttgatggcgtctgtccccgaggctggtgctgaactgaaatgtgcttcgttcgccgcgcgcgcccggcagcaaccggggagctttgtttggcttgattttttaaattgccttggaaataacgcgaaacggcgggagggtgaagtggggaggaggacagagcgtggtggggaaagactccttaatttaagatttgcttcatttcgagtatttggggctaaggtgttaggaaacccgaaaatgttaaagtttgatcaagtaataaagtggatgatggacgccgggcctcccaccgtctccccggccccgcggctgccgcgtctctcctctacccgtcgcctcccaggactgtcaaatgctggcaccgggcccgtgcctctcagccggagcaaaaggccgcctaggctgcgcccgtgtgctccattaaaacgtgccagtcctgtcgtctgctcatgagtgaggtgtgccgcttcccacagtggacaggaaatttgcagcggcgaatgcctcacagtagccatgggggacctgggctctgcggccggcttctcgattcctcccgcaactccttttcctgatttttgtatgaggcgggggaggggaaccagccgccatctgatctggccctgttccctgcaagaggcgactggggggacaactaagttgataaatggaaagccttttccagcccggagaaacagacagaggacctataaactggattgtttttgaaatgtagggtttgctcagtgaccggtcatgataagagatggctgtggcacttaataaatagtaggtgtaaatgcaaatgcaaggtttacagtgatgccttgcctgttaatgagcagcctcaccatggggttagttaggctgaaatgactatttaggacaatggacttcctgttggcccccacctccatgcacaactccagtgctcataggccttaaaattcgcccaaggaagccagtggaggatgtaggcctggctcagaaacagcacagctaaggggccattcccagcagtcctatgattggcgtttctcatgcaaactgatggtggagaaaccagaaaaaaaaaaagcttttcctagattcactttacagtttttaaagcaaaagtgacagtccctgaagtcccccaatattcagtgcattctttgaaatgatagaacatcaggtgggaacatcgcctgtaatcccagcactttcagaggccgaggcaggcagatcacttgaggtcaggagtccgataccggcctggccaacgtggtgaaaccccgtatctactaaaaatgcaaaaaattaggcgggcgtggtggtgcacgcctgtaatcccagctacttgggaggctgaggcacgagaatcacttgaacctgggaggcagaggttgcagtgagctgagatggtgccactgcactctggcctcaaaataaataaacaacatgaggtgggaacatggaccctgacccctggggaagcaagagccacagctgtctcaggagggcaggaacactgtaaaatgtgtacaatgctccttcccccaagacctacacgcccaaacccacgcctaccacaaaactactgcttatgcagaaagcaaagactaaggtctgtacccaacaatttcttcttttatttatagctgcatctcacttatttcactatcacatttttcctagtttgtctcagtttctgcttggagaggggagaatgcctaataatgtatgtcagaagattgcccctttcttcgtggaattttgaagtagtaactttaaaatattacctgatttttgttcttgaaacaccttttaaggatatactgctatctaatcttgctggttttccttttttaaaatttggtatttttattcattctagatatacttaggcatagagacttgtattattcaggtagagagattgtttcttttttaaaaccagaaaccaaaatttaactcctttaatagaggtataagtactacataaataacctatcaacagtggatagcaaggatattttaattgaaagtcagaaaagctaaatggtatcaggaaagaaaaggagattgcagggtaatactaccgaaagactgaaagaagctggttaaaaacctctaaagaataagccaaagactgttaataaatgatcaaaagtaaaaacacaaatgaaattttcattttaggaaatgttaagaaataggggctagaaaagctgctgaaagaaaaaaattactgcagagaaaacaatgggtgcttaaaaagagatcagttcagtgagcttgctggagcgttccaaattcctctaattgccaaggagttcttgttagactgaatggtggctggtgggcaatcagattccctgctggaaattggtagacagagtgacaggtgccatgcagataagggaaagccggctgtgtgcaagacgccgtgctcactggggaaggagccctgggtgcccaggagtgaggaagtatagggagctatggaggaactgttcgtctccatggccgtgaggtttgtgggtcaccaaaggcccagtctccgaggatcggatagggctaggagcccaggttagtgggcaacaaggggaaagaagggcaatgattgggctagacgtgtcatgtggatgatctcctttgatactcacaggatacctgccaagtttctaatttgcaaaaaacagcagtgactgcttgtgtcctctctgtccaggagtgttctggcagcgggtttggtgggtggtgggaaccttttttaactgatgtaggaaaagtatacacaaatgacaagtgaaagtgacagagacgtgtggaagagaaaaaagtggagaactgtagagagacccacactcaggcactgcacatgagctcctttcccaggaggatttgtttctcttgcttcttagatttctaaaaccatttctctctgagttgctgggttggctttctgtggtgtgacacatgtgctctgaggccatggaaggccctagagatagaagaagcactctaagtatccctctgggccagagagattgtttcttccccaacaccccctgtgcatgaggcgggacaacagccacgatggatcatatgagctggcattaactgtgcctttatgcctttctcatcagtgcctggacctcctcctggtgcccctgcctaatgtacagctgtaaggccttgtcttctgtcccctccatatgggctccaacaaagaaagagaggcagggcgataaaataggaagaaggaaaacatttttaactctttttaaacattctttttttttttttttttttttttttgagactgagtttccctcttgtctcccaggctggagagcaatggcacgatcttggctcactgcaacctccgcctcctgggctcaagcgattctcctgccttggcctcccaagtagctgggattacaggcatgtgccaccgcgcccggctaattttgtatttttagtagagacggggtttctccacgttggtcaggctggtctcgaactcctgacctcaggtgatccacctgactcggcctcccagagtgctgggattacaggtgtgagccaccatgcccagcctgaacattcttattcaagcacctctacaactacagcagaaaaagtgtttacatgttcctccaaattccagcacccaaactcaaccttgtttcttctggtgtcccaccacacagagaggtaaaattgagagatttctagcaaagcagtacccatgtatgaaggcccaaagaggagaaatgagcttagatggcgggaagaaaagagcaagaggctgttgagattggggtgggaggcagggcagggcagggaggctgctgagggctgagagcaggttcttctccacaatggcccagcaggactctgtggctcaggtccagacactgatgaacaggaagagcagatggggtggtcatgccccatgctgggactctgtcttcccagagggtcaggctcttggaggccagaggccagaggtcaggcagcagtacaggcagcctggctttgcaggctgagccaagtcatcaacacaccttggaaagggctacgtgttacccttcaacacccacacgtccacgtgggccctggggtctctggcggcccggggcccatgtggacggagtgtctgctgctgcatctccccttcctcatcagtggtctctgtcttcccatggctccctgtctataggaaggtccagctacacccaacaactggcatcctcctcctggatgtctctccagcccgatctgaggagccatctgccctgccctgcggctctggggtacccgccctgcacagaccctggatggaaatttccagcagggcctttccgctgcccctagcctgtggccgactaaacgagcatgagtcagtcctcattcggttttagttttccttcagcaatcttgggaaaattctgttttctctgtgccccagttaactttgcgtatcactcagaagctgctctagtctgaaggtgcttgtttatccccccggcagctgtggggctgcatggcagggtactaggggactgcagcctggttaaggagacctgatgacttcagtctacaccgtgcatgtgtttgacggtgtgtgcggggaagaaggtgttaccaggatgagagacagcgtcaggcttgctcatgcccaagggcagtggtgggcctggagtgtgggtgtggaggtggccgaggagggtcgctcggtggatgtgagtagaaaattccaaaatgttgacctcaagggaaataaaggggaactggcagtgttgccggccactgaattctctctggaacagggtgaggtgtaggtccagggcaaggccttcgtgggtctcacacgctccctcccgctgtggctgaattttatctgatggagacagagtcactggcctcttttgctgatctggacctctgggtgcccgcgttcccgccacccagccctgtctctggaaggctgtacccatcaacctttcagtaggagtttggcgtttcactgccattcccctccacttggttgaccttgtagaattgtgccttttggggactctctcgggcagatctttctgtgtgtgctccgtgaacactgcagcaagtgtgccctcagcccctgctctgccgcgtccccgcctttttgggttggctgtgctcactgatggatgggtcagcatcctctgaacaagtttctcgttagaccctctccttgtgctagggtttgttgcagtcaatagtgtctgaaagaagccaattgctggcctggacccaggcacgtttttattcatcagaaattttctttgtcatggatttgccattctagggctctgctgatctcactgtgatcttcctggtgtttttagttttactgtccagtactgctccccgccacattccttttcattactgggtgctatggaaggacttttccaatacagacatactgctggatgcgatcgatgtgttcatcgaagactgcatgtgaaccttgcatttgtgaggtgttcattgactgcatgtgtgataagcacctgcaataaatatatgcatcagatagtttaggcactggtgacagggaaacaaataagatatggtcatgcactccagaggagtcagaacctagagggggtgcatgtgtgaaaacagcccacctaccctggattagtgcacagacagggagagtgttagttctttctgatagcagtgcagaaagcgtgtgacaacagagggagtcttgagctggccctggtgagctgaggcaggtttttcaagccagacaaatgagaaagggctttccaggcagggcggccagcaggggcccagggtcatgaaagaggagtggagagagcagaaaggttgctcagagccggggtgtgaaggtgagactgaccgtgaagaatggggaatccagggccattgtcaggcagaagcaggaagcagcaggccccaccttggccgtctggctgtgactgccatgtggggaaggtcggaggcgtggggcaggagagggaggacagggagactggataacgcccaagggtgccccggccccagcgtcagtcggggtggccgtctgattggaaacagagggccagggagaggctggtgtctgggatcccagggtttccagactgagcatggatggacgaggggtaatgtgacctggttttgtgaatgaagctgggcaagtagagagagggtgtatgacttgccaagtcaggaggtgacatcgagggggcatgtacgtgcagagctgagcagaggtctggctggacccaggtgaagccacaggggcgagattgcctggggtgatccgaggtgtgatgacagcagggaggcccgcgcctccaagaacacacggcaagtttaggacaaaacaaatatccttctgtaggaggcacaccctttcttacacagactttcatgcataggattcccttaaaagagaccctcccaaccctgccctctccctggccccctgcccctcctgcccgcctctgcaaaaccacagccaacccgccaccacctcgccttcctggatgactcattctttctgcgttgaagcagttgcatcctgcctcttgtttatgatttctttgtccctctgatgcttacggattggctcggacgctgttagcacccgtctcttgctgcaggcccacgtcggggaatcacagtgtatcatccttccgtgcgtgggtctctattcgagagggagtttctgttctatgttttgctcagttgcccccggtcactcttttcccacccccaagcaccagtggcctcgaggcggagggctggccttggccctgcttcacagtaaccgcggcagcttacccgcgacacctgcacgggagcggggccaaggctcaccccgcccctgccgggcctcgctcgggttcttccaccctgcgttcgcctcggaccgctgtggttagctgtgaaatgcccctgcggtctggttttctctccttttccgcacggttcttagtgtgttatgttgcttttccgcactgtacgttggaagctctagggctacgaaaacgcaggcagttgcgggggaagcgaaaaatccccgccctcatggaagttctgttacggtggaggaatcagaccaatgataagaagtcagaaaatcaaaagtagtttaaacaagtacatgaataaataagcatttaagatatagtaagtgcatgagagaaaaataaaacaaggctgggaggtagggaattccggggaagggggtggctcacattttaaataggctgcttgtgggaggacctgccatgttgatccgaggttaaggtgacctcccaaatgagctcatctgatgcacgtggagccaacaggtgaaagtgttgatggagtcacagattatttatttatttatatttttaggtggagtcttgctctgtcacccaagttggagtgcagtggcgcgatctcggctcactgcaacctgcacctcccaggttcaagccattctcctgcctcagcctccctagcggctgggattacaggcgcccgccaccacgccagctaattttttgtatttttagtagagacagggtttcaccatgttggccaggctggtctagaactcctgacctcaggtgatccgcctgcctcggcctcccaaagtgctgggattacgggcgtgagccactgtgccccgccgattatttatttagttttagaggcagggtcttgctctgttgcccaggctggtgtgcagtgatgtgatggtatttcattgcaatcttgagctccccagttcaagtgagccttccacttcagtctcctaagtagctggggctacagttgcccaccaccatgcccggctaaattcttttaaaactttttgtagagatgggttctcactatgttgcccaggctggtctggaactcctggcctcaagtgatcctcccacttcggcctcccaaagtgcataattacaggcatcagccactgcacttggcctacagattaatttatgcccaagtgccttcctgacagaataaggtggctttcccctcctctcacccctagcatataagaaagctacattaaccaaaaggagtatttggtagtgtaactcaaggtagaggaagagacagagattctttttgcaaaatgacacgcaagaagcagccccttctcactccaaagtgggcctcttcacagcctggctgttttgtgggtgctccacccatccagggactggggctgctgggcccagtgacctctgacctgccaggcgccaagcggcaacaaaagggagggagagctctggcccaccgggcaatttgactcttcctggagccctgcagggggtggtggccccgagaggctggatcagagaccctcaggtccgaaggtctggtgggctaaatgaagtagagaggccgccctcaactccaccctgccgggattcaggcgggctcaaggacgcagcttggcaaggactgtcttatgtattcgccttgatgcgtggtctggcaggttcactgtagtctgttgaatgatgtgtgtatcctttcttctgttttacacacctgttttgagaaccatttacttgtagcacagtctgtgtataaagcctaaggtagatgcagcagtggttctcaaacctggctgcatacattttgggcagtttttaaaatatcccttcttgggcctcatcccctggacattctgacatagtgggtctgggctagggtccgggaattagtctttgagttttgcagccaccagatttgagatgcattgaaccaaatgatttctgtgggtccttattcctgatatctgattccccccaacctgcctaagcatccccaggctcttgtgtcctatgccagcctctcccgctcctcgtggggctgtgagggtttgaccaccgtaagcatgatgtgcctgcaacaccaggtctcctccccaggctgaatgcatggatctgtcctcttctgcctggggtgagagacagccttctctgtggggaaaccagctaccaccctgaagagctgcctctgtcagagcacaagatccccacctagagaccccctcactgctcccctcccacagcagcaacggcagctctgaggttctggacaccccaaaggacacagacctaccttcacccatgagccgtccaggagacatttgacagctgctgtgtgccatgtcctaggggtaggaatgcaaaataagtcagaggccatccctgctcctgaggcatttacaatccagtgagggagacagaggattataacacaacacagagcggggcacggtggctcacgcctgatatcccagcactttgggagaccaaggcgggcagatcacctgagattgggagttcaagaccagcctggccaacgtgggtgaaaccccgtctctactgaaaatacaaaaattagctggttgtgaggcaggagaatcgcctgaacccaggaggcagaggttgcagtgagctaagatagtgccactgcactccagcctgggcgacagagtaagactctgtctcagaaaaaaaaagcatacaacacggaattaagaaaagctcccacctcaacacagaaggacaccaagcccggcccagaaggacagggaaggcatctggaaggaggtctcatgatttggccagatggaactattggggcacagccagtgcaaggcgaaagccttccaggctgggggctctgtttcagcaagggagaatgattatggctcacattaattaagtgcttcctgcagcccaggctcttagtggcttatgttgtatgaactacttattcctgatgactactgtggtaggtagaatcatggtccccaaagatggccaccctctaatccttggaacttgtgaatctgtgaatcttacacagcaaaaaagattttgcagatgtgattaacggaaagatcctgagatggggaggtgatcctggaatacctggcaggcccagtgtcgtcacaaaggttctcataagaggaagataggcgcatctgagagagaaggtgggggatgctgctgggctggctttaaaaatgcaggagggcccgttactgggtatatacccaaaggattataaataattctactataaagacacatgcacatgtatgtttattgcagcactatttacaatagcaaagacttggaaccaacccaaatgcccatcaatgatagactggataaagaaaatgtggcacatatacaccatggattactatgcagccataaaaaagaatgagttcatgtcctttgcagggacatggatgaagctggaaaccatcattctcagcaaactaacacaggaacagaaaaccaaacatcgcatgttctcactcataaatgggagttgaacaatgagaacacatggacacagggaggggaacatcacacaccgagccctgttggggggtgaggggcaagggcagggagagcattaggacaaatacctaatgcaggcaaggcttaaaacctagatgatgggttgataggtgcagcaaaccaccatggcacacgtatatctatgtaacacacctgcacgttctgcacatgtatcccagaacttaaagtaaaatgttaaaaaaaaaaaaaaatgcaggaggagccacaagctcaggattgcagatggctgtagacactggaaaaggcagaaatacgaactctccccagagcttccacccacagccctcctggcaccttgattttagtccatcgagacccatttcagacttttgaactccagaactgtaaaataataaaactgcattgttttaagccataaatatatggtaatgtgttgtagccacaatagaaaccaatacaaccattcctctattttgaagggaagaaagcaggaggtgaagggaattacccacatttccggagctagaaaggagcagattcaggctccagggcctgcacctgtccactcacctctcttctgttcctcccgcctggaaggggtttaaaaacagcagtccagcagctggggcttatcggagaccaggagcattggaagatgaagctggccagatgcgcaggcaggagccagggtccgggaagctcttcttggtcaagtagagggaagtggctttgcaggccattggcctgggctccttttcggtggtctcctcaagtctgtgccggactgggagtgccacaagagcagaggtcagctccttgggcccagtgcacccacatgtggcttcagccacagagtgagctgtgtgcccatacagactgtgccgcctctctccattatcagatggtttaaaagtgccaccctggccaggtagtgaagggcagacatctggttaagtgcccgcagcatccttatgcatcgaaaattctcctatgttcaaacatctgtttccacctcatcattgttttcctcattctaattttttttttttttttttttttgagacaaggtcttgctctgtctcccaggctggagtgcagtggtgcaatctcggctcattgcaacctccacttcccaggttcaagcgattctcatgctttagcctcccctagtagctggtattgcaggcacgcgccaccgcgcccagctaatttttgtatttttcgtagagaaggggtttcgccatgttgcccaggctggtcttgaactcctggcctcaagtgatccccccaccttggcctccgaaagtgctgggattacaggtgtgagccaccgcgcccagcctcattctaattctttaatataaagcatcccccatcttccagcgtttgactgaaataggtggtcagaggaatttttaggtggtgttttaagcattgtttttttaaataaaggacacgtaagcataacctgaaactactcccgatatgtctgctcaatttatattccaagtattttgcaggctgtgcttggattttcaaaggagcaatcactagcatttgattagcatttttcagtttgctaaaagcattcatgtaccctgtccacttgatctttacagaaatgccaggaggcagggatttttttttttttttttgagacggagtctggctctgtcgcccaggctggagtgcagtggggaggcagggatctttatccccattcttgaaggaggagactgtggttcaaaggagaatcaccatcaggacaaggtgcctagaggagcaaggacggcacccagggcttccactcgaactccacactgttcctagggtatcctcttgccctaggggtaagaggtagcagctggggtagcagggaaagacctagaatgcacttacaaggaaatagggtcccagaatccagttccgatgtgtccctcccaggtacagaagtacaacactggggcatccgcatgccatcgcctgtcagtattggggatcccaccctgctttgggggttcatcggatctctggtcttaacatgagattgttgtatggaggaatgtgattgaggctcaccaacatctcagggcacaggcaattgccctgctggaggacccatggagatacgcaggtctctgatgggaggtctctgatgggaggtctcagcgtgggcaccgtgcctctgcgtggccgtggcttgctgcaggcactgctccccatgtggcaaagatgagggaatgcaggcctgctgctcagtgccagctgctctcctctacacggggctcccctagaccttgccccaggcctcaccgcaggacctggtgcctttggggttccccttttctgagacccccaaagagccttcctcaaataaatcaaaggctttagcgtctaaaacttgttcctgaagaaggctttctgaacccgctttggaagtaaaaagcaaaattcctctttgcacttctgtgtaatcgtcctcattctccttgaggcagtgcggataactctggctggtcagaggaggggcaggtatgaggaagcacggtgaaaacagcccagccctgtctctcaggatattctccctctacagagagagagccagttcctccctacactagtctgggcttacctgtctagcaagaggagggttcctggccattacctgggtgtcccctggcagtgcagcaataccaggttctcaaacactaactggttggttaaggaggttaagttaccttcagtcttctgcccttcagcttcctcaaggtggaaggtgggccttcagagccactgcaaggggtctctgaatacaggtgcacaacccaggaaacctgtgtagagcaattgcgactgccatgtgtttgtatcctgctgattaatttgcaagtatgcatagatgcctttgggattaataaagatgaatttaagtatgttactgaattaatcacagctttgtcgtgttgtatcttctgtggcgacagatactgaaaatacagccatgtattagttggttttgtgttgctataaagaaatacttgaggctcagtgattgataaagaaaagaggtttatttagccgacagttctgcaggttgtacaagcatggcaccagcatctgcttctggggaggcctcaggagggctccacccccatgactcaaacgcctcccaccaggccccacctccatacatcaggaatcacatttttccccgccgagatggagttttgctcttgttgcccaggctggagtccagtggtgcgatctcagctcactgcaacctccacttcctgggcttaagtgattctcctgcctcagcctcccaagtagctgggattacaggcgcataccaccacacctgaatcattttgtatttttagtagagacagggtttctccatgttggtcaggctggtctcgaactgctgacctcaggtgatccacccgtctcagcctcccaaaggaatcacattttaatatgagatttggatatccaaatatccaaaccataagaggctgtaagagactgcgtttgtctgattgactttagaagggacctaatttataaatgtttaaactttgcgctttaaaaccattggaaccatggtttgcaaaatccttccatttctggtgctccatggttcattaacaatgccatgttctggtacattttctaaatttattcactgtctatacccggctttgtattgccttcctctatcagctgctgacttcagcaaaggaagtatttcttttttttgttttgttttttgttttttgagacagagttttgctcttgtcgcgcaggctggagtgcaatggcaccatcttggctcactgcaacctccgcctcctgggttcaagctattcttctgcctcagcctcccgagtaggaggcatgcaccaccacgcctggctaattttgtattttttagtagaaacagggtttctccatgttggtcaggctgatctcaaactcccaacctcaggtgatccacccgcctcagcctcccaaagtgctgggattacaggcgtgagccactgcgtccagccagcaaaggaaggcagccttactgtggggtcctaattaggaacaaggagccaggctggtgggagcaagggaaagcagaaagaaaatacagataagctataaatctgcgtttcttcatagtctaggacacatagcccatctgcgcaaatgactcacgatcttcctgcacccagatatcaccagaccctcggttgatagaaaaatgcaagttagttcacagccaccttgacattatcaatactgcacttagccctctccagcacacagaacaagctccatcctataaaatccccaggaagcctttgtctcctccagtcagctcctctcttgctaactggcctattgctttcttgcaacatatttccatgcttttgctaataaatctgcatttctgtacctatgactgtcttggcaaattctttttactgcccgtgccactggccccagacagtaaccactcgtgacacaagggcattgactgggaagctttacagagagtgagtcttcctggtgcaggggtggagggtaattttgagactagctgatccctcaccctccctggaggagtggggactagttagtgaccagtggaactaactgtgccatcctgtaggaccccaatctgagctctctctgatttcgaatcctcccatttcccaccatgaacctttcctaggaccagagctttatttttctgcttctcacatttggattctcgtctttttatccttccctatttgcttataaagactgtccatgagctgggccatgtgtacatttttcttgctttttatggccttatcctggttggacttctcccatccagctgcttcttcacccaccaccaggtgactcctggttgagaggagaaataggctgagcacagtggcttatgcctataatcccagcactttgggaggctgaggtgggaggattgcaagaggccaagggtttgaggccagcctgggcaacaaagtgaacttctgtctctacaaaaaattttaaaaattagctgggcacagtggcatgcacctgtagtcccagcagcttgagaggctgaggcaagaggatcacttgagcccaggagttcaaggctgcagtgagctatgattgcaccactgcactccagcgtgggcaacagaatgagaccctgtctcaaaaataaaaattttttaaattttaaaataaagtggaaagagaaataaccagagccagcctccctggcagactgtcttgctcggaggcttcccagcactgtcccgccatatggtacatgagaagttctgtcatttcaggtgaaggggtgctggcacagagggcagatcttgtcatctgtggcttttttggctcctgggaagaagtggaacttatccctgcttgtctccatccccagcctgccattcataccaccagctctgctgctcagggacaagtctccatgaacaaccatatcgcagggaccagcagcaggctgtcactcattaaaacaacaacaactgcgtcagactctacatcgtttttcctggaaagtatccagattatttccaggctttttaaatgagtcctatattttttttcactgctgccaatatactctcttccatgcatggcgtacttgagcaacagacatcagcctgtctgcaaggtctgaataaccaccgtagagagatcctttgaatgtatggaacagatgatcagcagtgtccgtgggtgacagccttcaagattagttcttccttcctcttttaaaagcaattttctttgaatagtctttcggtttcatccatgcttctaatctagaatgaaaactacgtgactacgttttttctttttctttttgcttttgttttttcagaatcgagccattaagttgttacttaatctcaacaaaggccgatgacaatgtctaatattctaggaatgtgccaagtcgtcatcttggttttgttcccagctgaggcattttacttaattctaatcgttttggggcaggaagacgacagacagttacaaaagggaagactaaaacacaaagagaaaaaaccttgttcaaagtcatacaaataatttttaaaaatagaaataggattaaaagcaagtctcctggctcctcatccactcctcctgtctgaaaaatactttttccagttggttaaaccacatctccagaaccacttctctgtttgtacttgtaaggcagaattttctaattcatttctgggagctcattttgcagcctaggtattcagtctttgcacacagatgagaaacatgttggccgggtgcagtggctcatgcctgtaatcccagcactttgggaggccagggtgggaagatcgcttgagcccaggagttggagaccagcctaagcaatctagtgagaccctgtctctacaaaaaataaaataactagctgggcatggtggtgtgtgcctgtaatcccagctcctcaggaaggaggcaggaggatgacttgagcccaggaggagtttaaggctgcagggagccatgatggtgccgctgcaccccagcctggttgacagagcaagaacctgtctcttaaaaaaagaaagaaggaaaaacatgtcaactaagccttgccctgcatgacgggctgttcagctgggaagcagcaagcctccgcacacagccctctgctggtgacctcccaggccctcccaggcttcacttaaactctgctgtttgaggtgtgcacagaaggaagtattcttgctatcttttggttaactgagaactcatccacgtattgccactcataggaattagaaaaaactggccaggcgcggtggctcatgcctgtaatcccggcactttgggaggccaaggcaggtggatcacctgaggtcaggagttcaagaccagcctggccaacatggtgaaaccccatctctactaaaaatacaaaaattggctgggcgtggtggcatacacctgtaatcccagctacttgggaggctgaggcaggagaatcgcttgaacccaggaggaggttgcactgagccaagatagcaccactgcactctagcctgagcaacagagcaagactctgtctgaaaaaaaaaaaaagaaagaaagaaaagaaaaaagtaagctacgctgggcatgcaaacagtgttaatgcagaagccactttagggtccaggcaccgagcctccgctcagagcatcaatgcccaccagccctcagtgctgcatgctccaggacggtgcttcccagaggttctcagctgatagagcagcatgtaaccagtgtggaaagatcaacctaggcacattacaattttagagagtttatccgagcagagggtgattcattaattggacagcaccaaactgcaagaggttcagggctccactgagggggcgtgaggggtaaacatttataaggtgttcttggaagcaagacaaagaaaaaatacttgatcagttaaagtggagagtctcagctgggcacagtggctcacacctgtaatcccagcactttgggaggccgaggagggcggatcacctgaggtcaggagctggagaccagcctggccaacctggtgaaaccccatctctattaaaaatacaaaaattagctgggtatggtggtgcgtgcctgtaattccagctacttaggaggctgaggcaggagaatcgcttgaacctgggaggcagagcttgcagtgagccgagatcgtgccacggcactccagccggggtgacagagcaagactctgtctcaaaaaaaaaaaaaggagagtctctcattagaaattagctggtgattggttaggctcacgtttcattttactgttgacattgagttgggtttagtttgcttaggtcagaatcctaggcaaaacagccatctcagcctctggccacccaattgattattttctaacaccagctacagtagtatttcagagttcctcttccagagcccgtgtccctcaagtctacaggccatgcgtctaggtcattctgagctgcgtccacactcccacggtgactttctggtcattcctggggcagcttgagccatcagacaggacttgcgtatgacaggcgaccctgctccagaggccttgaattgctgtctcaggcagtgctggctggcactttgcaaaccgtgtactttcgtcagaattcccgggacaaacaaaacacccggctgttgctgctcagccttgatgacggcatctgataagtgatgagagcgtggcatcatcaggctgttggtcttgattattcaagtagttgagtcacaggctgctgttttcagcagcaaacattcaagtacttacggcatttgaagatgtgtatctggcagctttaaggtgctgacaatgtggggacctttctgaaatagtcccacaagagaattcttgaatgtcttgaagaaagatgaccagcctcttttgtgagtgtgcgtttagtgtatgtgaagttatggggaatggaggttactcattctattttaacagacagggaagtgtaaaagtgaagatgtgtggcatctctactcaccaactctaatcctattgtagtatctaccctggaaaaattatcgtgcaagagacatgctcataacatcattgtacaaaagaaaatattggaaataattcattgtccaccaacatgagaaaggataagtagaggggaacaatgtgatgaagacagtaaaaacccagaagtgtcatagaaatgaaggggagtgctcaggtccagggaccaaggtggctgcccagctcaagaaagctttgagccaggcatggtggctcatgcctgtaatcccagcactttgggaggctgaggcgggcagattatctgaggtcaggagttcgagaccagcctagccaacatggtaaaaccccatctttactaaaaatacaaaacttagctgggcatggtggcatgctagtcccagctactcgggacgctgaagcagaagaatagcttgaacccaggaggtggagcttgcagtgagccgagatcatgccactgcacttcagcctgggcaacagagcaagactcaatcttaaaaaaaaaaaaaagaaagaaagaaaaaagaaagaaaaatttgagaggctggtagcctcagaatgaacccttgaaggagggcagagatggcttttcacaagaagtgttgggtgctgagtcaaggaggggtaaagtagataaaatagtggaagcaaaagcatgcgagtggaagaggcctaggtccccgagagtaaaggcaactgcattgaaattctttaatttttcataccatatgggagaagttgggaccaatttttttgcttcttgtaattgcatttgacatttcagaagagttatcccaacttggtatggtgactcacacctgtaatcccagcactttgggaggccaaggtgggaggatggcttgaagccagttatttaagaccagcctgggcaacaaagcaagcccctgtcttcattttttttttaattggcggggcatggtggcacgtgcctagggtctcagctacccaggaggctgaagtgggaggatctcttgagcccaagagtttgaggctgtaatgagctgtgattgcaccattgcactccaacctaggcaacagagtgagaccccatctctaaaaacaaacaaacaaaaaagcaaaaaaaaaaaaaaaaaaattcaagcaaatgtttgactttatcgcttccaaggagaacaagtgccagttttgtcagagaggaaatgcatgtccatctcctgggtcctgctcagaaccaaaggaagctgaagactctacaaatgcaaaagtgaagggaatggcaaaccctgagagaagccatacagagaaaggaggctgggcttcctgcagggaagctgtctttaaaaagggccaccacctagcacctgcggatcaaagtgaatagggctgatgcgagtctcaatccccatattcagatatgcggggaaaagtgacttttctaaatgttttaaaacgcaaatcgaagcatgcattctgcctgtttggcctgcttgggttgcctcagtgtttccccagaacttacacaggaccaggtatctgtccactgggtgacccgtaggacaccatcatctgggtggggaccctttaggctggttgctgttggtggtcttgggtcctgcctggggacacaaaactctccacaagactgcccatgacctcctccgcttcagggcacccaatggccattttgttctagggtcttgtaacccccccccgtctcctaacaaggctttgtggcccccaaccaccccagcttgcagagagggtcactctccggtcctgcaggcaatgctcttcttcctcctgcttctggccaagacattttcctccgatactctgaattctttctcacctctggggtttaggcttttggaaacaaaagccagaaagactcttgggccatgtctggttttttgttgttgttgttgttgttgtctttgttgttgttgttgagacagagtttcgctcttgttgcccaggctggagtgcgatggcacaatctcagcccactgcaacctccacctcccgggttcaagccattctcctgcctcagcctcctgagtagctgggattacaggtgtgtgccaccacgcccagctaattttgtatttgtagtagagacggggtttcttcatgttcgtcgggctggtatcgaactcctgacctcaggtgatcctcccacctcggcctcccaaagtgctgagattataggcatgagccaccacgcccggccccatatctgtattttaacccatcacacccatcccttccttgaatggggaagtattggttgatatcacaaaatactatccagtctcatggttgaaactaaggatcctgattttcctttcaaagagttcagtatactccagtcttcctctctgatgaagttaacatacccggaagccttccagtttccaacagtgtcctggggagaggccattgtaaatggtctgcagcacaagtctgaagcacagattgactgccgcagctggttcctgcatgcatcagtggtgatcagagctgccacttcctcacagccccctgtgccgtaccagacagttttccaaacccttcactcacatgatctcatttcatctaaaactatgtcggccaggtgcggtggctcatgcctgtaatcccagcactttgggaagccgaggcgggcagattacaaggtcaggagtttgagaccagcctggccaatatggtgaaaccccatctctactaaaaatacaaaaattagctgggcatggtggcggacacctgtagtcccagctactcgggaggctgaggcaggagaattgcttgaacccagaaggcggaggttgtcgtgagctgagattgggccactgcactccagcctgggagacagagcgagactctgtctcaaaaaaacaaaaacaaacaaacaaacaaaaaactatgtcatggggtaagtgcattttacctattccacaggtgtgaaaaccccaggctaggagagataagacagctttcagaaagtcatgctgccaagtgacagagcctccctcaggtctgtgagtagcgatggtgcatttctcttcctcttgtttgtcatgagaaagtctcccagtcccaaagacagtctctaatttgggttctaagttctttttttttttttttttttttttttttttttttttttttttgagatagagtctcactctgtcacccaggctggagtgcagtgatgcaatctcagttcactgcaaactccacctcctgggttcaagccattctcctgcctcagcctcccaagtagctgggattacaggcatgtgccaccacgcccagctaatttttgtatttttagtagagacagggtttcaccatgttggccaggctggtccctaactcctgacctcaggtgatccgactgccttggcctcccaaagtgctgggatcacaagcatcagccaccgtgcccggcctggtgttctttatgaagctgctgtcttggcagcaatggtcacggaaaaggtcctatcagagagtgacgagtttgctcagtagacggtggggctggacattagtgcagctgaggtctgaccacatcagcaggaccagaattaggtgagaatttaaagaggcactcggccgtgtctcatcgcacttgcaaggccctgagatagatcacctctttaaattctgtgttctaggtccctcactagcctccctctagtcccaggccctccctatgagctttgaaaagcttgggaaagtcaagagaatgagcagacaagtcacagattgggagaagacatttgcaagacatctgataaatgctgtcactcagaatacaaaagaactcttaaaactcaatagaaaacaaaacaaaacaaaatcctattaaagatgagcaaaagttttgaaaaggcatcttaccaaagatacaaagatggcatttgaagagaagctcaacatcatatgtcattagggaaatgcaaatgaaaaggaggagaaaccactacacaccatttagaatggccaaaatccacaaccctgagaatacacaaagcgggccaggatctgcagaagcagacactcttgttcattgctgttgggaatgcaaaatgcaacagccactttggaagacagtttggcagttccttacaaaacgacacctcctcttcccatatgctatagcaattgcactccttggaattttcctgggttgaaaacttatgttcacacgaaaacctgcacacagatgtttatagcagctttattcataattgcccaaactcggaagcaaccaagatgttcttcagtaggtgaatggataaataagctgtgaaacatccagaaaatggaatagtattcagtactaaaaaagaaatgagctatcaagtcatgacacaacatagaggagacttacatacgtattgctgagtgaaagaaatcagtctgaaaaggctacatactgtgattcccactatatgacatcctggaaaaggcagaattatggaatcagtataaagatcagtggttgctgtggtggaggcacctcctgctctgaatgtggcgttggggagggttgaataggtggagcaggaaactcctctgtgtgacaccataatagtgagcacctgtcattagacatctgtcaaagcccatagaatgtgcagtgccaagagtgagccctattgtaaactatggactttaggtgatattgatgtgtcagtgttgggtcattgatggtcacaaatggaccactctggtgcaggatgttcatgggggaggctgcgcctatttggggacaggagttatgtgggaactctgtactttgtgctcacctttgctatgaacctaaaactgctctaaaaaataaagtttattttttttaaatgccgggaagtttgcagaagaaggctaggaaaatggggaagaaaagtactgtcccagggcaagaggagaaagcaagggaaagggatatcattcttgtggctttgtgtgggtcacagggtcggcctgcaaaagacatcaatcttcgttccctcccccagagccccagagcccctttgccaggctggggccctgacctgcttcttggaaacccttcctcatcagcttggcagctgcccgcatccaccagcacctcagtgtgggtcctcagcaggctgtggttcctccttgaacctacgtttgaggtcagcggttccccacgttccagaaagtcagctgtgtgttgcagacattcccacaagctgcaatttaccagcaaccatcttctcccagtgttcaggagcctgtttgcaaatagcactactggccaagcaaataaccagttagctgaggagctgggagaggaaatggtagtggagccaaaggcaacaaggaaaccttctttgatctgtcttagcgctaaaaaaatctcataggaagcaaatgaaatgagaagcaaaattgcacacaatgttaagcaaaaccttgatactctggaacaaagacatcctgttttttaacaaagttaattcttcaggaatgtaaaaatgaatggtttgcccgaggaatggttatagaaaattcattcttcttgaataatgctaggagctggaatatgacagcttttgtcttttcttcagttaaaaaatgaaatggaaaactcaaaattatcattttcctctaactgtcactttctactttgtaaaaatagcctttctattgaaacaatatcatgtcaaaatggaattggcagccgggcacgggggctcacacttgcaatctcaacactttgggaggttgaggcgggtgggtcacttgaggtcaggagtttgagaccagcctgggcaccatggtgaaacccccatctctactaaaaaaaaaaaaatacaaaaattagccgggcgtggtggtgcgtggctgtaatcccagctactcggggggctgaggcaggagaattgcttgcacccaggaggcagaggttgcagtgagccaagatcacgccactgcactccagcctgggtgatacagcgagactccgtctcaaaaaaaaaaaaaaaaggaattggccacacagactgaagtactagatgatctttgaagggactgctagagccacgctcttcaggcatgtgcttttcacctgtactctggccaggcaaaggctcggaggaccctccgtcttcggctcacagcatttaaacattgtggagtttttgtgttattgtgatttttagatgtccattttgtctctttagtagagaatcagatagataatagaaataatcattcttccctcagctttttgcaagctgggaatacagagatgtgcatgaaagaggaggtctttctcctaccccagctgctggttgctggggagacagcatgatgaggggggctgctgtggcggaggcaccccccgctctgaatttaaaaggtgaaagtggtcaggaaagatcctctggaggtcaggaaagattccctggaggtcaggacagctgatgcaaggtatgggagtggaataggtgctcaccagacaagaaaggaagagcgttctcagcagagggagtggcatatggagagcccaggatggagcaagcccgctacagcccgtctctcctgcagactgcagcaaaaacgctggaaaaatataaaaagcaactccctgaggactcacgaatcacataagagcatgtggattggggaggacaggcagaagccacgaagtcacctgtgtggatgggagtgtcctttacatttgttttctccttattcttgtggctttgacctgagtgggcccaagagcagggctgcagcggtggccgtgcaggtagcgaatgttctgatggaaaccccacatggctggcgagaggaactggggaaagggaaccctgtgatccttttttttctttttctcctttctctcacagctttgccccaagaacgggccccagttcagaattgcacagtggtggctgcatgcaggctaaatctccaagataaaccctgtctttctggtcagggaaacaggaaaaggtgcccttttgaactggagggtgtggcagaaaccctggagaggagagagtgtgagaagtggatcatctcattcttttttatttttttcttgaaacagaggctcgctctgttgcccagggtggagtgcagtggcgcgatctcagctcactgcaacctctgcttcccgggttcaagcgattctcctgcctcagcctcccgagtagctgggattacaagcatgcaccatcacgcctggctattttttttttttttttttgagatggagtcttactctgtcaccaggctagagtgcaatggtgcaatctcggctcactgcaacctccacctcccagcaggttcaagcgattcttctgcctcagcctcctgagtagctggggtccaccaccacacctgactaatttttgtatttttagtagagacggggtttcaccatgttggccaggctggtctcgaactcctgacctcaggtgatcgaactgctgacctcaggtgatccacccgcctcggcctcccaaagtgctgggtgagccacctgacctcaggtgagccaccgtgcctggccgaatttttgtatttttagtagagatggggtttcaccatgttggcccagctggtctcaaactcctggcctcaagtgatctgcccaactcagcctcccaaaatgctgggattacaggtgtgagctaccgcgcccagcctcatctaactctttttatgaaccacaaaagttccagcctcaccccttagctacacatgcttaggacagaaccaaagtaacatagcaaaagctttgagaacagaattaggattcataccactactcacgtctcttggagttgcaaagactaaaaattaagctgagatcagaatctaacctcacctaatctaacaacacacttctaaatagcccatggttcaaaaaggaaatcaaaagagaaattagaaaatattttgaattgatataaaaatgtgtgggactcagtgattaaagggaaattcataccattaaatgctgattttatttcgtttcatttttatagaatatagctttatttatagaatcttacaaatcatttacagtccacataagttaattttattttctaatttcttttcataagagctgagttattttttaaaacaatgtgctggaggccaggtgcggtggctcatgcctgtaatcccagcactctgggaggccgaggtgggaggatggcttgaaccttggagttcgagaccaacctgagcaacatggcaaaaccccatctctactaaaaatacaaaaattagccagacatggtggtgcactcctgtagtcccagctattcaggaggctgaggcaggaggctcacttaagcccaggaggtcaaagctgcagtgagccgtgatcatgccactgcactccagcctgggtgactgagcaagactctgtctccaaaaaaaaaaagggtaaaatactgcagtggaattgcagaactgtaaagggaaatatgaacaataaaatcctctcacacaaatatcggacaacttttttttgccaggtgcagtggctcacacctgtaatcccagtatgctgggagactgaggtgggcagatcacttgagttcaggagtttgagaccagcctggccaaaatggtgaaaccccatctctactagaaatacaaaaataattagccaggcatggtggcgcacacctgtagtcccagctactcaggaggctgaggtgggaggatcgcttaaacccaggaggcagaggctgcagtgagccaagattgagccactgcactccagcctgggtgacagagcaagactctgtctcaaaaaaaaaaaagaaaagaaaagaaaaagaaaaagaaaaaaaggaaagaaaaaagaaaaattaaaaaaaaattagactttttttttttttttggctaatctccagcatattaccatctcgtcagaagagggcttactaagaccagatcttaggcaacccaaacagagcctccttttttttaaacccaaggtgacggaccaatgaggaatagcccccaaaattgacattagacacaaaatacctgtaggagcaaggacaggggcagcctgcctgccagtgactaggtgagaaggagcagacacctggtgctggcttactgttcctgcatgtgacatgtactttccttggtaacattaacaggggctggtccatccagaaagaggttgaagctactaatgccaggggtgaaaagtctttagaacaactggctattccttagacttctagatgtacaaatgcttaaaacagcacatttggccgggcgcagtggctcacgcctgtaatcccagcactttgagaggccgaggcaggtggatcacgaggtcaggagatctagaccttcctggctaacacggtgaaaccctgtctctactaaaaatataaaaacttagctgggcgtggtggcgggcacctgtagtcccagctacatgggaggctgaggcaggagaatggcatgaacgcgggaggcggagcttgcagtgagccgagatcacgccactgcactccagtctgggcaatagagcgagactccgtctcaaaaacaaacaaacaaacaaacaaacaaactgcacattcaacacccagaagtccaactcaccaggcaaagctgttgccaacggcaacttacagtcaggagataatatgactgtctccagccccactaagttccgactaggactgacctctgcacccaaagagttttgtgttgttttgttttgttttttgaaatagagtttcactcttgtcgcccaggctggagtgcaatggtgtgatctcggctcaccgcaacctccacctccccggttcaagcaattcttctgcctcagccacccacgtagctgggattacagacgtgcaccaacatgcccgcctaattttttatatttttaatagagacagggtttctccatgttggtcaggctggtctcgaactcccgacctcaggtgatccacccacctcagcctcccaaagcgctgggattacaggcgtgagccaccacgcccaacctccaacgaaagttttaaaaggatttccctttgaggtagctgtctatgaaaggaaatttcttaatatagctgtgcacaaaagagaaagcaccctattatttcatattttatttttcaatttgttaaaggttatatttttgagctcctctcctaaacaagaaacctgctaactctaacttagtactttcttctccaaaacaaaggctattatttttaaggtataagaagatctatagggaatgctaaaattatacatttaatacatcgatgtgagttagggaaagcaaaatcttccagagtcataaactttgagtgttattttctggtagctcctgaaagcagttttagaaaaataaaacagaaaagatgaagaactgtttttataacaataataaagataatataaaaagttagatttcaacattcaaggaattggtttttggttaacctggaccataatcctatcaggagtcagtcctgatatttcatctagaatctcaatcactgaagttttcctccctcttcagcctattctcaaatctattgaagtcaacaggcaagataaggagagaaacttgtaatatcaccagcagtttccttgctcatgctcttttcaagaatatccctggtttgagagatgtctcccaggaagggaaaacaaaactgatgcttttttgtttttttccctgagacagtcttgctctgtcacccaggccggagtgcagtggcgcaatcttggctcactgcagcctccacctcccaggatcaagtgatcctcccacctcagccctgcaagtatttgggactacaggcccacaccaccacacccagctaattaatttttgtgtatatatatatgtgtgtgtgtatatatatatatgtgtgtgtgtatatatatgtgtgtgtatatatatatatatataaattttttttttttttttttttttttagagacagcgtttgcaatgttgccgagggtggtcttgaactcctcagcccaagtgatcctcccacctcagcctcccaaagtgctgggattacaggcgtgaactcaccacacccagctgatgctgcctttaatgactaagagtggacagttttctgtctaagaagatgaaaaactcactggcggcgtgcagtggctcacgcctataatcccaacactttgggaagccaaggtgggaggatcacttggactcaggagttcgagaccagcccggccaacatggtgaaaccccgtctctactaaaaatacaaaaattagccaggtggggtggcacatgcctgtaatcccagctactcaggaggctgaggcaggagaattgcttgaacccaggagacagaggttgcagtgagccgagatcacgccactgcactccagcctcggtgacagagtgagactctgtctcaaaaaaaaaaaaacaaaaagattaaaaatttaggcaatggcaatgaagcagtactcttgtgaatcatgcacacgaatcagtttgtgaacacagcccctgggctgcaactgcaggcaccactgagaaaggcttctggagagtctggcttcccaaattggctaaagaaactcatgttatccatgtgatagtaataaatcgattcacacagtgagccctgcagattagctttccttgaagccagagttctgaggcaagggatccagcgtgcctgaggctggcccacggttttacagacaagtatatccgtccattttctgggcagaatcagagcaattcatattcatattcagttcaacgaaggattccactttttgtgtgtgtgtgagggaggaagcggtaacctacacaggtgattgaaagcccatctgtagcataatcactgggctgccattctgcaaacatctgcagtgccccaaactaagtttgtgaccttacatttcagagacccctgttattcatgcttttatttatggaagtagcaaatcctaaattttgcttgcactgattccatttctgattacccttgtttaagcagagcataaactgcattccaattctaccagtcagcttgccactgtgcagatatctccactaggggaggatagtttgtgcagtctgccttctaacagagatgtctgaaatatgctcagaatgtgcttttagggaggcagctcccaagtcttgtcttgtcttttcttttctttctttttttttttttttttttagatagaggcagagtctcactctgtcgcccagggtggagtgcggtggcacaatctcagctcactgcaacctccgcctcacagattcaagcaattctcatgcctcagcctcccaaatagctggaactacaggtgcacaccaacacacctggctagtttttgtatttttagtagagatggggtttcactatgttggtcaggctggtcttgaactcctggcctcaggtgatccacccacctcagcctcccaaagtgctgggattacaggcgtgagccaccgcacccagcctgcaagtctcttagaagataggagtggggaagggaagtgggaatcacagcaaaacattgtttccttgtagactctctgaccttccattctgtcagtgttgacctgaaagaggaggtccaggaagctacattacctccacattagctcacctggacagccaggaaataccaggtgctgcccccaaatcaatacccagcattctgctaggagcagatgagcaaaatgacaagacacagagcatccgtcccactttctctcccactccggatgatccctgcctcccctctcaccctgtcatctgttctcacttagaattctctctgagagaagtaataggcaactaagcagactttgaaaaaataagagggattcctgcatcttctctgtaagaagaggtgaacctgtttcaaaactggccagccggaggtccaggatgcccagccaatgtcatgggccccaaactatggattcacctcttgatatttctaaccaagttaaaaccactggctgtatttttgcattgtcaggtaaaggattcaaaatctttcggcactgggcagggcacagtggctcacgcctgtaatggcagcactttgggaggctgagacagatggatcacctgaggtcaggagttcgagaccagcctggccagcatggcgaaaacccatctctactgaaaaaaaaaaaaaaaaaaaaattagccaggtgtgtttgtgggtgcctgtaatccctgctactggggaggctgaggcaggagaatcgcttgaacctggaaggtggaggtttcagtgagctgacatcgtgccactgcactccggcctgggtgacagagcaaatctccatctcaaaacacgcgcgcacacacacacacacacatctttcagcactggttccaagggaaagaggcgagggtaatcagagaaaaaggcttgtcttgcaagctgcattcaggttccagagtcacagagagaaaaggaggtgaggagagggtgagaggtactacctggagactggttactagggacgtttcttcctaggacagagcattgtaaacaccgctgacatctgaaggcgggaatacaatctgtgtaagtttttcatggaacaacctcttccacggtgctttgtggatggcgagtcctcaggccagggatcgggcagcccagggcctgacttcccatcccacaggctcctggcagggccctacccaatctggatctgtcctgaatatatcacgaggaccagcatgacggtgaatctggccaacagacccaggttctgaatgacaaaggggatggagatgctgcccttcctcccatcctcttggcagacctcattcgtctcagggaacatatcaaccacagcaatattcaagaacattcctccaaccagcacaaaaattcagttggcagagaagtggctgctggccaggatgccaaaggccagacccacatagcagcaggcggaagggggttgaagaagacagtgctgaatggtcctcctagcgctaagcaggatgacaaagtcatgtgggaactcctcatggaagacggccaccaggtgccgaggccttggaccacacagacggtgaaagaggcgccagtggccaggctgctgaggacattgtggaggctgttgcttagggtgatcacccaggccagagtgctgataaagtagtggacacctttcagctccagcaggcactctggggagcctgcagaaccagcacagagagtgagcccaccacgaccttcccatccatcatggactgcttgccatccagttcactgtggcagtgctgagggctcatgtggtccaggtccccattctgcagcttctccatcacccccctcctcctggtgcttcttggaaggaagcctctcagaggcataatggctatgtctatgtgatgttcattttcctgtttgagaaacatcttcaagatctctgaaaaataaaaataaaagcccccagacaccactgcagacttggacacataatcatcttccagagggttgaaatcaaaagccccaggaatgagctaggagagcacattggactagaggattccaatcgccagagctatgacgtggagcagcagcttccttctgtaaaaggccttcttgaaggcaccacgatggtgcccatgagggagcagagggagatgacagtcacatagaggagatcgtatccccacacttcagttgcactagatggtcatcccagcattgaacagcatgacagagaatcctttttcttgccttatccagcttctagaggctgcacactccccttcgcttgtggcccccttccaccttcaaagccagcagtgtagcgtcctcagatctctctctgactctgacactgactcttctgctcgccctttcacttacaaggtcccttgtgataatccatggtaattggttccaccaggataatccatgataatggtcacacagaggagactatatccccacacttcaattgtgctcagcctcccctcttcgatctatgcattctctcgttctcctggtccacagaggtgcgggccaggaatctagctcctggagaatggcggcagagctcctggagctcactccttccaatccatgactgccactgaaattgtgggcagcaaagcagtctccagaactaaagcacatcgagaggttcctctgtccctgcatgggctcagtgaccttatcccacctcactcccaattccaggtagttgagcaggatgaggctgctcccagcccactgccacatccagattcagctgctgagtttatcccacaggaaagaggtagcactgacagcgtgcacgcctgtgggtgacgcatgatcctcaggagcagttcaccatgcgctgagcagggccagtaggaggcagctgtggaaggccaggtacagcagcttcatggtcaccaaataagcctgacactcaagcagacagcagccacccccatgcagcctcagctgcagggccccagggttgctggctacggcaggagcagctcagtccatacgtctgcacaggcacccatctgcctgaaccctgatccctgtgtcaggcaaaaatgtttattttagaaaaaaaggaaggtctctctaatcactgacctcagcttttgctttaataaactaaagagagagagagagaaattcaaaagaagcagagaaaggaaataatatagaataataaagcagaaatcagtaaaattgaggacagaaaaaagagtcaatgaaaccaaaagctgcttttgtgaaaagagtcataaaaataaatctctagccagaccatccaagaaaaaaaaaatacaaatgaccaatatcagaaatgaaagacggaacatcactacagacctacatacataaaaaggatattacaaagaatgttatggccataaattcagcagctgaaatgaaatggataaattctatggaaaacacaaacaaccaaagatcacacagaagaaatggagaatctaggccaggcgcagcggctcacgcctgtaattccaacactttggaaggctgaggcaggcagatcacttgagctcaggattttgacaccagcctgggtaatatgatgaagcccgtctctacaataaatacaaaaattagccagtcgtggtgactcacacctgtggtcccagctactcaggaggctgaggtgggaggatcacttgaacccaggaggtgaagattgccagccttatatgtcaggactgcttgaaaggttcacacaccctcttcctctgctgcatgagaacccaaccttggcaactacctagctctgttaccctgtattgctgccgtagcaagttaccacatgcttagtgacttaacaccagtttattatattacagttctagaggtcagaagtccaaaatgaatctcagtagggtaaaaccaagctgttggcagagctgtgtttcttcaggaaacaccaggagaaaatccttcttgccttttccagcttctagaggctggacacttcccttcacttgtggcccccttccaccttcaaagccagcagtgtagcatcttcatctctctctctgactgacaccgactctcctgcctcactctttcacttacaaggccccttgtgattgcatagggtccactaggataatccatgataacctgcctgtcttaaggtcagctagttagcaaccttagttaattgcatctgcaacctaaaacccccattatcatgttcacaggttctggggagtaggacacagataactttgggaagccattattctgcctgcctcaccctgtaaaccagttaagatgctatatgtcaactacattgccaggcaacattgcttatggtaaaaatggcccctgactggtgaattacatatggactgggagtagctaggaatggaatttaaatatctgatgtagacgccatgctttgaacttctcagcattttggtgactgctatggtctgaatgtttgtgacccccccacccctccaaaaaaaattctgtgttgaaatctaatccccagtgcagtagtactggggctttaggaggtgattagatcatgggggcagagccctcatgaattggacttgtgcccttataaaagaagcctgaggagcctgtttgccccttccctcatgtgaggacacagtgagaggtgaacagtctgccgcccagaaaagggcccttgtcacaacctgaccatgctggcaccctgagcctgaatttctaagctcagggaactgtgagaataaattttgtagtttaaaagctacccaggacgggcatgatggctcatgcctgtgatcccagcactttgggaggccaaggcgggtggatcacttgagcccaggtgttcaagaccagcctgggtaacatagcgaaaccccatctttactaaaaatacaaaacttagccaggcgtagtggcgtgcacctgtagttccagatacttgggaggctggggcaggaggatcacttgagcctgggatgtcaaggctgcaatgagtcatgatcgtaccactgcactccagcctgggtgacagtgagaccccgtctccaaaaaacctacccaatttatggtattttgttatagcagcccaggtgaaccaagacagtgacgcttgtgaaagtcacgtccccgagatactgccctgtggtgcgcatcttcccacgcagaccctgcacctccctgtgaaggccccgtctgtttgcaccatgaccatcacatggggctaagataactcctggatgttacatactctgctgtgagaaattctccaggactcctcacacaaggcagcctggcattgttctgctggcaggccagggcctctgtccccatccttctgaatagatcggagcacgttctgtcatcgtcttgtgagtctgaatgtctagtcaatcttcgacgttgtcctgggctaaagaggggctgtcttccatctgataaccaatgaggagccaacccttatatttgtaagtacttcgttttctttttctttctcctcttttttttttttttttttttttttttgtgagacaaagtctcactctgtcgcccaggctggagtgcagtggcacaatctcagctcattgtaacctcaacctcccaggctcaagcaattctcatgcctcagcctcctgagtatctgggactacaagcatgtgccaccatacctggccaattttatttattttttgtagagatgaggtcgtactatgttgcctcggctgttcttgaactcctggactcaagcgatcctcccgcctcgacctcccaaagactgggattacaggcaagagccaccacacctggccaatacttcatcatatatactggcaatgctcaggcaaccctgttaacagtcgaaactgagacccacaatggttggtaatttgcccaaatttgcccagaaagttagtgggctctttcccccttctcaaatatgctaaaaaacaacccacctgcttggcaacattgtctaatgcgaagttgggattagtgcccagttcttcaaaagatctttatggaccctaagtcacagatatacatccaaccaatggtcaaatctactcactgacttcctgctggtgctgggcactacatattcaagaatctcggtccagggaggacgcaatggcccacatgtataatcccagcacattggtaggcaaagtgggaggactgcttgagcccaggagttccagaccatccagggcaacatggcaagaccctgtcctacaaaaagtaaaaaataataaaaattagtccagcatggtggcacacacctgtagtctcagctactcaggtggctgaggtgggaggatcacttaagcccaggaagttgaggctgcagtgagccatgatggtaccacttcactccagcctgggtgacggagtgaaaccctgtttcaaaaaaaaaaaaaagagagagagagagaatctctgccctgtgggtaactacattttatctcttttgcagtgcttctttttattttttattttttctttgagatgaagtctcgctctgccgcccaggctggattgcagtggcactatttcagctcactgcaaactccgcctcctgggttgaagtgattctcctgcctcagcctcctgcgtagctgggactacaggcatgggccaccacgcctggcaaatttttgtatttttttcagtagagatggggtttcaccatgttagccaggctggtcttgaactcctgacctcaggtgatccgccctcctcagcctcccaaagtgttgggattacaggagtgagccaccacgcccagcctcttgcagtgcttttttttatcttgacagagacacatggccagggtgagagaaagaggaaatcagcagtttggtaggaatttgaaacaggagcctttttctagcaccttgaataggcaatggtaggaaagtcagaaattaatcaaaaatgataaagacattcgagaaagacacaggaaccagcttgaaggggctcccactggccaaatccaggacaatttatacatcaaaataaatactgatagtaatgaattgtagcctactgaataaaacagaaaaccctgagtgcctcctaatagcagccaataattgaatatattgaaagtttgataaggaacaagtttagacagtttcaaggtatctttccacaaattcttattcattacaaaaataaaaagtaactacagtgaagaaacttggcagacaccaccttaatcacgtgatgacaacgaacatcattaatgggacaaggtgacatcttgggctactggataggatgcaatgagaagaatgcagtttgtcttctgtgatgttcctggcaaaggataacacctgcatcttatgaggagacagaaaagaagcccgaattgaggggtgttctacaaaataacggccgctatcttggaaagtgctgtgggtcgtcaaagtcaaggaagggctgaggggttaaagaggcataagaactccatgtggcgtgtgattctcagctgaatttactaccgtgcagggcattactggtgcatttgatgaaatctgaatagcgttagaggattagatgatggtaacgtatcaataatagtttcctaactttgatggctctatcatgtctttctgtgtaggaaataagaagtattcagggctgacaggcagttaggttgacatctcccattcaagtggttcaagaaactttttttttcttttctttttttgagacagggtctcgctctgtcattcaggctggtgtgcaatgacgtgatctcagctcactgtagcctcagcctcccgagtagctgggactacaagtgtgtgccaccacacccggctaattttttttgtagagatggggtttcaccatgttgtccaggctagtctcgaactcctgagctcaagtgatctgcctgccttggcctctcaaagtgctaggattacaggtgtgagccactgcgcccggccaggaaacttttctttatgctatacttgcaacctttctgaaaacttgaattgttacaaaattcaaaatatttaatgttaagactttttttttaaagtaaatgatgccaacaagcatatgaaaagatgctccacatcattagtcattaggcaaatgcgaatcacaaccaagagagggtaccacttcacacccacgaggatggctataacccaaaaagtggaaaataacatatgttggcaaggatgtgaagaaattggagctattgctgatgagaatgtaaaatggttcaaaataggtactcaaatacatgttcgtggcagcattattcacaatagccaaaagatggaaacagcccaaatgtctatcagcagatgggccgataaactaaatgtggtgcacctgcatcatggaatactcttcagccataaaagggaatgaaatactgatacatgctacaacatgcatgaatcctgaaaacattacactaagtgaaaaaagctggccaggtgcggtggctcatgcctacaatcccagcactttgggaggccaaggtaagaagatcgcttggagccaggtgtttgagacaagcctagacagcaatgtgagacccctgtctctatttaacaacaacaacaaaaaaaaattgaggagccagacacagtggctcatacctgtaatcccagcactttaggaggccgaggcgggtggatcacctcagctcaggagctccagatcagcctggccaacatggcaaaaccccgtctctactaaaaacacaaaaattagctgggcgtgatggtgggcacctgtaatcccagctactcaggaggctgaggcaggaggattacttcaactcgggaggcggaggttgcagtgagccgagattgcaccactgcacttcagcctgggtgacagagtgagactccgtctcaaaaaaaaaaaaaataaaaaataaaaaactaagtaaaaaagaaaacaaaggaagaatccagtcacaaaagactgcatattttgtgattttatttatgtgaaatgtccagaatgggtaaatctgtagagacagaaagcagactgttggttgccaggatctgggaggagcgggaagtgaagagaactgcttaatggagaactgcttaatggaatgaggttttattctgaaggtgtggacgtgctttggaactaaatagtgttggtggttgcacaacattgtggatgtactaaacgtcactgagttgctcattttaaaatgattaattttattgtaagtgaattgaacctcaatacttttttaattcaagcatttcaatgtgaatttggtatttttttaaaaaggaaatggtaagtgataaaacatagttggcagcagctggcagcagcctttagaaacagcatttcctggccaggtgcagtggctcacacctgtaatcccagcactttgggaggccgaggtgggtggatcatgaggtcaggagttcgagaccatcctggccaacaaggtcaaaccgtgtctttactaaaaatacaaaaattagctgggcatggtggcgtgcgcctgtagtcccagcaactcaggaggctcaggaaggagaatggcctgagcctgggaggcagaggttgcagtgagccaagatcacgccaccgcactccagcctgggtgacagagcgagattccatctcaaaaaaaaaaaaaaaaaatagaaacagcatttcctgtagctggtcccagaggatggagtcacctcatctttcttggacagcctcaaagtcccacatcagaatggactaaagtgaggggagggggctgggccctgtgctgggcaggagacaccctcccggagagaggcagggagggtggcctcatgacttctgctcttgtggctttgctctgaagtaggaggctgcaccctaaccctagcaagaatactgaaaagccgtgccgatgggatggcatgaaagggagtcaggctgggcggcgtggatggatgaactgctgcgaactcattctccctgatcaaagcgcgtgacccactaaattcacactggtggttttctactacagagtctgtgaagtacaatgcatttgcttcagataattcacagaaccacttgtctgcatgctttccgctgtaggcggctgcctcccgagagtaggccccacggtgcacccagtggcgatggccagcaacctcattgaacaacacactgtccatccgtgctgtgtaatctgatgttggtggtgacaccatagctcatctgtcacttctccatttagcaccatttcaatatttggtctggaaagaataattagttttattggcactaagtaatcttttacctccacaaatctgaaaagtacagattgaagaacatagaaagaaaccttcagggctgggtgcgatggttcatacctgtcatcccagcactgtgggaggccaaggcggggggatcatttgaggtcaggagttcaagaccagcctggccaacatagtgaaaccccatttctactaaaaataaaaataaaaaaaaattagctgggtgtggtggtgcgcacctgtaatcccagctactcatgaggctgaggcaggagaattgcttcaacccagaaggcggaggttgcagtgagctgagatcacacgactgcactccagcctgggtgagactctgtctcaaaaaaaaaaaaaaaaaaaaggaaagaaaggaaggagggagggagggaaggaaggaaggaagctagctactggagaagtgagcatgcggcttccttcctctgctcgcccccccatgctgctttgggccaaaggctctgcacgcagcccagccttctgacccatgctccccctggcccatgagcctcccacagccaggacttcccctgcccctacaagtcatgagttgctcagctccgtcttcagcccaaactccctgtgaattccatctctatcagtcctcctgtctgctggccatgtgcttctcagtttcccaaaggcctcctaagttcagcctggccctatgtgaactctgcaccccattccacttgctcttttcctaagcgtgcggaacagcacagcaccatctccctggtggtcagcccagatatgccttcctttcccccctccccagcatccagatcctaaccacatcccctggctcttccaccctcaccacctggctctccaccccgtctccctaccagagccagtatctagactcccatggtttcctcattggtctgtttgatttttcttttttttaagacggagtcttgctctgtcgcccaggctgaagttcagtggcacgatctcagctcactgcaacctctgcctcctgggttcaagcgattctccttcctcagcctcccgagtagctggggttacaggtgcatgccaccatgcctggctaattttttgtattttttaatagagatggggtttcactatgttcaggccaggctggtctcgaactcctgacttcatgatccgcccacctcggtctgcttgtttatcttgttcacctctgatccattctccacactaggttgaagtgacctttctagaatgtaacagcagagcatggtggtacgcctataatcccagctacttgggaggctgaggccagaggatcacttaagcccaagagtgcaagaccagcctgggcaacacagtgagacccacccccccacactctcaatcaaaaaaataaaatgtaacagcaatctttttacttctctgttaaataacccttcatttgatgacacctgcctacatgataccagtcccacactcttagtgtggcactcaaggcccttcctggtctgctccctgacctcctgggcttcaggaataagggaccacccagggtttcctgaaagtgccaggctggttctcagttgctccgtctttacccatgctgcaacaccacacttgcatgggacttctgcctggaactccccctctctgatcacagtgcctagtgggtcccattcatcttcctaggctcaaattgagtataaagcccttcctaaccttctccttacctgaatcgatcatctccttcttggcccctctaccctttactgacctctgtggtagcaccttgatttgattgttgagtttgctgctgttagttttgtctccacataaatagaaggcaggaatcacgggccaggcacggtggctcacacctgtaatctcagcactttgggaggccaaggcgggcggaccacctgaggtccagagttcgagaccagcctagccatctcgactaaaaatacaaatattagctgggcgtggtggcgcatgcctgtaatcctagctacttgggaggctaaggcaagagaatcgcttgaacctgggaggcggaggttgtagtgagccgggatcgtgccgctgcactccagcctgggcaacacagtgagactccatttaaaaaaaaaaaaaaggcaggaatcatattccacctccacccacttcctcatttcttcagtgagatgcctgacatagtatgtgtttaatgaatgaatgaatgatatggggttctcaccttatttttgctgcttattagctatttaatggctttggacaaatgacttagctggccggatctcaattttctcattttacaagtgaaaaaaattgaggtgagtataggttataaattctgcttctcagttcatgctcccatcaccctgagatacattcctctcccacagccatgaaacgccatacaattgtcagagaggcgtttcttgtaggtattacaaagaacaacaacaacaaaatctgattctttgtagtagtgagcacagacttgtggccacatttctgggttcctgactatactgagttcagagtttacccccagaattcatatatatccagaacttcagaatatgactttatttggaaagtgggtctttgcaaatatgattaagttgaggtcatactggattaaagtgggacctaagaccaatggctggtatctttataaggagcgaagatgacacggtgagacacagagaagtgggttatgtgaagatgggggcagagattggagtgatgtctacaaatcaaggattgaatgtcaagtgttatcagaggtcaccagatgataggaaaagatgaggaagaaggattttctcctggggccttcagagggagcgtgaccctgccaacaccttgattttggacttccagcctccggagctgtgagagaataaatttttgttgcttagaaccacacggtttgtagtaatttgttcccacagctctaggaagctgagacgtggcccagccacgccatcgctcaactaccttttcgtcccccgtgtggtgatctgcccacttcagtagagctgcgatagactcgaatgacaatgaattcattctagactgtaaggtttatagactgtacaaacacaccagacacaggtttgtgttcctccatacgtgccggtcaacaccgtggtccagtttgagtaacttgaataacccagcagtcagaaagaattaacatcacagtcagtaagggctgatgtaagagcctcaggccacgagtaaacttctaacatcttctcctgttgattaagagttttgatttctacctgcaaggccgaagcaatggtcagggagtgtctgggtggccagctaggtgagggagtggatagcgtgaagggtcccacggaaggtggatctagtttctctttctgttgtttattctgcactaatttgtcaaatgttcttaagtataaccgctggtctgccaaccttctctaattttcttgaccttaataaggaccagataaggtgacaggtgaccagcaggccccagcgtcgttcggaccccgcgtgctcttcctaagaaactgtggttgtctctcaagtccattacaacccatgccctgcccaaagcttcgaatccctggacttgtttagcatctgtgtgattaggtgttattagaccagctggatgctatcgggcactcaagatgtaagttgagtaattgagacccatactgtaaaatgtatcaagcttgcctatcacagtacttaatttgcaaagtggttgaagtcggagtggggaagagtcatccccctgcgagggggacggtgttcctactgcaaacgtagagccctgggtgtctgggtgggagggcacctcgttccctgcactcccttcaggggtcaggacattcagctccagcctaggatgactgagaaacagcagaattgatcatgtggtgctaaaatgccaccttacacatccacgtgtacagatagaaaggctgtgccctttgctgccacagcgattatgacatccaggtgaattaggacttcccctgccttttattattattattattattattattattaattattattatcattattgagatagagtcttgctctgttgtccaggctggagtgcaagtggcgcgatctctgctcactgcaacctccacctcccagactcatgcgattctcctgccttagcctcccaagtagctgggacttcaggcacctgccaccacacctggctaatttttgtatttttagtaaagacagggtttcactatgttggccaggctgatctggaactcctgacttcaactgatttgcccacctcccaaagtgctgggattacaggtgtgagcaaccgcacccggccctcccctcccttttagatccctgtgtggaagcgaacgtgacctctattcttgagggaatgccaagatgtcaactcagttagtgaaattcttgtgacaattcaaagccaatttttcttacagctgaaaggggggaatcttaatgctcacgatgaacgctaggagaacccagcctgaatgttggtgcaaaagcagtgctatctggtgggcctagcatctaacagaattttagggtaaaatgttagaccctagaaataaacacagtttcactaggtggaatccttgttagacctgagtgcctcattgtattgagtttcccaaatacaagctcttaaatgagtacttctgtctcaggtttaaaagcattttcaaggcagccatccagtatactaacctctgttgaaatactgtatcggttagtgagatgcaaagctgctgtgaccaagagacgcagaaacacggtgacttaaagagtgtggaaatgtatttcactttctcatatgagcccagaagtaagaagccaggctaacggggccgctcagctccagggggaatttggggacgtgggctctttccgttttgtttctctctcgtcccccaggactgtgcttctcagattgtcttgagcatcagaaccacctggaggccttgttaagcactttcccacgcccagagcttcttttttgttgttgttgttgagatcgggtctcgctctgtggaccaggctggagtgcaatggcgcgatctcagctcactgcaacctccgcctcctgggttcaagtgattctcctgcctcagcctcttcagtagctggaattataggcacctgccaccatgcctggctaatttttgtatttttagtagagacggggtttcactatgttggccaggctggtctcaaacttctgacctcaggtgatccacccgcctcggcctcccaaagtgctgggattacaggcgtgagccactgtgcctggccccagagcttctattttggtaggtctgagtgggcccaagcatttgcatttctgacacgttcccaggggacattgatgcctccggtccagggaccacacctggaggcaccactcaggccactgtcctcgcctgcccttgttgaacttaagctgtagacacatccacgtgtgatgggaaagagctcagaggtccccaaatgatatctgaaagcccaggcctggaagcggcacccatcatttccactcattcatcgtcggcatctccattggcaagacgtgagtcacaaagccacacgtagctgcaagcgaccctggggaatatctatccaggggccacctgccctgtcaccatgacattcctgtgagaggaaggggagcatgggttctgtggacagccagcccacatacacccatgacaatatgatcattgcttatttatacatctctccctcagcacctgagctctttgagggcgggcaagtctcattccatcttacggcttcagaatctatcatagaaagcaatgtagatgctaaagtccaggtcaagttctttggttatacactgagagccgggcgcctccctcataagaatattcatggatcagcatggtgattccagcagtccatggcgcccctcaccaggcagtaagctctgtgagagcagagacctcacacctgtgcctcaaagccgagcaccactagggggctcctcttttagatgatttaattaattctagtagccacatctttcatccattgcttggaatgtatttcagatgtcagcccaccagcctatcccataccctaacaaggggttttagacaccttccctgtatcatcactgtttctcaaagtaaggaagttgttggagccatcagtacatctgcatgactctgggtcattacccttcacaacccagagttaatttagctccatttaagaactgaaacagcagcagccatggggaattaaagtctctgttgaagcctcagtttattctttcatgcacaccagagtcacgttcatagggactggctacggcgtgcccgccctatcttggcaatgggggcacagaagctaaaaaaaacaaggcctctgcccttgaggggctcccagttagctcatggccagccagtgggccttcccactacctcacaatgaaacacagcaattttttcaaagatgaatatattttcttcttttgagagggaagaaaagcttttgaaaacatcatggtaaaatttagtgctattaaaaagcagctttcagccaggagtggtggctcatgcctgtaatcccaatgctttgggatgccaaggtgggaggatcctttgagccaggagttcaaaaccggcctgggcaatacagtgagatcctgtctgtacaaaaagtttaaaaattagctgggtgtagtcctaactactccagacgctgaggttggaggatcacttgagcccaggagattaaggctgcagtgagctatgattgcaccactgcactccggcctgggtgacagagcaagaccctctctcttacacacacacacatatacacacacacacacacacacacaaaagccaggcgccatggctcacgcctgtaatcccaacgctttgggaggccaaggtgggcagatcacttgaggtcaggggttcaagaccagcctggccaatatgttgaaactccatatctactaaaaatataaaaattagctgggcatggtggcacatgcctgtaatcccagctactcgagtgactgaggcaggacaatttcttgaacccaggaggtggaggttgtggtgtgccaagatcgtgccactgtactccagcctgggcgacagagtgagactctgcctgtctaaaaaaaaaaaaaaaaaaaaaaaaaaaaagctttcttccgcaaccagataaaggaatccagtcaagagctaaattcccatcagctccaacaatctgtgttattttgagaaatagcaatgatacagggaaggtgtctaaaatcacttcctggggtaggctggtgggttgacatctgaaatacatttcaagcgttggatggaagatgctatgcaaatgccaggaggacaaggagaaattgatagtgtcttttctgatgtgtggcctctcaaagagcttctagagttagtaagttatctaaaagaggaatctaaaaagctgatggggctgtgaataacattaagggtcaggagaacagcacctctgctgtccaccactgttatgactgacccacgtgtcttcagccaggctcttcatcttggaccctgcataaggcaggactgggccctgctggtctagctcagaacttttcaaactctaacgtaaacctgaatcacctgggttaaaacgcagattcggctgggtgcaatgcctcacacatgtaaccccagcactttgggaggccaaggtgggcggatcacttgaggtcagagtttgttatcagcctggccaacatggtgaaaccccgtctctactaaaaatgcaaaaattagccaggcgtgttggctcgcgcctgtaatcccagctactcgggaggctgaggcaggagactcgcttgaacccgggaggcggcggttgcagtgaaccaagatcgcgtcactgcactccagcctaggcaacaaagcgagactctgtctcaaaaaaaaaaaaaacaaaccaaaaaacaaacaacgacaacaaaaaaacccgcagatttgacttcgtaggtttgggtaggacctgagattctgcattgctaacgagctccaggggatactgaagctgatgtctcccaccaggctgtgagtagcagcatgcagcctccccgaggtcccagccagtcctgttgagtgagagcctgagatacgggtttcatgacatacacaccaaagtgtgggatgctccagctagatgcagacttgagcagtgtgtctcaaacgcggctgcacattaaaagcacctgggaaggccgggtgtggtggctcatgcctgtaatcccagcactttgggaggccaaggcaggcggatcacttgaggtcaggggttcaagaccagcctgaccaacatggtgaaaccccatctctactaaaaatacaaaaattaagctaggcatggtggcatgcacctgtaatcccaggtacttgggaggctgaggcaggagagtcacttgaacctaggagtcggaggttgcagtgagccgagatcacaccactgcactccagcctgggcaacagagtgagcctgtctcaaaaaaaaaaaaatcacctgggaagcttcaacttccactgatgcctcagtcctcccccagagattgtggcttaaagggcctggggtttgacttgggcatcaagatctttatttttttaattttatatttttggggttttttgagaaagggtctctgttgcccaggctggagtgcagtagcatgattacagctcactgcagcctcaaaattccaggctcaggcgatcctcctgcctcagcctcctgaatagctgggatcacaggcgtgtgccaccacacccagataatttttaaattttttgtagagatggggtcttactgtgctgcccaggctggtcttgaactcctgggctcaaacaatcctccgctgcagattcccaaagcactgggattacagacgtgagtcactgcacccagctggaatcgggatccttaaaagtccccctagtggttcagatgtacagcaaagtctgagaagctctggttgcctatagagcagtggttttatcataatctccaagagagctaagacagaactctaaggtcatggaggtgggtagagcagggccttagtctctgtacattcccagaggattctgatcccaaccaaatttggggaaccgatggtagagaacagcttccccacagtgggctggggagtgtagtgtgcaacctacaggtacagccttgatccagcacctcagccctctgggtggggtcttgggtagccagagtcagggaagccagttgcctcagtggttctgttttccccagaatgtggtggaaaagtagaagaagcactgttatattaaaatacaaaaccaactccgggtgcagtggttcacccctgtaatcccagcactttgggaggtgagtggatcacctgaggtcaggagttcaagattagcctggccaacatggtgaaaccctgtctctacaaaaatagaaaaaaaattagccaggtgtggtggtgggcacctgtaatcccacctacttgggaggctgaggcaggagaatcacttgaatctgggaggtagagtttgcagtgagctgagatcgcaccattgcactccagcctgggctacagagtgagactccatctgaaaaaaaaaaaaatacacacacacacacacacacacacacacacacacacacacagcaaacaagttaaaaaaaaaaacaaactaaaacataaagcattcctggatctctgtcagagctctttacaagatcatgagtcccattcataagagctccatcctcatgacttaaccacctctcagaggtcccacctcctaacagcatcaccttggggctttggatttcaatataggaatttggggggggtaggggggacataaacattctgaccatagcacaggctgagaaaaatgcaccaagcacaacttcaaaccatctcccctgaagttgaggccaaaatgaatttggattccattttagccaggggagcaaacaggtctgtcagcttattcttgtcgggcttttagctttgctccaagttcattaggatgcctcggagatggatgccgtagggcagagcattcggaaaacccttggggaatgaactcattaccccagagtcagccatcctggagagactgtcctggagaagtcacagttacggaggatggctgcaaagggaaggcgaacagggctatgagtcttgaatgggctgtaagaaacctttcaaaggccaggcacagtggctcatggctgtaatcccagcactttgggaggccgtaggtgggaggatcccttgagcctaggagttcaagaccagcctgggcaacatagtgaaactccgtctctacaaaataaaaaaaaaaaaagtaaaaattagccaggcatggtagtggacgcctgtagtcccagctacacaggaggctcaggtggcaggctcgtttgagcccagttcaagcctacagtgagccgtgatttttccactgcactccagcctgggcaacgaagcgagaccctatctcaaaaaataaatattaaaaaaaaagagctttcgagtcgtctgatctcttctatgctaaatgtcctttggttgaaatcaaatttctaatgcatgtaagtatattatacatcaacaggctaaccatagttatctctgggaaaaggcattatcactggtctttattttctttgttgtaattatctttatctgcacattttttgataataggtgtttttttgttttgttttgttttttgctcttgttgcccaggcatgatcttggctcaccgcaacctctgcctgtcgggttcaaatgattctcccacctcagcttcccaactagctaggattacaggcatgtgccaccacgcctggctaattttgtattttttgtagagacagggtttctccatatttgtcaggctggtctcgaacttcccacctcagttgatctgcccacctcggcctcccaaaatgctgggattacaggcataagcccctgcgcccggccaggtgtgtgtgtgtgtgtgtgtgtgtgtgtgtgtgtgtgtgtgtgtattttgtttgtttgtttttgttttgtttttgtttttgagacagagtctcgctctgtcacccaggctggagtgcagtggagcgatcttggctcaccgcaagctccgcctcccgggttcacactattctcctgcctcagcctcccaggtagctgggactacaggcgcccaccatcacgcctggctaattttttgtatttttagtggagacggggtttcacccagttagccaagatggtctcgatctcctgacctcgtgatccgcccgcctcggcctcccaaagtgctgggattacaggcatgagccaccgcgcccggccccaagtgtatatttttataagaagaaaacacgtgacctgtttccatttggcataggtttggctggagctggggctccttgtgttggggggcagagcgactgggcatgaaggtttgcagggtccaggggagcagtctggtgaggcccggggtggcctgtggccctgaagttgtgtttccagtctgctctgggtcagatctgagggttctctgtctgcctcgagctccccatctccccaaggtctgatatggagtccccaggcttttggggaaggctgctgagtttgaggagaggggaaccatgggacagggtggatggggactctgggagcaatgccagggagtccccacacctctagacatgtctctggttgtgctttcaggtgacctcaaagcagaagctctgaattcacctctcatctgacgactgacagctgctgccaccgccagcctctgtcccttgcccaggcctgtcacacggctgcctctcagcaggtaaggagagtgacttaccctgtgtaggggcaggaggacagcaggtgtcttcgccaggagcatgtgtgtgggctggggtgagactcagttctcaggatccttgatggtggccaggtcctcacagcatcactttcttctagcaatcatcactgtcctgtccccttctcccaccctccacggcagacacggggcccttagaaaccttttgccacctcctgttatcccctatgtgaatggatgtgcacctgttgggggagcaggggaggagaactgagccatccccgagggctgctgggccttggctggggaaccgtgctgtgtgcttccctgtgggaaaagagatgctattgcagtgagcttccttgttcagcaaggatgaaaggaggtccaccactcacttcctccccactcgcagtttaagctgctgggtcccttcaggctcagggatagctgtgagaggtgacagcgtgctggcaaccctcacagcccttgctcgctctcggcgcctcctctgcctgggctcccactttggcagcacttgaggagcccttcagccctctgctgcactgtgggagccccttcctgggctggccaaggcgggagctggctccctcagcttgcagggaggtgtggagggagaggcacgggcgggaactggggctgcgcacggtgcttgcggaccagcgtgagttctgggtgggcgtgggtttagcggccccgcactgggagcggccggcccgcaagccccgggcagtgaggggcttagcacctgggccagcagctgctgtgctcaacttctcaccaggccttagctgcctccctgcggggcagggctcgggacctgcagcccaccatgcctgagcctccccaccaccatgggctcctgcacggcctgagcctcctggacaatcaccgccccctgctccatggcacccagtcccatggaccacccaagggctgaggagtgtgggcgcatggcatgggactggcaggcagctccacctgtggccccagatgggatccactaggtgaagccagctgggctcctgagtctggtggggacttggagaaactttatgtctagctaagggattgtaaatacaccaatcggcactctgtatctagctcaaggtttgtaagcacaccaatcagcaccctgtgtctagctcagggtttgcagggtttgtgaatgcatcaatcgacactctgtatctagctacgctggtggggacttggagaacctttgtgtggacactctgtatctagctaatctagtggggacgtggagaacttttgtgtctagctcagggattgtaaacgcaccaatcagcaccctgtcaaaacggaccaatcagctctctgtaaaacagaccaatcagctctctgtaaaatggaccattcagcaggatgtaggtggggccagattagagaataaaagcaggctgcccgcgccagctggggtaatctgcttgggtccccatgcacgctgtgcaggctttgttcttttgctctttgcaacaaattctgctgctgctcactctgggcccccactgcctttatgagctgtaacactcaccacgaaggtctgcggcttcactcctgaagccagcgagaccacaaacccactgggaggaaggaacaactccagacgcgccgccttaagagctgtaacactcaccgtgaagctctgcagcttcactcctgagccagcgagaccatgaacccaccagaagtaagaaactccaaacatatccgaacatcagcagtagcaaactccggacacgccgcctttaagaattgagaattgtaacactcacggcgcgggtccgcagcttcattcttgaagttggtgagaccaagaacccaccaattccggacccagctgtcttttgggcattgtccggaaggccggctgtagtattctgcctacagatacttgtcaagtgctcatggacagaagtcgtagttggggaggatggctgcaaaggcacaatgacatttggcttccagaaattctaagtactgtgccgtgagtcaggtcaggtcagaagcactggggatggaaccgccttgcattggtctcccagccccaactttgtatttactgagttgtgtgctgcaagatgcagcccatcagaattttacagagcatggtcggatgcaggcactcatgcctgaattccagcaatttgggaggccaagacgggtggatgacctgaggtcaggagttcaagatcagcctggccaacatggtgaaaccccatctctactaaaaatacaaaaattagctgggcatagtggtacgcacctgtaatcccaactactcaggaggctgaggcagaagaattgcttgaacctgggaggtggatgttgcagtgagcagagattgcaccactgcactccaagcctgggtaaaagagcaagactccatctcaaaaaaaaaaaaaaaaaatgttacagagcaaaccggggtctgcttgcccagcgtggtaagaccagatatccacaccgaggtgttgcagtggaagaaaggagggtgtttaattgctgggcaccaagcaaggaggacccggcggctcatgctcaaatcctgaccagtagcttgcaggtaagggtttttaaagtcggaggtacatttcaggaaagaagttacaggtaagattgtaaaatcgacacatggcggttgcacagtggttttgaccgaaaagggcggctatcttcaagccaggggttacaggtcgtggatggatttaaagatcttctgatttgcaatcacttaaggaaaagaagctttgtttaaaatgttggggtcggcaaaaaaaatgttagctctggcttgtgggcaggactccctccaggaccctcaggaagaaatttatttatttatttagagataagagtctcattctgtcacccaggctggagtgcagtggtgtgatcttggctcactgcaacctgtgcctcacaggttcaagcaattctcctgcctcagcttcctgagtagctgggattacaggcacgtgccaccatgcctggctaatcttttttgtatttttagtaaagacggggtttcaccatgttggccaggctggcctcgaactcctgatctcaagtgatccacctgcctcggcctcccaaagtgctgggattacaagtgtgagtcactgtacccggcccaggaagaaatttagaaccaaaagcagcagtcagagttgagtcctcagttccccctcatctgaggtctctgtgccagctgattcattccgtagggggccgggtttctgaaaaacaactcagagacatatgttaagatgttatctttagtttctatagggaaaccaaacatctcgtaattctagcttccttggctattgttttaagctactattaccttcttgcttatcaagtcacttatttacttctcagggctaacttggtgctagcttggaatttcccttgaaggaactcaagattttcctttatttccctgctgggggtcccacagacccgtacaacgggttctctgctgcatctcaagaaacccccggtgcgacctatgtgcatgagcacattcctgtatacctgggaagaaagagctgtgtgagcacgtggccccaggtgccacccctaagcaaatggtcccttttcccccttgcctcatcttctggaaagccgagagcccagtcagtgttgccggtagccagtgtgcgtgtggagatttgttgcagctcctctctgttcctacttccatttttcttcttgggtccaggtgggatgtgcagacgcatgaatgtctgtgcagggaggcatacctgagtccccatggaagtacatatagcatccagacagtctcagaaaggcaggggcgttattcaggtggagcctaaagggtacctggccaggtaggggaagcaggacctccgaaaccttcttatagggctctatcttcaaagcatgtggttgtcttcagcaccattggcaaaagccattaccttctcccccaccagggatttcctgctttttttgcccacctcagggaaggggctccctcctgacacctcactcccaggttaagcaaggttaggatcacccaggggatgagtctgttccaggagagcaggacagaccaagtgtgggggatgaaatcctaagcgccactaggccaaggtgggtaatgagccaggagcagtggcggagcagtgcttccttccactcctgctgaggagcgctgggaaattatgttacctaacctccttgaatatatttccttatctgaaaaataagaggattggaaccggacctccatgttcccctgcaataccaacagtcagtgattcagagccttgctactcaaagtgtggtccgtggaccagcagcctcacgaagctcgttagaagcgcaggatctcggcccctaccccagagccactcgatcaaaatctgcattttaaaatcctcaggtgattcatatgcacgttaaaattcaaaaaggactagttgagacagcccctaaggtacatgagacatcctatgcgtcccatgcaaggtaatttggacactaaggaatcacgaagtagaagtggctcacagccagcagtggtgctctcctttggtacgggccagaatcagcctgggagattgtaaaatacggacgtccaggtgtgcagggccacagtgctgggagaagccagagcagccccttggagagagaaaacacaaacacgcacacatgaaatcgcttaaggatcactctgggcaacaagggtgactgtcctagacacagaatcagggtgagccgagggcagcagagcagagaccgtggagcaggcctgtttacccagtgctcccgaaagacggcttttcatccttacattagaatctcttcctttagttactgaggggcctctcaggggaatctgtggttacctctccaccttctttttttttccagacagtctcactctgtcacccaggctggagtgcagtggcgcaatctcggctcactgcaatctctgccttccaggttcaagcaattctcctgtctcagcctcccaagtagctgggactacaggcacccaccaccatgcctggctaatttttgtatttttagtaaagaggggatttcaccatattggtcaggctggtctcaaactcctaacctcaggtgatccacccacctcggcctcccaaagtgctggaattacaggcatgagccaccacacccagcctctccaccttcttaagcaagaatgcagaagattgcagggagggaagactgttgatgttgttgcttgttttaagatggtcaggtgcagattgcataaatatatttgcatattctgaggaggaaaagcgccagagacgtggacattacaggatggaggggtgagtgtagggcagatcccttggggaggggagcggtctactgacctgtgaagtgttagccttggctgagaagatgccttcagctgcaagtgacagatgacccaacaaatatggcctgaaccatgaggagtacattatctcatttcaaggatcaggaatagacttccaaggacccacccagctcaaggatccaggtcattttctccactagactagtgaccgtgtccttggttgattccccagtggttttatggctctggcagctgcaaacacaactcaaggtggccaaagacagagctttctccccttgtccctccgtcggggaggaaaaccctccctatgagtccctgcagatttcccctgatgtcccattgaggaggacaaggtcacgttgtcaggttcacaactataccaaatgccctgcttggggtcaggttccagcccatgctgaggttcgaggggagtgggcggatgggcaggtagctgaaggaacactcgtggggccataagcaggtgaaatgtagttttactcaacaggtctctcagcagctgactcataccagctctctcacactgtccgccttgactcagctgtctgctctggctttgtggctcctctcagcagccagctcccacacatagctgcatggccgactctcccctgccttcggggtcagcagcttaactctttctctctctgggcacgagctgaactgtgctgtgccctggctccccctgtctacctgcaaaatggacagctttggctctttctctgggcgccagcatgcctgtacagtgtcagcagggcaataatagcttttacaaacaacagtggcttagagccaaatgatgagccttccgatgttatggctatatggctgtgatgacaagtggagttatacgcctgcgctctaaacttgctgagtcactctggatgtttacctcagcctatccttgaccaaagcacagccatgttcctgacacgcgtgctctggccttacagcaagggaggcaagaaagtgagtctgccattgtcagcccctggggaggaaggagggccctgccggcagggcagcaagtcgggagcagctgtgggtggtgtcctacaggctctgctgtggaggaagagctgctgccctgagtggaggcaaggatggatgtgggtgtggagtggagtaggtggggtggggaacattaaggagggttctctgctaatggccattctgtgtagacagaggggctgaggtcctctgctgaggaggaaaggtcagaggtgatgaggaagtgatgaagactggaagaagaggatgaagggagggggagatgatttggggcaaggagtcctattgccaggtagctctgagggcctcgcagaggctggattgtggatgtctgatgggcagagtttagtggggggggtctctccagcagcgctgagcagccccttcgtgagtgtggagaggggaggagttgggtccataccgaagcaggttttagggacagaggaaagggccagagaagcagacggctcttgggagacagtggtggtagttgggtcatgctgttgaggctaagtatggagccaggggaggaggaagcagcagagaaggggctgagggagaagctggggtcggagagcacagcccccgctgggggccaggtccaggggcctcggctgtgggtggcagacatgggctggagagtggacgcacatggagggcctgagagggaggccatggagggatggaacccccagagggtcacccacccgcttattttatctccagcgcacaacaaggaaagcacagtgcgctggtgggaccttcccacaggaagcctccagccagaactctcctctgcggagagggtagggcatgtggaaaacgagcccttcttttgaacagcggaagaatgaggaagggctgagggatcagggccgtctgaacagcgcctgggagggagagaggtgggcgcagctgcaggggcctgacgggactgagagtcggctctgctgctttccccggtaacgttagctgttccctccccgccacatgacccacctgtgcacatgtgcacacatcctcaaggactcacacttatacccacacactcacactccagacacaaacacaccccccacaccctctcacacactccatacacttacacacacgttcaccccgcatgctctgagacgtgcctgtattcacactctcaccttcacacacacacacacccccaccccacactctcccacactcaccctcacccccaccctgaaccctgacccacacccacacacaccctcacacacagacacccaacactcgcacacataccccacagtcacacacacacccaacaccctcccacactcacactccaccccacattcacacaccccaccccatgccctcccacactcacactcaccgccaccccacaccctcccacattcacaaccccaacccacaccctgacacacacccacaacacacccacctcacattcacacacccccaccccccatccacactctcacactcaccccccaccctgtaccctcacacacgctcacccaccctcacacacacacccccacccctcaccctcatacatgctcacacacgtgctcacacacacactcacacacaccccacccctgaccctcatacatgctctcacactctcacacacacacacccctcaccctcacacacaccccaacccacaccttcacacacactcacatacactgtcatcacacacaccccacctcacacactcacactcacccacaccctcacacatactttctgtcacacacactcacccccacacactctcacacgctcacccccaccccacactttcacacactcctactcaccacagactccctcacacacagtgcagagccctcccctcctccctttgccctgctccatgtcctcttggcttcacccctgctgatcccaaactctacctcctcctcccctgaacctcccccaactcctaaatgcccaagtcaaagacaaggggcgagagggatggagtctagaatggggagagcaggatcaagatttgaaggcagtcactgtagggtctgtagtaggctgttttgtgttgctgtaaaggaatacttgatactgggtaatttctaaaggaaagaggtttaattggcttatggtcctgcaggtggtacaggaagcatggcagccagcatctgttcctggtgaggcctcaggaagcttccactcatgcagaaggtgaagggggagccatactatcacacagcaagagtgggagcaagagagacagcaggaaggcgacacacacttttaaacaaccaggtcttggatgaactcagagtgactttcacttatcaccaaagggtggcgctgagcccttcctgactgatctggccccgtgatccagtacctcccaccaggacccacctcccacattgggaatcgcatttcgtcatgagatttggagggaacaaacatccaaatcacatcagagtccttttttcattgcatcagctgggaagggttgggaactagactgtgtctcctccctcattttgtgtagacacacagcaacgcagacacacatcagcacacacacacacacggagagatggccacacacagactggcacaaggcctgcacgagcaggcacgtgggcacatacagacacacccaaggacacaccaacacatgtgcaggaacgcgtgcacagttctgctgagtgggggatgaaggggatgttccttggatttcaaagctcccaacttgtcgtgattctccttcccttgttgttgagttaaagttccaaactaagataaggacacacatctattaaactctgatttgggtggctgatctgtcttctaacgagaatattttacttttcaaaaactgcctttggacaaatgtagttgccattatgcctttctgggccagagaattagttcatatgtgattaaaacccacagagagagtgggtcccatacactaacctactggccaaatagaaaatttcttaaaaattctaaatgttttgtatgaagcaagtataacattgatatttaaaccagatgaaggtagcattaaatgacttaatttattacttaagaatagtactgaattccaaaattacttaagaatcttgatgcaaaaattatcagaatgttaccttatagaatttggtaatatatcacaaaagtaaatatgcatttacctttgacccagtaattccagaaatgtaccttgaagacacacccccacaataatatgagaatatagatgtaaatgcccgtaaatatatggattgaaaaatatacagtatatccacacagtggagtactgtagtatgtagttctaagaaagaatgagtatgatcttttttgcatatcagtgaactaatatgtggtgctttctaaaatgtattgctaaatataaaaacaaagttcaaaagcacacacacgttatctttttgtgtaagaaagaaggagaaatgagaaaacatatatgtaactgcttactttctaagaaaataaacacaggaccagcctgggaaacatagcaaaaaaaaattttttaattagccaggcatggcggcacacacctgtagtctcagctactcaggaggctgaggcaggaggatcgcttgagcccaggagtttgaggctgcagtgagctgtgattgcaccactgcattacagcttggatgacagagaccctatctcaaaaagaaggaaggaaggaagaagggaaggggaaggaaaggaaaggaaaggaaaaggaaaaagaagcataggaaagaatagtctggagtccaacgtgatgggaaggaaggaagaccagagggagggaggaagggaaggagggagggaaggaaggaaggagaaaaaagaagcataggaaagaatagactggagtccagtgtgattggttgcccataggaggtaggtgggaggggagaaaaggattggaatgggcagtgaaagtgacacctgtgtgaatatcaatttgcatcattttaactttgaaagtatggttgctgctttacatactcaattaaattaatacaataaagtccaacagttgtgaggtgggaaaaaaacctaaaactgaaataaaatataaacagaagcagacgaataatagatggtggccagggcctcttcccacctcatctgtacctttgggagccagtgtcacttgtgtttctgctctcagtgacctgtccccagctctcaggctttagttttaggcttcctttgaagcagattctcattagacggggcaattgcaattgtgatgtgtgtagcacatgctttctgtgaaacaggtagcactacactggtcttagtcacggggcatcaatgtgtgtagggttagggagaatttcttctgcctccctctagaaaataaatctatgcttgggatagggaagaaagagagagagagtgtgtgtttgtgcgtgtgtttattgttgaaaacaaactctcaacacaaagtctgtaaactttttggaaggacaacaaattaaaattaataaagcaattttattcattagaaatgtgtgttatgagccatagattgttaggagaggccatttgagacactcggctaggcttcaaagctttgagtttgagttctggatccacaaatgttggctgtaggatctttggctattggtttaatttctctgatttttgcactttcttcctttgcaaaatagaaattaatattgtcccaccaactgtatgggctgctagagcaatgaatgagcaaacgtgtgtgaaagtgaatgatgactcaaagcactatacgaatgtccaagcattacttatggtcgtggtggtgatggtggtggcagtggtgggggtgatggaaaagtcattctggaaccttctgttctcttctcactgtccccgggactgagaaagtttttccaaacaaaagcatcatgtcttgctcctcttactcgaatgaggcattcctttctcttatcccaggagggttttctaccaaatgctgtccatgctcccagatgctccctggcttggacagagaagctgtaggtggtgggaggtggggttcccctacccttggaagagcagctcttctaacccttttactttggttacttctaggggcagtagaatgaaagagggcatgtctaataacagcaccactagcatctcccaagccaggaaagctgtggagcagctaaagatggaagcctgtatggacagggtcaaggtaagcatgcatgcgtcagccccaccctccgcccgaagctcagctcaaaacattcctcctgcttccaaagcagacttgtgagagttaacacgtcacccagcagagcatgcagccaaccttggcagctgtaacatttacaaatgagtgtttgcttcacagttctaagtgtgcccaaggattcaaaggatgcaaaatacacagtgtgcatgaattccataaggagtctccaaaaatagactcataattcatctcggctctatttagctccgttgtcatgccaataagcaagaaagagagtttagcaatgagatcaatcacttttctgctgtgatacagtgcctttgaggttcaacaacatcggatattttgacaggattattgttgagggtggagctctgaaccatgcctgggtgtgtcaaatattcctttggtgaaaatgaagaaaggttccagacacctcccgttgtattcatttcactgatgagtgcaggtctctccacgctgggaggactgcagcaagatgaagccacctcttctccagatgccactcagaggtgagcagaaggccaggcaaagcatgtggctctgaacgagtccgtgagcatgacgctcgttgactgtaatagagttgaaaggaaccccaactctggtgtcgggaacctgatgccaggaagctccatgtgtctgtggtcttggggaacacaaatcagaggtctcacctgggcatctgggattcaaaaaacacagaatccatggcaacgggcgactcctgaagccttctatggacagagcctccctgacccctcccctcatgctagtgtatggctagaaagcaccaatactcacctctgtgtggacagttattcttttcccctggagctctgggggtacaacctctccaaggaggcagaaaatatgcacggaaagttacatgagggtatatgaagcaaggaaggaatccagcgtgatgtaagtcagtatcaccggacccatgttactagagcatctacatctcatacataccgataccaactgcaaattacatgtcagtccttggtctctagactagaggagggagcaagtttagaacccagaaaacaattctaagacacagcgggtcccaatagcatagaaaggggtttcaaatgaaagctgcaggcatcccgtgctccagaagtgcagacaggaaaaaggatgaggactgcagtgaaaggcattgctgagcacctaatctatacttgaagggtcctgggagagaaatgtgaaggcgacagtctcctccgtatggctcagggaagacttctcagagttgtgagctatggctggctctgagctgatagtggaggaggaaaggccggtgtgagctaatcacggctcgtgtggagcagctgggcagcgggaggagctgcaggttgtgctgggaagagagctatgggaggagggcgccatgcacacaggtgcggaagccacagccatgaggtgacaggtgtgtgaggtgaaccaacctgtaagcaatagacggagttgtcagaggtgaggaggtagttgaagctctgagtaatcaagagaggcaaggaggggcagaaatcgggtacagtgtggagcagacagcaaagatgcgatcggggaggcaaacacaccaagaaaatcaacagaacatggagagtaaacgtgggaggcactagggagagagacgttagaatccagctgtcaagccccatggccagagacctgaaaagacagtgggccccagtttgggctataaggcagttctcctttgcccaggcgttctcttctggcaaggaagataaattctgcaatagcatcttcacctgccacagacaccgccccaggagcccctgtgaggaccgggtgtcttcaagaatgaaggcttcttcaagagtcacttaggcacacacactgtcactaaaagaaagaggaaagtcaaagacaaatgagttactgtaggagttcattctcacattgctgtaaagaaatccctgggactgggtcatttataaagagatttaattggcctgtggttccacaggtggtccagcaagcatgatgcctgtatctgcttggcttctcagggcggagggtgcggaggcctcaggaaattgaaaatcatggcagaaggtgaagggtaagcaggcacatcttacatagcaggagaaagagagagaagggggaggcgatacacaccttttttttttttcttttttgagacggagtctcgctctgtcgcccaggtgtgatctcggctcactgcaagctccgcctcccgggttcacgccattcttctgcctcagcctcccgagtagctgggactacaggcgcccaccaccacgcccggctaattttttgtatttttagtagagacggggtttcaccgtgttggtgaggatggtctcaatctcttgacctcgtgatccgcctgcctcggcctcccaaggtgctacacacttttaaacaaccagatctcttgagaactcactcactattacaacaacagtaccaagggagatggttttaaacccttcatgagaaaccacccccatgtccaatcacttcccaccaggccccaccttcaacactggggattacaatttgacgtgagatttgggcagagacacagatccaaaccatatcagttactcaggtgatattcaatcaaagggataggcaggccagatgtggtggctgacgcctgtaatcccagcactttggaaggccgaggcaggtgaatcacctgaggtcaggagttcgagactagcctagccaacatggtgaaaacccatctctactaaaaaatacaaaaattagctgggtctggtgacgtgtgcctgtaatcccagctacttgggaggctaaggcagaagaatcacttaaacccaggaggtggagtttgcagtgagccaagattgtgccactgcacttcagcctgggcaacagaggaagaccccatctcaggaaaaaaaaaaaaaaaaaaacaaaaaacgggataggccgccatgttgctgtgctgaccataatggaaacgtgaaagcaagattcctcagggggcctgccagaggctaattcagatcctgtggtaattccagggagtaggccagtgacagctgtgtcagatttggttcagaaacagagttggtggaaacagaatgttgtcattgaagagacaatgcctgaggagagagctgaacctaggaaccgcatctgtgccaaagatgcgtgagcacacatgggtggtttttgtttttttcttgcttggacacccttgaacattaatttttttagttgtggtaaaatatatataacatacaatttatcattttaaccatttttaaatgtacaattcatcagtattaggtacattcacaatattgtgcaaccatcaccagcatccacctccagaactttctcatcttcccacacagaaactctgtacccattcagtgccaactccccattcgccctgcccatgcctggtgaccaccgttctacctttttcctctgtgaatctgactacactaggtatctcatataagtgggatcatacagtatttatctttttgttcctgtcttatttcacttaacttatcgtccttaagatccatctatgttgtagcctgtatcagaacatcattccttttcagggctgagttgtattccattgcatggatagaccacattttgttatccattcatccattgatggacacctgggttatctccacctttggactattgtaaataatgctgttaggaacatgggtgtgcaggtatctgttggagtctttactttggttcctttgggtacccacaagtggaattgctggatcatagggtaactctatgttcaacctttttacctttttttttttgagagatggagtctcactctgttgcctgggctggagtgcagtggcatgatctcagctcactgcaacctctgcctcctgagttcaagtggttttcctgcctcagcttcccaagtagctgggatcacaggcatgagccactacacccagctaatttttgtttttagtagagacagggttttactatatgttggccaggctggtctcgaactcctgacctcaggtaatctgcctgtctcggcctctctaagtgctgggattacaggcctgagccaccatgcccggccttatgttcagcctttggaggaactgtcacgctgcttacacaggggcttcatcacgtcacgtcatcaccagcagtgcacaggaattcccgtttctccacatcctgaccagcacttgttttctgggtttttttttattaatgtatttacttttttttttttattaatgtatttactttgacaagtaaaaattaaagtcactcactatcatgacgacagtactgagggggatggtgtatatttatggtgtacaacatgaagttttgacataggcatacattgtggaatggctaagtcaagccatttaatgtatgtattctctcacatacttagttttctgtggtgagaacacttaaaacctattctcttagcaattttcaagtatacaatacattgttattaattgtagtcaccatgatgtgcaataaacctctcgaatttatttcttctaactgaattttttttttttttttttgagatggagtcttgctctgtcacccaggctggagtgcagtggcatgatctcggctcactgcaacccctgcctcgcgggttcaagcaattcttctgcctcagcctcccaagtagctgggattacaagtgtgcaccaccgcgtccagctaatttttgtattattagtagagacggggttcgccatgttggccaggctggtctcaaactcctggtctcaggtgatccgcctgccttggcctcccaaagtgctgggattacaggcctaagccaccgcagccagccctgaaactttgtgtcctttgaccaacatctctctaatctcaccaccccacagcctcaggtagccaccattttactctctatttctataaatttgacttttttacactccacatataagtgagatcatgcagtatttgtccagtgcatggcttatttcatttaatataatatccttcagggttacccatattttctcaagtaataagatttccttcttttttagggctcagtagtattctattgtgtaaatataccacatttgctttatccattcattcgctgatagacacttaggttgattccataacttggctattttgactaatgctgcaatgaacacagaaacacagatctttctttgacatactgatttcgtctcctcgggttatatacctagtagtgggattgctggatcctatggtagttctatttttaatttttgaaaaacatccacagttttccaaaatggctgtactaaatttaattcccaccaatggcataccacggttcccttttctccaaactcagcaacacttgtcatcttgtgtatttttgataattgccatcctaacaggtttgatgtgatatcttgctgtagctttcatttgtatttccctgatgatctagtgatgtctgtttttttaataatagtcaccctaatgagtatgaagctcacacatggttttcagccctaggcatccctggtttcagggcacagtgtggctttgcagaaaaatctatgtgatgcaagacttgaaagaaaaaaaaagaaaaggtgcatcttggtatcagccagactatacgaatgtggaaagaaaggggagctgtcaaggacactcccgatgacctcgtcaaggaccttgaggagggaagagagaggaagtcaccagggaaaggcaatggcctttctgggatgggtacgaggttactgccagagaggaggaaggaaagagggaggctggataggaaatgacagagggcagccctggggaaggaggagaggagcagtttttagaatccactgaactcgcacacaccatgtcagaaacaccagggccagatgacaacactgagatgggccgggcgcagtggctcaagcctgtaatcccagcactttgggaggccagggcgggtggatcacgagttcaggagtttgagaccagcctgaccaacatagtgaaaccccatctgtactaaaaatagaaaacttagccgggcgtggtggcacgtgcctgtagccgcagctacttgggaggctgaggcaggagaatcactcgaacccaggaggcggaggttgcagtgagctgagattgcaccattgcactccagcctgggtgacagagcaagactctacctaaaaagaaaaaaaaagaaaacactgagatggattttccaaggaagaggaaaaggccaggcccatactgactgcatagtgagaatgcctagcaggtgaatgtgcacacgacgatagggcaggctgcatgggaaccagctggagggtccatggtaggaatcgtggcaactcccaggcccacagagctggcttccaggtgagagcacggcagatgggaacccaaagaggacatcccaggcgagggcaggtaccagcaggaaaccaaaagggagcccccgggatggcatggtatgtagccaaccatagggcccaccaccaggctctgtagcttattgtgctcaggagagtttctaaggaggaaggaaggaaaagaaggcatttgccgcccaggaaaataaggggacatctgtcactgggaagagaaaggaaaatataactgcattaagcagttctggggttgcagaagtaagaaagagtaatagtgccaattcagagagctttgcacgattcatggaggaaaaacgtagctgaaatattcattattgtcttgaagttctgcttgtccccatttgcacaaaagcacaagtgcaaatatagacttcagtaggggatatagattgaggcattacaccacaaagcccacagcaagatcttaaacccacacacagtgtggttcagagacctccttcctacctccattcatttaatatttatcgagaatcccctgctacttggcccttctcccaaattaccacccccactccatgtgactcttcatcttgcctagaagcacatcaaagcatttcccaacaaagatgtgtgttctttgcaaactcttatcagcagctaaaaacaagtaatgtcctccaggttgtcgcaggcatgaggaggattcaccatagaacctgtatagcctcacaaaaagcacaaagcttggaaaataatacccaggtttctaaaaaagaaataaagagcacatgaaagatgaattttggaaactatatgggttctaagggaaagaataccatcatagccttattctttttctcacccatcagaagttcaaacaatctaaaactctattagaaaagtacatatatggttgggcgcggtggctcacgcctataatcccagcactttaggaggcagaggcaggcagatctcaaggtcaggagatcgagaccagcctggccaacatggtgaaacccctccctactaaaatacaaaaaaaaaattagcccggcatggtggcacgcgcctgtagtcccagctacttgggaggctgaggcaagggaatcgcttgaatccgggacgcggaggtttcagtgagcccagatcacgccactgcactccagcctggcaacagagtgagactctgtctcaaaaaaaaaaaaaaaaaaagtacatatatgacattgatcattaaatagagaaaatccgacaagcggttatggcaggtctgagctgagcagagtgtaagaggcctcactggagaaaacagtgtctgaagccagcctgcacagccacaatgcagagttcagccactgagaaggcgttctcccaagggtgaagtgcagcgctcccaggcagagtcaggacacaggctctcaggcgggttccacgctgccttccacgtgccatccctcagggtgccctgattctcctgccccacaggaaagggaaattgctgacattgggtcaatcctatgtctgtggctcatgaggctctggggtggacagacacccttgagcaagcccaactctcagccagggactagaagcaactgatggaatggccaaggaaaactggccaaggaacattctgcccagtctcatttgtcctgggagataatttcaacatccgtggggtgggtgtgctcacaattcctacaagggctgcccttaggctgagattaattttgtgagcacaggctttatttgctgagtattgacagatcaatatattgttgggcctgcgttctatagactactgaaaacatgagtgcaggaagagaggaatttcaggtgatggatgcactaaaagttgaagcccaagaaacgcaggagaactggctacacatggcccttgacttacaatggggctacctctcaataaacctattataaattgaaagttcaacttacgacattttcaacttacgatgggtttatgcggatgtgaccccatgggaagtggaggagcatactgaatgcgtattgctttctgccactgtaaattcgaaaaaatcattcagccagaccatcgtacgtcagggaccctctgtatttagagtgcgatagtgcagaaagatactgacatcaaagaaaagagattgtggcgaggcgcagtggctcatgcctgtaactccaccactttgggagtccgaggtgggtggatcattcgaggtcaggagttcgagactagcctggccaacgtggtgaaatcccatctctactaaaaatacaaaaattagctgggtgtggtggtgtgtgcctgtaatcccagctactcgggaggctgaggcaggagaatcactggaacccaggaggtggaggttgcagtgagctgagattgcgccactgcattccaacctgggcaacagcgggagactccatctcaaaaaagaaaagaaagaaaggattgtgtcgtgacagatactggcagttattaacaatcttccttcataaaaactaagaaaaatgtagagaaaacagaaaaagagaaagagctattttttaaaagggtataatttggtgcttaaaagaaaggagaacaaataatcaaaaaaataggaaatgcaaggacacaaaagttgaatttacaagtctttgagatatttctcgtatatactctctttattccgttgataatttatttaaaaccataaataaatgagagtggctcgaacacatacctaagcatggagcttacttaaagcgcttccaacaaagaagcagaacatctggtgggttgaagtgagaatgtgaaaaagtcatatccttttcaggggcctttaatgcttgttttgaaaatgatactacttctctgttcattaaaatggtacttgcttttttgttgttgctgttttttgagatggagtctctctctgttgcccaggctggagtgcagtggcgtgaccttggctcactgcaatctctgcctcctgggttcaagcgattctcctgcctcagcctcccgagtagctggaattacaagcctgtgccaccatgcctggacaatttttgtatttctagtagagacggggtttcaccatgttgtccaggctaggcttgaactcctgacctcaagttatcctcccatcttggcctctcaaagtgctgagattaggtacttgtttatttttaaaatttttgaaaaatgctgacaagtataaagaggataattggaatggtctataaccactaccttttgatgtttttccatctatatttgttttacatttattataaaactggggccataatgtacacttattgcttttttataacctgatatatcactgaacagtatattgtgatcatataacaaggtcaggaaatattctcctaaaatgtcatttttaatatctattttcccccgatgtacaataattaaccagtctcctatccttagacatttcagttatttccaattgtgagtctttttttatttttccttttttttgagatggaatctcactctgtcacccaggctggagtgcagtggcacgatctcggctcactgcaacctccgcctctcgggttcaagtgattctcctgcctcggcctcctgagtagctgggactacaggcgcccgccaccacacccggctaattttttgtatttttagtagagacggggtttcactgtgttacccaggatggtctcgatctcctgacttcgtgatccgcccacctcggcctcccaaagtgttgggattacaggtgtgagctaccgcaccgggccgtgagtcctatttttttttttatcatactttaagttctagggtacatgtacacaacatgcaggtttgttacatatgtatacgtgtgccatatttggtgtgctgcacccattaactcgtcatttacattaggcatttctcctaatgctatccctcccccctccccccaccccttgacaggccccggtgtgtgatgttccctatcctgtgcccaagcgatattgttcaattcccacctatgagtgagaacatgcggcgtttggttttctgtccttgcgatagtttgctcagaatgatggtttccagcttcatccatgtccctacaaaggacatgaactcatccttttttatggctgcatagtattccatggtgtatatgtgccacattttcttaatccagtctatcattgatggacatttgggttggttccaagtctttgctattgtgaatagtgccacaataaacatacatgtgcatgtgttgtgagtcctacttttaaggaagcactgcagcaagcatactggtagataaaattttcatgtctgattatttctttaagataaattcctaaggactgaaaatctcttggccaaaagagagatatatactgtcaggcactacataaaaactgttttagtcagcgacagactgcatatatgacggtggtcccataagattctagtagtgtatattttttgacccggcatggtggctcacgcctgtaatcccagcactttgggaggccgaggtgggtagatcacttgaggtcaggagttcaagaccagcctgggaaacatggcgaaaccctgtctctactaaacgtacaaaaattagctgggcatggtggcgcacctgtagtcccagcttctcagggggctgaggcatgagaattgcttgaacccaggaggcagaggttgcagtgagctgagaacataccacctcactccagcctgggcgacagagctagactctgtctcaaaaaaaaaaagaaaaaaaaaaaagagcacggtggctcatgcctgtaatcccagcactttgtgaggccaaggtgggtggatcacctgaggtcaggagtttgagaccagcctggccaagatggtgaaaccccgtctctactaagaatatgaaaattagccaggcgtggtagcgagcgcctgtaattccagctacttgggaggctgaggcaagagaatcgcttgaacccgggaggcagaggttacagtgagccgagatggtgccactgcacatcagagcgagactccatctcaaaaaaaagatatctagtactgtatttttaccttaccttttctgtttagctgtttagatacacagatacttaccattgtgtgacagttgcctacagtattcagtacagtcacatttctgtaatcctagcactttgggaggccaaggcaggaggatcacttgagctcaggagtttgaaaccaggctgggcaacatagtgagatcctgtctctactaaaaattcaaaaaagtaagctggatgtggtgcacacctgtagtcccagctacttgggaggctgaggcaggaggattgcttgagcccaggagttgaggctgcagtgagccctgatcctgccactgcactccagcctggatgagagagtgagaccctgtctcaaaataattaattagttaattaattaacatttaaaaagtttgtagcctaggagcaataggctataccctgtaatctataggctataccctattgtgtaataggatagaccatctaggtttgtagaagtacactctgtgatgttcttacagtgatgaaatcatctaacaaggcatttctcagaacatatccccgtcattaagcgacacatgactgtatacacaagaaagtgtttgagtcaatatcaaatttccctatagaaagggataccaatttatatttttatcagtaatgtgtgtgttttcccacattctccccccaaacaccattcattatgccatgcaaatgtaacagatgataataatagcggccaacatttactgagtgcttaatacgcgttgttctgaacaagtcacattaaattcattcaattctcacagcagtccaatgaagtgggtactctgttatatgaaggaggaaactgaggtctatgaagattcattaacttgcctaaaattcagcagctgaaaagtgatgagagcccagggataggaaaccagggagtgtgtctccagagccttcgctctcaacctttatgtcataccatctcttgattgctgacgcctcgttattttaacatacatttcattgactgttactggggttaaactaattttgtatgttaaattcttcttttgctaattggctattcctaccgtttacccaattttctattgtagtattgtagaatattttaaggccagcacagtgactcacacctgtaattccagcactttgggaggccaaggcaggaggtttgcctgagcacaggagcttgaaaccagcctaggcaacatggcaaaaccctatctcttcaaaaaaaaaaaaaaaaaaaggtatgtatatatatatgtgtgtgtgtgtgtgtgtgtgtatatatatatgtatacacacacacacatatatacatacatatacacacacacacacacacatatatatatataattagctggatatggtagcatgtacctagctagaggctgatgtgggaggatcacctaaacctgggaggttgaggttgcagagagccgagattgcggcgctgcactcgagcctggatgacagagtgagaccctgtcttttaaaaatttatttagactgggtgcggtgctcatgcctgtaatcccagcactttgggaggctgagagggggagtggatcacctgaggtcaggagttcgagaccagcctgaccaacatagtgaaaccctgtctctactaaagatacaaaaattagctgggcatgatggcgggcacctgtaatcccagctactcgggaggctgaggcaggagaatcgcttgaacccgggaggcggaggttgcagtgagccaaggtcatgccattgcactctagcctgagtgacggagtgaaactccgtctcaaaaaaaaaaaaaaaaaaaagaagaggtgaaactaacgagttggaaagggaggtggaaaagctaaggaaagaattggagggaggtgggagcaccactggaaagagtggagagtggcacacatgctgtggaaagccacagtgatgacctggagacaggcctcaggaaggtgcacaggaaacaaaagaaacagatggagtgtcagaccgaagcaattagaagctgatagaaatccagactgacaagagcattctcacatttgtatgcgaatattcctggcagagagaataaatggaatagaaaatactcttcaggatataacataaaacagcttcattaaataaaggaagacctgaatctgcaggtccaaactgcttgccgtattccagaaaagagtgtgagagaaatgatcgacacagacacaaatacagctgagggtcttaatctcaaaaggaaagagtgatctctccatcaacaaataagtcaatagcaaaaagcaaaacaaaagcaatactaataataaagagcccattaagaatataggcagaagaggccaggcgcagtggctcgcacctgttatcccagcactttgggaggccgaggcggacggatcacctgaggtcaggagttcgagaccagcctggccaatgtggtaaaaccctgtctactgaaaatacaaaaatgagctgggcgtagtggtgggcgcctgtaatcccagctactcgggaggctgaggtgggagaatcgcttgaacctgggaggcgttcaaacactgcttcagtaaacaaggaaagaggtcatgaggaatctagtgagccaagatcgtgccattgcactccagcctgggcaacaagagcaaaattccatcttaaaacaacaaaaaaaaaagaatataggcagaagaagcagtcagttaggacaaatacccctaactttgattacattctttttttttttttgagacacggtctccctctgtcacccaggctggagtgcagtgtcgtgatcttggctcactgcagcttccgccttcccggctcgagctatcctcccacttcagcctcccaaatagctaagactaggttttgccatgttgcccaggcggtctctaactcctgagctcaaacaatccactcgccttggcctcccagagtgctaggattacaggcgtgagcccccacacccagccttggtacattcttaatatgtgttaggtgcttgaattttcacaccagccctgagatgttggtgctatcagtaccccatttcacagacaagaaaacaggcccaggccaggtgcagtggctcacacctgttgtcccagcactttgggaagccaaggcaggaggatcagaagaggtcagaagtttaagaccagcctggccagcatggtgaaactccatctctactaaaaatacaaaaattagccgggcttggtggtgagcacctgtagtcccagctacttgggtggctgaggcaggagaattgcttgaacctaggcggagaaggtttcagtgagccgggatcacaccactgcactccagcctggacaacagagcaagactccatctcaaaaaagagaaaagaaaagaagaaaagagaagaaaaaaagaaaaaaaaaaaggaaagaaaaagaaaagaggtccagagttgtcatttgatgaaggaaggatacaaacccagaaccttgggtactatcattacactacagtgcctcacccacaaaggaggaaaatatcagtctggacaacacttccccacagttctgaagatgtcagcccaaggagaaacagcatctacaatgaattctctacccaaccaagtggccatttatgtccatggcaacatagatatattctcaattatgcagaagtttaaatgtaatgcaaatatgtgctgcttttctttagcaaacttattttattttattccattgaatttcactaaaggagatacagatgtgcataattatgttaatttacacatgataatatacattaagaccataagaaagctgagaaaatgcctgctcagtcaaaaggtcttcccgagcaggggctgagggtcttgcacatggctggatccacacacaatctgagtcataggaggcattgaaggcactgaaggatgggcttgatgtacttggaacagctcagtcacctgttttgatgcagggcctgttgcaggtgtgatgactagagcggggatcatgagtgctaaaggaatttgccaaggcagtcataggtttaaaaaaaaaaaagcagatttattagaaggaaagtatgttgcaaggaagcaacgggcagcacagcagaaaagggactgtctccaaaaaggcaggggctggaaggaagctttatagggtcatgctggagggggttcgtgcagttacagtcctgctgctggggctacgtgcagagtgagggaacaggatgttgtgcaagggcctgtttgtggttagccgtctctcagaacaattgttctccccaacctgggaccccttcctcattgttgcttatttatcaggattccacagagcccaaatcaatattatagaaatgggatcgggtgagacaatccatgtatcacctatgaatagactcaaaagaattggaagtagggtcttgaagagagatctgtacatccatattaatagcagtttattcacaatagccaaggcatagaagctacctaaatgtctatcaacagataaatggataaacaaaatgtagtgtatacttaaaacagaaaattattcagccttaaacaggaaggaaactcagacatgtgggacaacatgaatgaaccttgaggacactatgctaagagaaataagccaggcacaaaaagacaaaatattgtgttccacctatatgaggtacctagaggagtcaaattcatagaaacagacaggagaatggtgttctccagggcctgggggaaggagagaatggagggttgtttaatggaaacagagtttcagttttgcaagttctggagacggatggtactgatagttgcacaagaatgtgaaaatacttaatactactgaactatatacttaaaaatagttaagacgatgcatttgatgtcatgtatgttttatagaaatacacatatatgtgtatatatgtacacatatatttgtataaacatatagtcctataattaaacatttttttatgccgggtgcagtggctcaagtctgtaatcctggcactttgggaggccaaggtgggagaattgcttgagctcaggagtttgagaccagtctgggaaacatagcgagaccacatctctactaaattttttttttttaattagctggacatggtggtatgtgcctacttaggaggctgaggtgggaggatcacttgagcccagaagacagaggctgctttgagttatgatctcaccactgcactccagccagggcaacagagcaagactttatttcaataataataataatactttaaaaaaactgctttcaagacaaagttatctccaaatccagcttccatcgctatagagcattcagaaccaacaagtcttcgtgctgttggacctgctgtgctagagggcttcatgtccatcagatgaatattagcattccctctgagtctgtatgagactgggcttgatgcatccttcatagcacttgtcaaggcaccactcacacccagatcttcagcactggtagcatccccgttctcattagatagcaccgccattttcctcagtctctcctatcttttagagcagcggtccccaccctttttggcactaggaactggtttcatgggagacagtttttccacaggtcatgggggacggtttggggatgattcaagcattacatttattatgcactttattgctattattattacatactcaccataatgtagaatcagtggaagccctaagcttgttttcctgcaactagacaggacaggtgttgggagacagtgacagatcatcaggcattaggttctcataaggagcatgcaagctagattccttgcatgcgcagttgacaatagggttcacgctcctatgggaatctaaggcctccgctgatctgacaggaggcggagctcaggcggtaatgctcactcgctggccgctcacctcctgctgtgcagcctgcttcctaacaggccatggactggtactggtccctggcagggggttggagacccctgtttagagcactgttgaaagacagaacactcacgatttcactcaccatggagacatcagtgtgagtcaccactctccaaaggtgatctgcctccaaagtctatcactgggattcaaatgctctctgccaagttatagtttctgggtcaatattcagtcctagaattctgctcaattctttatcagtgtgatagagtcagattctcaattctcactcttaatagccttcagatttgggtatcagacaactttcttactccattgactgaagataccaaatggtaaaagggacctctgtccctctgtgtcagctcatggaatgcacaaacatcagcagctgccccaaaaagaacactaggtcacctgtgaggctgatgatgaactccataggaacgactgggcagtctactgcctcgtatttcaaaagttccaccctgagaagctgtcaaacctaagcaaacctaagtaggcacataccaccatgtccagctaattgaaaaaaaatttaatagagacgggggtctcgctatgtttgccagactgctctcaactcctgagctcaagcaattctctcaccttgggagcctgacgaagagcttgcaccagcccattgtggttgttctttattcccaggacctttggggatcttctagtcactgccatattgtgttttttgttgttgttgcttgtttgtttgttttttgaaacagagtctcactctgtcacaagcccaggctagagtgcagtggcacgatctcggctcactgcagcctcctcctcctgggttcaagtgattctcctgcatcagcctcctgagtagttgggattacaggcgcccatcaccaccatgcccggctaatttttgtatttttagtagagatggggtttcaccatgttggccaggctggtttcgaactcctgacctcaggtgatccgcccacctcggcctcccaaattgctgggattacaggcatgccactgcgctgggccaactgccaccctctttctttagcctctgacttgctcagagacgaccttcctgttcaggattcttgccagcaccatggcccgagtggtctcctgcctcctctggactctgcacatacatgtgtgtaacatgggatccagccagctgactgaatcgaaataacttccacacggggatggcatggtaggaaagaagttgcagggttattcaatcaatgtaaacttagaattaagaataactggctgggcgctgtggctcacgcctgtaatcccagcattttgggaggccaaggtgggcggatcacaggtcaagagatcaagaccatcctggccaacatggtgaaaccccatctctactaagaataccaaaataagccgggcgtggaggcacacgcctgtggtcccagctactcggggggctgaggcagaagaatcgcttgaacccgggaggcagaggttgcagtgagctgagattgtgccactgcactccagcctgggcaacagagctagactctgtctaaaaaaaataataataactatgatgaccactcttaaaaaaatgtaatttttatcattcttctcagaaatctatatgatgtaaaaataaatatttgtcagtagtagactatgacaatcctagaaaatacttacattaaaataggggagggagaagagaggagagtataaatatggcaacctgtcagtccaagagtctttattacaaataacagaagcttaccctggctgagtaaacataaaaggaatttagttagttggttagtttcaactttaattttagtttcaaggggtacatgtgcaagtttgttaagtgggtaaattggatgtcagtagggtttggtgcaccagtgatttcatcccccaggtagtcagcatagtacccaacaggtagtttttcagcccttaccttcctccccccatcacccctcaagtagtgtgtctctcgttcctggtgtctcctattcccatctttgtgaccatgtgtactcaatatttagctcccagttataaatgagaacgtgtggcatttggttttctgttcctgcattaattcaattaggataatggccgccagctgtattcatactgctgcaaaggacacaatttcattcatttttatagctgcattgtatttcatggtgtatatatactacattttcttatccagtccactgttggtaagcatctaggttgattataaaaggaatttattaaagggattttgaatagcttataaaattgctggaaagtctagagaagtgggcttaagattcatcttctgggaacagcactcaaaaccacactgcagaacagtctgaggaaggaactgctgcaatcaccacccagcactacatgctacagtttataccactatcactctgagccaggaactcaaccttctagtcaggaccactgccaccagaacaaaagctcctaatgtcttttccctcagatcattcaccaaagtctggcacatgtgtgtcagatagacagaaacaaagtcacatgtgccaagttgcaagattctgggaaggtgagtatttaacattttcagatctattaagagaaataattgtttccccacacgaggactcataaagtagatcattcctccaaccagagaaggggttcagttgctgggggaaaacatgcatgataattgtccagtatagccaatttcctcatatttcatagatgtgaatcaatcaatataacttcatttctgaaattgattaacattataaacatattaaggctataaagataaaacgctttttttttttttttttttttttttttttgagacagtttcactctgttgtccaggctggaatgccgtggggcgatctctgctcactgcaacctctgcctctgggttcaagcaatcccaagtagctgggactacaggtgcgcaccgctacgcccggctaatttttgtaattttagtagagatggggtttcactatgttggccaggctggtctcaaactcctgaccttaagtgacccgcccacctcagcctcccaaagtgctgggattacaggcatgagccatcacgcctggcctatacttcttaattactggagtacaagaaataaagaccatggaacatcaacagaaaacaaaagagaatgtaaaagtttcaaaagacaaaataagacagcagaaacaataccaaatacatctatcttaataataagtgttaagtgggaaaactaatttagattatcagatttaacctttaaaaagaatatattttgcattagacatagacctaaaataaagtgactcaggttgaatgtaaaaagatgggcaaaaatatatcagatatattcaatatgcacaagatctatatgaggaaaactacaaaactctgaggaaaaaatcaaacatctaaataaatggagagatagtccatgttcatggataagaagactcaatatagttaaaatagcagtttttcccaacttgatctgtagattcaatgtgatcccaatcagaatcccagcaaattttcttcttttttttttttctttttttttttttctttttttttttcttgagacagagccttgctctgttgcccaagctggagtgcagtggtgccatcttggctctctgcaacctctgcctcccagattcaagcaactctcctgcctcagcctcctgagtagttgggattacaggcccaccatgcccagcagctaatttttgtatttttagtagagatggggtttcgccatattggccaggctggtcttgaactcctgacctcaagtgatccacctgcctcgacctcccaaagtgctgggattacaggcatgagctgctgtgccccaccccaaaatcccagcaaatcttatcttgtggatattgacaaaatgattttaaagtttatatggaaagccaaaagacccagaatagccaataaaatactgaaggagaagaacaaagttggagaaccgacactacctgactgaaagacttactataaaactacagtaattaagacaatgtggtattggtgaaagagtagacgtgtaggtcagtggaacagaatagagagccccaaaatagacccatgtaaatatagccagctgatctttgacaaaggtgcaaagccaataccatgaagcaaagatagtcttttcaacaaatactgtaagaacaactgaacatccacatgcagaaaatgaatctagacacagaccttttacattttataaaaattaactcaaaataaattatagacataaatataaaagagtacactacagaacttctagaagatgacataggaaatctaagtgaccttgggtttggcaaagagtttttagatacaacagcaaaagcacaatccatcaaagaaaaaagtagacaagctagattacagtaaaatttaagacttcagtgaaaagcactgttaagggaatgaacacaagccacacgctgggagaaaatatttgtcaaacacatgcctgataaaagacttgtatccaaaatatataaagggccaagtgcggtggctctcgcctgtaatcccagcacgttgggaggctgaggcaggcagatcacctgaggtcaggagtttgaaaccagcctggccaatatggtgaaaccccatctctactaaaaatacaaaaattagctaggcatggtggcaggtgcctgcaatcccagccactcaggaagctgaggtgggagatcacttgaaccccagaggtggaggttgcaccactgcagtccagccgggtggcagagcaagactcgtctagaaaaaaaaaatgtatatatatagagagagagagcgcgagcgcgtgcaagagagcaagagagagagaacccttaaaacacaacaatgagaaaacaaccaaccacattaaaaaatgggcaaaatggccgggcgcggtggctcacacctgtaatcccaacactttgggaggccgaggtgggcggatcacgaggtcaggagatcgagaccatgctggctaacacggtgaaaccccgtctctactaaaaatacaaaaaattagccggccgtggtggcaggcgcctgtagtcccagctactcgggaggctgaggcaggagaatgtcttgaacccgtgaggtggagcttgcagtgagccgagatggcgccactgcactgcagcctggcgacagagtgagactccgtctcaaaagaaaaaagaaaagggcaaaatttctgatcagacacatcacaaaagatgacatacaaatggaaaataagcgtatgaaaacatgttcaacatcatgtcactagagaattacaaattaaaacaataagataccactacacacctattagaatggctaaaatccaaaaatctggccatattgaggaaaggttattaggatgagcagttctagaactgggatcagataaaaggggaaaatgcttcggattaaatgaaagagtagaacatgagtagtagaagaagaaaatgaaagttgcacttagaaagggatctcttctattcatggggatgatctggtcagggccattgtgggcatccaatgccctaataatttctgagaaacttcttcgtgtctgtttctcaagtatcttctctgtcctactagaaagtagccaaatgaataatggattaataaccccatgtgcttatgtttcagttggcttgtgctgctgtaacagaataccacagactgggtaatttatgatgcacagaaatttattaactcatagttctgggggctgggaaagggctacctctggtgaggggctacttgcagtgtcaccccacagcagatggcggaagggcaaggagagaggcagagagagaaaaaaggggccaaacccatccttttataaggagcccattcccatgataacagcattaatccattcatgagaacagagccctcatcacctaataacttctcattaggcctcacctcctaacatgctcgcattgtttccagaacatgcttttgggagacagcactttcaaaccacggcaatatatgatggcatccatttagccacaaaccagcaggtgttgccgttctcgtttacaggagtcaaagctgagtgcctggagtgtccatcttatccagcatggcaaacttgcaaagtgatggaattatggatttctttttggaaatttgggaaatatcaaaactgagagatagtcagtcagatgggacaaacactgacctgttgaacgggcttggttaagtcaaggtccagggtggatctaggtcaatcatattctaaacaagtgagggctttgatattcctgtgctgaaggccatgtcagaacaactcttacttaagttaatttggtgatattacaactctctttcaagcatcttagatttagctcccaatgtgcaatcaacttttgatgtggaaaaaaagcctatgctgaaagtagttaacagtggctagtctgctgctatggacatttgacttaagggttcagagacggactctgttgaattattcttttattcacacatatcacccaccctcctctctctggtttccaccttcaggtataacctaacccactctaagcttgatgttgcctgtggcctaggacccacccacagggcggaagcctctccccacacaggccatccgccaacaagtaagaattgcccacactgaccaggaatagtacgaagtagttactgggatcctctgaaagccataatatgaaagtatctagagactgcccttaggaactggtgtgtgggtctcaaatacttcccaatgttaggagaaaaaaaaaagcacaagagttcaccctgcagtgctttctgagaatttaaaggtgaggtatatacctgtaatgtccccaggatcccactgaggataagcagtatatgatatcttctagtggagtgtgcaccaaatttcaccgtgtaaaaatataccattatagaccttgtaaaatataccgttacaccatgctggctgcaacctggctgtaccattaactgtaatcctgctttgttttcttggagtaggagaaacaggcaaagccaaccaagatgcttttgattcccagtagtactgttaaatagaccagcgttgcttagaaataggtgtgggtctgtctacttcagatgcaaaggataaatgcagtgggtgtcacagccacaataataattatgtcatctgtcttgtcatggaatgtgactatagtaattgcggcattttctcccatcattgaagcttgtaattatagtgcaactaacaggattacgtgctaacttgggctgccttaatcacctcttttactctgaaatgtgatggtaaaattccacagttgttcccaagctaccaattcttttcaacatctgttgtcttgtaactctaacagttcaatactaagacggggaggcacagagatgctccaggcatttcatcacagtgaacttgagggaaagccgaattcaggcttgatgagaaaggatacacagtaaaggaatttgcaattttctaccagaataagattttctctttgaaagcaaattgtctactttatgttccaaagatggcagatgtttaatgggatctggcgttgtctgcaacccctatttggtacgtgttgaaggaaacctccaaccataaacatcaatctagggctgattaagaaaactctccctctcagcggaaggagcagactcaggttaattaatacctggatactgagctatttgttgggacgccacctttcatgtgtcaggctcatttagacggtcattacctatatttatcttttcagatcacattaacaataaacttcaggggttacccaagatactttggttataaaggttatataggactctggacgctatgtgaaaagacggggtgatgaaggtggaaaactcccttgactattttgctgtaagatgacttatgctgtattagatgcagctgtgcgtaagtgggccattcttcacagtgttacatttcagtaattctgagtgcacctaggaaattaatgtttcacggaaccaacccagatccacacattcgggcttaaactgagcacttcttgatcggcagtaatactggcttcattgtgtgtgcattcctgttgtatgggtgcacagacaggactcagcaagccagaggagtggttataactcagcaaacgcaactgtgatcttaaagcaacaaaaggaggcaatctaagaacaactcgttttcttgcaagaaaaattgtggcatcaggtacagtatcacctttgggaggtgagagaaaaattcctaggtgagacctgcttagacctggcaaggccagaccattaatagcataattgttagggtgttgcagacactgggctgtaagggaagaagttactctgctatggagtggaacatgggcccaacctgacttctcctcgactgagctgtcccccgaagccccgacattttttgagcccactcctttaatgcttggtcatgatgtacaggatgtactggttgatagtgcagcttccccagtgaggcgcccccttgaggttgctcctagagaattaaaagagtcgaactggcccatgatggatgttgataaccaccgggacaggtaaactgatcaatgggaagagagctatcgtgacagtttagccagccaacttctgaccagctggattgtatgtgtagacagaaggggattggcgggtcacagcctagaggaaggggtgtcttggagaccacagtggctgtgtccatcctgtacttctcagggccggggggaaagggggtgagtcccagctgaggacacctcctgtctctaggttaaacgaaatgacctaagacactctaggtgggagactctccttcttctggtcctgtgagctcccaggtagttgaaccacaaggatctctcctcgtgtgcactggatggatgggcaggtgagaatgttccaggccacttgagaattacgggtctcattgtcaattaacaaagcagctgctgtagtatagcggctgagtatagattctgtatacagtgtagattatagattctgtatcgagtgtagattctgtgtagtataaaacgggtccccaaccgccgggccatggaccagtaccagtctgtggcctgttaggaaccgggccgcacagcaggaagtgagcagcgggtgagcaagcaaagcttcatctgtatttacaggtgctccccattggttgcattaccgcttgagctctgcctcctgtgagatcagcagcggcattagattcttacaggagcacaaacccaattgtgaactgcgcgtgtgagggatctaggttgcaagctccttatgagaatcctgtgtctgattatctgtcactgtctcccatcacctccaaatgggaccatctagttgcagaaaaacaagctcaggcctcccattgattctgcattatggtgaattgtatataattatttcattatgtattacaatgtaataataacagaaataaagtgtacgataaatctaatgcacttgaatcctcctgaaaccatccccccacccccagttcatggaaaaactgtcttccacgaaaccactccctcgtgccgaaaacgttggggacggctgtagtacagtacagcttagcttcaaattctggctgtctcttttttttttttttttttttttgagacagagtctcactctgtcgccaggctggagtgcagtggcgcgacctcagctcactgcaacctctgactccctggttcaagcaattctcctgcctcagcctcccgagtagctgggattacaggcatgggccaccacgcccagctaaattttgtatttttagtagagacggggtttcaccatgttggccaggatgttcttgagctcctgattttgtgatctgcctgcctcggccccccaaagtgctgggattacagtccgtgagccaccgtgcccggccctggtttcctctcttaatagatgggtgaccttcttaacctttgtgcctcagtttcctcatctgtaaagtggctttaagataatacttatcatgtgtacttgaaaattgcttgccagactcagaggctcatgcctgtaatcccagcactttgagaggccgaggcgggcagatcacctgaggtcaggagttcgagaccagcccggccaacatggagaaaccccatctctaccaaaaatttaaaaattagccaggcatggtggcaggagcctgtaaccccagctactagaaggctgaggcaggaaaactgtttgaaaccaggaggcagaggttacagtgagctgagatcgccctactgcactccagtctggatggcagagtgagactccatctcaaaagaaaaaagaaaattgctaaaagagtaaattttatgtttttaaccacaaaaaaagtatgtgaggtaatagatatgtcagttagcttgatttagccattctataatgtatacacgtatcaaaacatcatgttgtacaccataaatatattccatttttatttgtcaattataaataaggaattctactttttttttttttttttagagacagggtcttgctctgccacccaggctggtgtgcagtggtgcgatcacagctcactgcagccttgaactcccggactcaagcgatgtccctgcctcagcctcccaagtagctgggactgccggtgtgcactatcatgcctggctaattttttcattttatggtagagtcttgttatgttgcccaggctagagtcgtacgtataagaagaattaaatgacataatacatctgatgcatgtagcatagtgctggcacctgagaagcactcagtaaatgtaaatgttagcttctatttgtattatggttttatccagctgcctcctgagcttgtttaatatgggtcagccacaagagatgatctattctgagtgtgccaggaaattgtgtttctgggcccagaagtccagtgattgccctctgaagaaagggggcagattcaccaaggtgtcctctactgtctgggactggacaggttgtcagatgccccgtctcctggcctctcatcatggatccacagtggcgtgcaagtgttcttttgtgacatttcagcacacatggattattatagtgacttcatcatgtttgagatcacagtgagatcttctagagggcaaaactgttgccttattctttctcttgcatcctctgaattagctaaagggtagatagtgaatacttcctttctgaatgacataacgaggattatagagaattcagatgaaactggagcatgtccaaaaaaaatgaagtagatgggaaaagtgaaaactagaaaactggagagggcatgatagtcagacgagacgttctttttttttttttttttttttgagatggagtttcactcttgttgcccagactggagtgcagtggcacaatctcagctcattgcaacttccaactcccgagttcaagcgattctcctgcctcagcctcctgagtagctgggattacaggcacccgccaccacgcctggctaattttttgtattttttgtagagacggggtttcaccatgttggccaggctggtcttgaactcctgacctcaggcgatccacccgccttggcctcccaaagtgctgggattacaggtgtgagccactgcgtccagccgagccattcttaaacggaactcccagaagagctcactggagtcaggggcctagacttagcaaacccaagaggacagtggctcctagaggaggaatgtggttgttccaacactgcagcccttgtgtgtgctgcccaggcagcagtgaagaccactgcccaggggttgccagaggggtcaatggatgaatttagtggctgtcctaacatggtggccatgagggagaccccagacctcagcagcttctgcatctctgggcatggtgagaagccaggagtggaaactaaggaggtcatcactccagcagttggggagggcacttggctttccttagaaggtggcagcaagggagggctcaatctcccaagtccaccggctttgagttgcagcactcaccatgtgattccattctcttgtgtgtccatcgcagccctgtgggcctcagagtccatttccttaagcctgtgctcctgctccttgtgatggcttcacaggccccccacaggctcagttttcccctgagcctcacccatctgggaaattcctatatgggcgtcctgtaacccactgcaaacttcaaacactcctattcaactcaacatacacgtttttaggatcttaaatactgaccatgctattaaaggtagaatcatagacgtcttagagtaaattgggaccttagagctctccaacgctcctgaattttacaaatgagggaagtgaagctcagaaaggttgagctgcttacccaaggtcacacagctagcttacgggcgggggtagatctagaagcctgatgttcaccggaactcatttctccatgccacattcttaacaaatgtaggttttgtcaggatttagactaactcatctgctaaacttcaagttgatttatttgagtgatgtgtttagttgattcattgtatatctctgctggaattatttctagccattgctaaagcggttaggtctgaaaatcagaagaatctctgtaaaatgctgaaagatgagccaatttttaaaacccagaagggaatgtgtatggcctgtgtagctggaggcttctaaacattttttttcttcatctgtggaacatttttatcattctggggaagatttagacattgaatgtactaaaaggatttcatttgactgctatgtatttacccctgcctgtaatccgctaataaatactcgcaggcagaacagcctaattggcaggatgagttaatgcacaggccatttatctgccaagcacatgacacagaccatgaacaaaataagctggtaactgcctctccctcttagcaaatgcttgtccgcaccccgccctctcccaacctgctcttcctctggccttgagcttggggacagtttgatgcacaactgccatgcgccagcaggcttcagataagcctggaaagaaatggaatggaaagaactttctggtcaggagcacctctctccgcagggaagtggccactccaagttaaaacatgtgtgctggctgggcacggtggctcatgcctgtaatcccagcactttgggaagccgaggtgggcagatcacctgaggtcaggagtttgagaccagcctggccaacatagtgaaaccccatctctactaaaaatacaaaaattagctgggcatggtgagtgcctgtaatctcagctacttgggagactgaggcaggagcatcacttgaacccaggagatggaggttgcagtgagcggagatcacgccaccacactctagcctgggcaacagagcgagactctgcctcaaaaaaagaaataaaaatgaaaaatgaataaaaataaaacgtgtgcttataaaatatagctaaatacaagttctgttgaggaggatgaagtgtctctctgtgttggtcacaagagtggattgcaataaaacaactaataatgataataaatatgatcacactggcttggccaggggctgccttctgctttagtcttccagaaacggtttagcaaagtcattgtgagactactgtcctggaacctccactcctcacctactcgagaatatatcaaggctgtctgggcctcctgccagccctcagtcctgtctccatgctggcctgccatgcgagggcagcctccccttcttggaggcccgcttcgaaccagtctcctagatctgcacaaaccctccctccagcctgggcatgaccatgttgtaggccgtgcacacaatacagcctaccctagggcttgtcccctctgtacgtggacacctcttccctggactcactctgcaaaggggcctttaactgagcacctgtgctctgtgccctcacaggtctcccaggcagctgcggacctcctggcctactgtgaagctcacgtgcgggaagatcctctcatcattccagtgcctgcatcagaaaacccctttcgcgagaagaagttcttttgtaccattctctaactccgtgtgtgatgaaaacgcctccttttctgaccttcaaagtcccctgtagagaccatgcatgctctaagccttagggagtgagaccaacacccatccctgcccagccaacagtggccggggcttgtcttatgtttccatctgttttcttcgtggcattcaatttcatttttttccttttcattttcatgttattttcattattggcaaagaaaatcaaaatgtttatagccaaataacaaatgtgccatgtaaaagtaagtctggacttaagagtttaaaatttttaaacatcagtttccaagtttatatcatattaatacatttcagtggataatttattttaaaaaaaaaactatgcctaaatatcccttatttgcaatattcagtatcaaattagagcattttgaccaactgaaacatataacgttttcatctcctttcctggagaaagcagctgcagaggttctgtatttcctgcatttccatcatcctagtaaaaagacaacaacccacaggattggaatggttttcttttgttttttttttgttgttgttgttgttttgagatggagtctcgctctgtcacccaggctggagtgcaatggcgtgacctcagctcactgcgacctccacctcctgggttcaagcgattctcctgcctcagcctcctgagtagctgggatcataggcacgcgccaccacacccagctaattttttgtatttttagtaaagacggggtttcaccatgttggtcaggctggtctcaaactcctgacctcgtgatccacccgcctcggcctcccaaagcgctgggattacaggcgtgagccaccacacccggccgtggaatggttttcttagcatatcctcctggggccgtggcgccccggctgtgggccgtggtggatgtcccttgtttcagtggtcctacaaaggtagatggtgggcggacaccgaagtcaacttgactgtaaaagtaccccataccgttgacgcgctgtggcagacctgtgggtgcggtctcccctctccaaatgccacctcttcctgctccctcctcttttggctcctactcagtagttccattgtgggctgcagtaatataaggacctgttctggacacagcactgggcccgctggggttttagtagggcagccccttccctgcaggagtgaggcatggtgacagcagtcccctatgtgcccccaagtcatctgagcattggtgtgcattaaggtactcaatcttccaacaataaataccataagtgcatgtctgttttattttatttatttatctttttgagacagagtcttgctctgtcgcccgggctggaatgcaatggcacaatctcagctcaccgcaacctccactcgcaggttcaagtgatcctcatgtctcagcctccctagtagctgggatgacaagcacacgccaacatgcctggctcatttttgtatttttagtagagacggggtttcaccatgtcggccaggctggtctccaactactggcctcgagtgatctgcccaccttggcctcccaaagtgctgggattgcaggtgtgagccagtgcacccggccgtatgtcttagagtgaggggaaactgaggcacaaagcgtttatgtagtttgcccaaggttacacatggtaagcagaaaaactgggatttgagggcaggcagcccggccccagagttcccttagccccctgaactgtgctaccttccaggtctacctgtttgcaggtagggagacccacaaactatcataactgcacaccgtgaagcaaacacctttgttgcagtaacccgtggcacacttcacttcccacattctccaggaggaagccgtattctggtagtttaaggaaggtgattcatggatgccccaaggaaaggctagacatcgatgaattagctcttggattgtctaagatcaacctgaaggtcctacctaaaccaaactcatatgatcccgatgaaagaggagaatacacagtgggagcagagctctttgtgtaagtttgttctattctgtttatttggaaactgcctctctccctagttctgaaagagacttgctgtgtgatagagaacaggccatttgtgcctgaaatgttctaacctgcaaattgggtttaatggtaattatcctgcctttctgtctgggaggaaacagagatgctacatagatgaaagctctgattatcatttaaaacaaataaatgtactaaatgccgtggtataatatagggaagaatggatgacttcaaagagaccatggttccgttggaggcataaaattgcctgcaaagaggcaaatgtaatttccagaccaattaatgacttgctgccctcgtaaatggatttaggacatctttgttccttgcttcttttgttaaaactcattcttagtttcattatcagctcactaataataccagtgttgttaagatgctcaaactagagcagaattgtatgctggatgtgacgctaggacctcagatcctttgatagtgcagttatgaccaggatctctttattctgtgcttcacgtcaacatcattaacccgatgaagcgaagcacaagtcataaaggcacatcagagaagccgagaaagcggggccgtacagagagcatcaaaatcaggtcagaaaaatgctgctttcctcttccaccaaaccttctccctgttgtttttacatgccccgtccctccagattcagcctccgttttgttctctctccttttccttttcctcctctcttccttaccttcccctgtgagatgcttttctgtccttttactgcacctcttccagacctatggcatttggggacgggtcacccttcctagagtgatcctgaatccagctgcctcttctttttttgtttttgtttttgtttttgagacagagtctctttctgtcgtccaggctggagtgcagtagcgcaatcttggctcactgcaacctctgcctcctgggttcaagcgattcttgtgcctcaacctcacgaggagctgggattgcaggcgcccgccaccacacccggctaatttttgtatttttagtagagacggagtttcaccatgttggccacgctggtcttgaagcccagacctcaagtgatccgcccgccttggcctcccaaagtgctgggattacaggcatgagccaccgcgcctggcctagttccctcttcttagatggagatttctgcacatgagctgtgagatccacagacatgtcactgagctcccccactctgtcagtggaagatgaatggaataaagcctgcttgcattgtggagtgcagctgtggggacagttgtcatttttgtgttttcagcttaactgtccagcatctcccctcccttcctacagcagggacatcatgccttagatataaacttagtggtgtgcagtacccaccgtggaagctgaagaagggaagtatttcctgtctctcaggcacaccccgcttccagccccataccagtcgggaagtggtcattgacctggggtggactacctggacccttgcttggggctatgagcctggagaatgtgacacaaatgaagggatgctgagactcatttcaaggaagccaccgtggtccggggttggtagtcatacagcaaggcaggtgggtagggctggcaggctgcagggatggtgtgtccactggtagcaatgtccagggatggcagcgtcctgggaatgtcatttctgctccactccttggactcgctgagctgtctccgcctccacctatcttcctacagacctcccttctagttttctgtcaattctttgagccagcaaactccatccagtacattctttcttctttcatgaaagagcttgagttggatgtaaatatatatgacctaacaattccacccctaggtgtataccctacagaaatgtgtacatgtgttcatccagagacatgctctaaatcttcacaaaaacactctccataataaccccgaacaggaaagcaccccaatgcccatgttggctggataagcacattagggtatattcacacgatggaatcccagactgcaatgggaatgagctgcaactccacccccaacttggagtgtattcaccaaccctagtgttgaacgagataaggcaaaaatgcaccataggattccatttatataaagtttaaaacccagcaaaattcatccatgcggttgcaagtagagatcagtcctaagaagacagtaaccagaagcgggcatgaggtggtgcttctggggtgttctgtttcttgatctggttgccggttacctgggtgctttccgtttgtgaacattcttggagctgtacacttttgatctgggcacttttctgtgtgtatgttatacttcaataaaaagttgggctttgtgactagcaa

SEQ ID NO: 327 - DNA, 4559 bp, Homo sapiens
  source 1..4559: mol_type = genomic DNA; note = NW_014040927.1:c195835-191277 GNG4 [organism=Homo sapiens] [GeneID=2786] [chromosome=1]
tcacaggtctcccaggcagctgcggacctcctggcctactgtgaagctcacgtgcgggaagatcctctcatcattccagtgcctgcatcagaaaacccctttcgcgagaagaagttcttttgtaccattctctaactccgtgtgtgatgaaaacgcctccttttctgaccttcaaagtcccctgtagagaccatgcatgctctaagccttagggagtgagaccaacacccatccctgcccagccaacagtggccggggcttgtcttatgtttccatctgttttcttcgtggcattcaatttcatttttttccttttcattttcatgttattttcattattggcaaagaaaatcaaaatgtttatagccaaataacaaatgtgccatgtaaaagtaagtctggacttaagagtttaaaatttttaaacatcagtttccaagtttatatcatattaatacatttcagtggataatttattttaaaaaaaaaactatgcctaaatatcccttatttgcaatattcagtatcaaattagagcattttgaccaactgaaacatataacgttttcatctcctttcctggagaaagcagctgcagaggttctgtatttcctgcatttccatcatcctagtaaaaagacaacaacccacaggattggaatggttttcttttgttttttttttgttgttgttgttgttttgagatggagtctcgctctgtcacccaggctggagtgcaatggcgtgacctcagctcactgcgacctccacctcctgggttcaagcgattctcctgcctcagcctcctgagtagctgggatcataggcacgcgccaccacacccagctaattttttgtatttttagtaaagacggggtttcaccatgttggtcaggctggtctcaaactcctgacctcgtgatccacccgcctcggcctcccaaagcgctgggattacaggcgtgagccaccacacccggccgtggaatggttttcttagcatatcctcctggggccgtggcgccccggctgtgggccgtggtggatgtcccttgtttcagtggtcctacaaaggtagatggtgggcggacaccgaagtcaacttgactgtaaaagtaccccataccgttgacgcgctgtggcagacctgtgggtgcggtctcccctctccaaatgccacctcttcctgctccctcctcttttggctcctactcagtagttccattgtgggctgcagtaatataaggacctgttctggacacagcactgggcccgctggggttttagtagggcagccccttccctgcaggagtgaggcatggtgacagcagtcccctatgtgcccccaagtcatctgagcattggtgtgcattaaggtactcaatcttccaacaataaataccataagtgcatgtctgttttattttatttatttatctttttgagacagagtcttgctctgtcgcccgggctggaatgcaatggcacaatctcagctcaccgcaacctccactcgcaggttcaagtgatcctcatgtctcagcctccctagtagctgggatgacaagcacacgccaacatgcctggctcatttttgtatttttagtagagacggggtttcaccatgtcggccaggctggtctccaactactggcctcgagtgatctgcccaccttggcctcccaaagtgctgggattgcaggtgtgagccagtgcacccggccgtatgtcttagagtgaggggaaactgaggcacaaagcgtttatgtagtttgcccaaggttacacatggtaagcagaaaaactgggatttgagggcaggcagcccggccccagagttcccttagccccctgaactgtgctaccttccaggtctacctgtttgcaggtagggagacccacaaactatcataactgcacaccgtgaagcaaacacctttgttgcagtaacccgtggcacacttcacttcccacattctccaggaggaagccgtattctggtagtttaaggaaggtgattcatggatgccccaaggaaaggctagacatcgatgaattagctcttggattgtctaagatcaacctgaaggtcctacctaaaccaaactcatatgatcccgatgaaagaggagaatacacagtgggagcagagctctttgtgtaagtttgttctattctgtttatttggaaactgcctctctccctagttctgaaagagacttgctgtgtgatagagaacaggccatttgtgcctgaaatgttctaacctgcaaattgggtttaatggtaattatcctgcctttctgtctgggaggaaacagagatgctacatagatgaaagctctgattatcatttaaaacaaataaatgtactaaatgccgtggtataatatagggaagaatggatgacttcaaagagaccatggttccgttggaggcataaaattgcctgcaaagaggcaaatgtaatttccagaccaattaatgacttgctgccctcgtaaatggatttaggacatctttgttccttgcttcttttgttaaaactcattcttagtttcattatcagctcactaataataccagtgttgttaagatgctcaaactagagcagaattgtatgctggatgtgacgctaggacctcagatcctttgatagtgcagttatgaccaggatctctttattctgtgcttcacgtcaacatcattaacccgatgaagcgaagcacaagtcataaaggcacatcagagaagccgagaaagcggggccgtacagagagcatcaaaatcaggtcagaaaaatgctgctttcctcttccaccaaaccttctccctgttgtttttacatgccccgtccctccagattcagcctccgttttgttctctctccttttccttttcctcctctcttccttaccttcccctgtgagatgcttttctgtccttttactgcacctcttccagacctatggcatttggggacgggtcacccttcctagagtgatcctgaatccagctgcctcttctttttttgtttttgtttttgtttttgagacagagtctctttctgtcgtccaggctggagtgcagtagcgcaatcttggctcactgcaacctctgcctcctgggttcaagcgattcttgtgcctcaacctcacgaggagctgggattgcaggcgcccgccaccacacccggctaatttttgtatttttagtagagacggagtttcaccatgttggccacgctggtcttgaagcccagacctcaagtgatccgcccgccttggcctcccaaagtgctgggattacaggcatgagccaccgcgcctggcctagttccctcttcttagatggagatttctgcacatgagctgtgagatccacagacatgtcactgagctcccccactctgtcagtggaagatgaatggaataaagcctgcttgcattgtggagtgcagctgtggggacagttgtcatttttgtgttttcagcttaactgtccagcatctcccctcccttcctacagcagggacatcatgccttagatataaacttagtggtgtgcagtacccaccgtggaagctgaagaagggaagtatttcctgtctctcaggcacaccccgcttccagccccataccagtcgggaagtggtcattgacctggggtggactacctggacccttgcttggggctatgagcctggagaatgtgacacaaatgaagggatgctgagactcatttcaaggaagccaccgtggtccggggttggtagtcatacagcaaggcaggtgggtagggctggcaggctgcagggatggtgtgtccactggtagcaatgtccagggatggcagcgtcctgggaatgtcatttctgctccactccttggactcgctgagctgtctccgcctccacctatcttcctacagacctcccttctagttttctgtcaattctttgagccagcaaactccatccagtacattctttcttctttcatgaaagagcttgagttggatgtaaatatatatgacctaacaattccacccctaggtgtataccctacagaaatgtgtacatgtgttcatccagagacatgctctaaatcttcacaaaaacactctccataataaccccgaacaggaaagcaccccaatgcccatgttggctggataagcacattagggtatattcacacgatggaatcccagactgcaatgggaatgagctgcaactccacccccaacttggagtgtattcaccaaccctagtgttgaacgagataaggcaaaaatgcaccataggattccatttatataaagtttaaaacccagcaaaattcatccatgcggttgcaagtagagatcagtcctaagaagacagtaaccagaagcgggcatgaggtggtgcttctggggtgttctgtttcttgatctggttgccggttacctgggtgctttccgtttgtgaacattcttggagctgtacacttttgatctgggcacttttctgtgtgtatgttatacttcaataaaaagttgggctttgtgactagcaa

SEQ ID NO: 328 - DNA, 351065 bp, Homo sapiens
  source 1..351065: mol_type = genomic DNA; note = NC_000012.12:c40106085-39755021 SLC2A13 [organism=Homo sapiens] [GeneID=114134] [chromosome=12]
tcccgcccgctccgcagcgccagctcggcaggcgcggggcgtgagtgtggagtgagacccgccgggctccaactccgcagcgtcggagcgcggcgggcagcaactttctccccggagcggccgtggcggcggctgctgccgtggcagccggagcggaagccgggaggaagaaagcggcggcagcggcggttgctcccgccggctcgggctgtctagctcgccgagactgccggcccgcggagccgcgtccccccgggcagccccgggcccctgccctatgtcccgcaaggcaagcgagaatgtggagtacacgctgcggagcctgagcagcctgatgggcgagcggcgcaggaagcagccggagccggacgcggcgagcgcggccggggagtgcagcctcctggctgccgccgaatcgagcaccagcctgcagagcgcgggcgcgggcggcggcggcgtcggggacctggagcgcgcggcgcggcggcagttccagcaggacgagacccccgccttcgtgtacgtggtggccgtcttctccgcgctgggcggcttcctgtttggctatgacaccggggtggtgtcaggggccatgctgctgctcaagcggcagctcagtctggacgcgctgtggcaggagctgctggtgtccagcacggtgggggcggctgccgtctcggcgctggccggaggcgccctcaacggcgtcttcggccgccgcgctgccatcctcctggccagtgccctcttcaccgccggctccgcggtgctggctgcggccaacaacaaggagacactgctcgccggccgcctggtcgtgggactcggcatcggtgagttcgggctccgtgaagggcgcccgggatcccattgtcaccgcccttgaccctgggtgttgcgtgcctcttgcccatcggggtccccgtctggtctcccagggtcagagaatcctccacttctctggcctccagagcccatctgtttgttggtccagcctccaaggctctcccgggaggtgggagggtcgggggggagggggtgtcactctagtctccctcgagcgcacgtggaatctttgataggccacggaccagtcagtccaagtggttgttgcctctcagcacttccagaaacctagctgagcaccagctctttccttgatccagcctaacctgatgctgcttcttgagcttacgagggtctctgctttcctgcactgtcccaccttgcctctccactgctagcccctttcgttttctggggctcccagcctggaacctagaccatcgtcaagttacagtgagataatatttagagttaagtaattctggactctgaaaggtttattagcgacccctgccctctttgcttatctagcatttgtctttagatggcatctccttttgcttttatgctttttctattgcctttcagctttcattcttttcccaagtaaattccattctcctctgtttttccaactttttcatttgaatccttttttatccattctcctctttgtttttcctctcctgctttccagttgggaaccaaattatctattaaaggtcatattcacttccttaattcatttaggagctactccccctgtggataaatgccccgcaagataaatgtttggaatttacttcaaaaatgaaggcattaaggttctcctggcgttgaatttttttcaccctggttgctgagcaggggaggtacaattggcaagtttttggcagagggaagctatttggaatgtgctctgtattattagaaagcacttttgagggaaagtggggggctgtgacttaaatctcactagtaatttttctaagacacaccgctgatgcttttttaatgtttcgtttcataattcagttttttgtttcccttagggtgctgttgaagtatttcttccctatggctggggcttgatgaaagcgctttaaacctggggctgctgctgatctgtgtattcaccacttgtttgatgtttgtgcttttcaccctttctctgtgggttctgaagggaagcaaaggccatatattcaactccacatgcgggaaccatgagcctaaaacccagctcactgcactttatattcaaagtttgtcagtagtgaccttccttttgctgtttattgtactgttaattagcaaaggtagggcaaagctctccgtaacatattaagttggcacaaaaatatccaaagtgaccaaaaaatccagctgaaatgaaacctatttgtgtggaaactacttgggccttcaggacccttcaacaaataacctgctgtttaagtgaccacgattcttttctcagcattgtctgcttgggacatctggaccttttttgttgcttctgacatagaaataacatcattttaggtagcaagaattgttctgtcaacctcaatcttttctgtaattttgaaattgaatcatgctttgcagagctgtctaaatgaagcttcctagtgttttgctatggcaggtattggttaaaatcttgggtattatgtttactctttttatctgacctgcgaattgagccctgttctgtgtaaggtccccttccagatgttgtgagctgaatagtgaggagaatgtattatactttagtaaatgtagcaagctggggcaaaagcaacgtagaacttgctaagctttataagataggttatcagagatggctgatgaattcagagggggtacagttatctccaacagagggaagccagaagctcttaccaatggaaatggtatgttgacatgtcagtattttaacagaaacgaggaaaggacgttctaagcaaggggcaaaatgggtaaaggaaggaaagcatagggcatacttggggaataggtggaagcagcaatagaggacaaagcaggagatcagattggaagtgttggtgtgcaagagctgtggaggcctctctgtcttgcagcctcattctgtggtctctgggctggttggttcaatagagaagcccagtttagatatgttctccattcagttctggtgtggcccatctcacttccagaaacatacctctcagaatagaagccctgaggcagtttcgtaaaagccctcttcatttacaaaatgaagaatgttttaagatcataaacaggctttgaaataggccgcattcaaaacaaaacagtaatgaaataaatccacttcaaattaggattaaaattaggatctatgcaaagcatgtaattatacacataaaatcattaaaacttacaaagaaaatcacttttttttaagctacaaggaaatgggttcctaacatgagcattttttgagggacattaaatcagtttgcttgtttggtacacaatctgggttaattttatgccattgttttttaagtagttaaattttatgtgtagtcagggatttgttgttttgtccttatgatatttaggaaatgttgatgaataacaaaatgtggcttttgatacctttttcagacaagtttgctctaagaacttctttcctccacacgtttacctgtggtaaaatatacggcccatgtgggtcaaggatttctgctcattttgttcactgatatattcctgccacataggagatacttgttgaataaatgaatggtgagcaaaaacgaaaaaaaaaaatccaaattccattgctggtcgggtagcactttaaggtaggattgttcttttcaaaccacaaaaatagtgcattatcaaaatatttgaaagggcatctaaaggttttggttgtaatagtttaatgaaatcattatctattcaacacttgctaattaagcttccattatggatcctgtcagatatggggcaggcagtaattagataaaaatcccaccctggaggtgttcattttataatggagtagaaagatacataaacaagcaattaaaagagacatttctctgtagtgccagatgacacacagaagagtaagtggtcagttgattctttcagggaaaaaaatagaacacaggattgaggaaagttctacagtgggatattcaaagtagggtttgaagagtgagtaggtgttcagcagatgatgtagatgtagccagaaaagtgcttatttagtgctttagtatgttcgagacctggtggagtactttacacatattacctcatttaatcttcctgagtctgaggaatgggtctccttttgttgggtgtggaaacagttaaatggcaaggtcactgattacagagacaggattaaaaaaaaaaaacaaacaaccttgagtcttttgctctgttaccctactgggcatttaaggtggagttaatagctggtgtaaaggcacagaaaaatcaaattagtatttgaagcatagatgagtgagggtggtgatgaggtggtcatgagactggaatgttttggggggattaggctgaatatggtttatttggagagcttttagaggtttttaacagtaaataatgtaatcagatttaacatctcttgaatctgagatgtgagggtttttgttttcccattatacttttaagctcttttaccttctttcttaagtcttctcatgtctttgaaattttgggtattagcaatcatttgctgagatggctactacaggatgggtaaagcatagcatgtgaccgtgaattactgatatggaaggagtcagtggacccttcagtagaaacctttgacaaaggcgaagatagcaaggagtagagtgtagttattaatgggtattaaatgaattgtatagtaaaagaccttaagtatcagaagtcagggatatgtgtatttgttttgatttaagggttctgttttcttgactggttgtaaaaaaaatactgcgtgcctgttttaaatatggcattattttgggttttcttttcttttttttttattggttcaccagagtcatctttggttcctctagtttatttttctcttccacttgagtcctgacactagactttctccattgtcgctgcctgctaccatgaccatctgaactttttaaacgtgaaaagtcgaatttcaaataggacatacgttttccatcccagaaatgattgtattctaacagggttaatctttttttttttttttttttttgtctgagatggaacttcactcttgtcgcccaggctggagcacggtggcgagatctcggctcactgcaacccccacctcccaggttcaagcgattctcctgcctcagcctcctgagtagctgggattacaggcgcctgcccaccacacccagctaatttttgtatttttggtagagacagggtttcaccatgttggccaagctggtctcgaactcctgatctcaggtgatctgcctgcttcggccttccaaagtgctgggattacaggtgtgagccaccatgcccggcccagggttaatcttattttgtatgttctttacacacaatcccattttcaggtgtttgtttagcagtattgtacctataatcaaggttttgaagtgtggttagttacaacaggattgaagaatatgagtttgctcatttgctttatttattttctatcattgtgtatctcccatgcataacacaaaagaaattgtctagaaaacacaaagtacaagagcatagtactgttaacactattagcatgtacacagtcagtgaaaaagcatacccattagccctttctccctggtgttggcatttattctactgcttattataagtggtgatttagggcctgtgtagggaatatcaagaaatctctaaatttgatagtcaccagtattcaaaacctttcctgagaattgacatactaatttatacagcacgggattcgttgaattaatcttagatttacatcagtttctcctgtgtcagcctctttccggactccctctacttgaacacaatttgtagctgtaaattgcagcttgtaattagtatattatggcctgttgagtaatacttttaaaaataccacattttttttcaaacagcactttgaattcttcctcagtgcaaatgaaatgtaaaatcttgtttgatcaaaaaaatgcaatgttgagatcaatgtcaacaaagaatgtcatttaaggtaagcatagttgggcagaagctcctaattttcaaatagttaatcagctaaaatacagttttggggggaggtgctcaaattttttttttttccactactccccactttctttctttttggttgtttttgaaggcaggaattctgtattggatttatgcttcctactggtgtgaaactgacacataaagcctcctttgacttcttgtatttccttgttttatacacattaacagctttgttccctccccttttctgtctggcagcctagggactgacactgcagttatagtgaggattatgatctagttgtgtttgcctagtagtatagcaacaccctcttcaagtgagttgtcagtaagataacgtaagtctgttaacgtgagttatgtgaaattgttcacgtgacttccttggaaaacattgtgctttttcattcatccattttgccctcttatggattataaacttaaagtaagaacacactcaaagttaactgacttcacactaacatctttttgaacacctttaatgatgtagaaactgctaagagaactgaaatagcaagcagtcgttgccatctttacccaaaatcacctgagtctaattttctttttctcatattgtacttggctcctttgtacatctttcttgtctacacctttttccatttctttacctttctttttcctgtgacccatcagagtaataaatagtagcaacacttcttatagcacctatttctaatagtatcaaaacttccattgtcaggaggaaaattcatactcaccagaaaaacctcaaacttttcccacatgtaaaatttaatttctctggttgtagaaagagagaaaaaagttttacgggtacttctaaactcaagttgagagtactacatgctttctagttaggccttttattaaaggccaccatttgaaatggtgcggtctgcagcatgtgtccaaggccacgtggcaggagcatcgtttcacagcagggccaagcaccgtgacagctggtcaccagcgagcaatggcaccagtgttcttctgattttagcgccaccctgccgctgcactgggaggagtctaggcagtccatcctcttggcagggtgtggattggccatcagcttagcggccaacaccctggacgtagtacttaagacttgttgaatgcttaacttctaaacattttgcacatggctaattcacatagtcttcataataacccagggggataatacggttacctttattttaagataaggatatttaggcagaaagagttgaagtaactttctcatgatcacaaagctactgggtggggccagagttcaaacccaagaggtctggcttcccagcctgtgctcaaccagtctgtgacactcactcactcactcactcctccctgaaactagcataattgttctttaccatgatatgtcatgtggacattacttttgtttgttttagtatagatttatttttttattgtggtaaagaacacataacatttatactcttaacccattttaaggtgtacagttcagtattgttaggtatattcacattgttgcacaacacatctctagaacattttcatcttgcaaaactgaaacactgtgtctattaaacacaaattccccagcctctcttccctatcccttggcaacccacctttctaccttctgtttctatgatttttactgctttggatacttcacgtaagtggaatcatgcagtatttgtcctttgttggcttacttcacttgaggttcatcatggtgtagcatatgatagagtttccctctttttaaaggctgcataatattccattgtgtatatgtgtgtgtatatatatacacacctatatatacacacacatataaaaataaatacacatatatgcatatatacatatatatacacatatatacatatatacacatatatacatatatacatacatatacacatatatagggcatttaatctatccattcgtctgttgatggacctttgagttgcctctccctcttggctgttgtggataatgctgcaatgaagatgggagtgcatacatctctttgaggtccttctttgaattattttggatatatacccagaattgagattgctggaccatgtagtagttctatttctaattttttgaggaacttctatcccattttccatagtggctgcattttacattgctaccagcagtatacagggttccaatttctcaatattcccaccaatatttgttgttttcttttcttttgacagtggccatcctaatggatatgaagtgatatggtggtttggatttacatttctcttatgattagtgatgtggaacattttttcataggcttgttggccacttgtacatttgtatatcttctttggaaaattgtttattgcattttcacgtccctgacctatttttaattggtttattgcagttgctattgagttgtagaagttccttatgtattctgaatattaaccccctatcagatatatgatttgcaaatgttttctttcattccattggttgctttttcactgtttattgtgtcttttgatgtacagtttttaagtttgatgtagtcctatttgtttttgctaaacacacacaaaactaaaactgttggagtcatttgtcatgccccttgagagtaagctttttggaagttctaataaaatactagattttacttctaggagtatgtcattttgttccctagaatacattctttgtgaaaatatattatcttcatttcctttgatataatgctttttagcagcttaacagaggcattataaaaagtaggctctaaaacaaagctcattctttatgcctataggtgtatatgtttgcattcacctcagtaagtaggaacattggtattttccttagtttaagtatgaattaaaggaagtgtagagaaattagggaaattagcactgttagtaacagtgctgagatttaaatctgatcaagaaccagtgtgcaccccacctttctattatatgataaatccagtttttgattgtgaaagcgaaatatggtcactataatgtttcgtaaattagtattagtatttaatgtgctagcaatgaaaatcccaagatgatactttctagaatttcacaaaatgattgtaatcagattgagggaacagtagtaagacagtagttatagacagaagaaattaatgcaaagaaataatatatatataatgtatagggtatactgtatatattattaaaaccagtataggatgaatggaacagaatcagaattccagtgatagatccaactgtttggaagagtttagtattgagcaaataagagggaaaagaacgaagtaactgagaagaggaaataggaatatgaatttaaaataatgtaaatgaaatttaggtctcatcttctctagtatattggtttaagagtctctaattttttttgttttttttcttatctatattgatgacatcttttattataatttttaaaacctcaaagcagagattttaaaagcaaggcaacagattggaaaaatattatggtaaatttatttacttaaaagaaaatatatttatcctcaaattatactgaatagactgtatacaacaagaaaaatacagttagtaaatagactcttgggaaagtgttaaaccttgttactaattacaggtgaaaattaaaagaacacgatacttactaaattagcaaattaaaaactcagggctggccgggtgcggtggctcatgcctgtaatcccagcactttgggaggctgaggcgggtggattatgaggtcaggagatcgagaccatcctggctaacatggtgaaaccccatctctactaaaaagtacaaaaaaaaaaaaaaattagccaggcgtggtggcgggctactcaggaggctgaggcaggagaatggcatgaacttgggaggtggagcttgcagtgagctgagatcgtgccactgcactccagcctgggcgacagagcgagactccgtctcaagaaaaaaacaaacaaacagaaaaaccccaaaaaactaagcaaaactcaggctaagttgttccctaggaaaatatgattttctgcttgtaaaataaattgcaataattttctatagagaatattctagataaaaagctgacatgtttaacatgcttcattcatttttcttcattcaacaagtttattttgaattactaatatgtattatatactgtgctcttgcagttcatttgtaaagttgctaataattctttgatctggaaatttcacttgagggattgtaatataaggaaataaagaaaaactcattttgtttaaaagtatttatagatatgcaatatgtaattttaaaaagctaggaggaacctccaagtgcctagtaattgggaaatgattagttagaccacatcacattgacattaaacacaaaaatgtgtagaccttagatacacatatcctgcaaatattaagcccaaagaatagaacctacttgtatggacctattgattgcaactacctaaaaaattacagctggacatagagtttggaagaaggaataaaggtgtatgtttagtttacatatagcacagggccttttttacattttgtttttttactcttccctttagatcattattttacttcacgcagatttttgttttaaaaggcacagacacacacataacaaaacactgtggcaagatacttttttccaaattagattttacttcttattctatggaaggacatttttaggaaataatgacaaaaatgttgcaatctaatcgtataatagtggtgtgggtgtattttttcccccagatttttaactcattgcatgaattagcaaggggtcatgatacatgaagtacatttctgggatcttactattgtatgtatctcaggaaagtgtcttgcttactttatggctgagaatgagagcttctatgggctcccattccacactccctcctctcttttgggtttcctcagctgttcctgcctgggccttgcacagatgcgtcttcttcctgtttctatagatgaactggctaaggcctctccctgtctcctattcaaagctgtcattccagctctttctcttttgtctcataaaatttcttcttctactgggttattcccataagcatggacacatgctgtaatttttgcagtcttaaaaatttctgtttctgccccactttatctttcagttactatcctatttgtctcctttattttacataaaacagttgcctatattccttctctgtagttcctctcttccctttttttctgaaccctatccagacaggctctcatccttaccactccactggcattgctcttgtcaactttactgtgccctctgtgttggtcagtgcaaggactgtcttcagtcctacttgtcctaccaaaggcatttgacacaagtaaatcatgtctttatgggccattttctttggcttttggacaccatattctcccagctttttctgtaggctgctctttcccccatctcctttgcagattcctcttcatctcccagacctcttaatttgggccagcctcagagctctcctcttctctacatttactcctttggggatctcatcttgtctcatggcttggaataccttctgtgttgcagagaactcccaaatctagatttcagcccagacctgtctcctgatctccagatgcttgcacccgacttccctgttttgtccaccatctcctgcttagcaggtcagagcattcctcctggggcttgcaccaaaagccttggagttgtccttgactacctcatgtgccccttatccagtcggctaggaaatcctttgaatctaggccctaattataactgaaatctgtttcttatcacttccactacaatcaccctgatcccaaatgccacccatctctcacttggagtatttcaagagtctgctacgtgttcaccctgcctttttcttgacccctctgctttctttttatacacatgagagccagaatgattcatttaaaatataaatcagactatgccacttctctgcccaaagcccctgattagctccccacctcagagtaaaagctagtggtctgcagcaccccatgggatctttccccatccccacttcttctttgacttgatttcctactgcttttccttccctccttttccagctgaccccgcctctaggaacacaatagacatccttccaggcctttttatgggcggtttcctctgctgggaagcctctgtccagattcctggagcactctttccctttctctcttgtgtttcctcaagcatctcttcttagcggggtcttccttgatcattcggcttaaagttgcagctcccaccaccagttttccctgctttatttttctctatagcagtttccactagccaaaacacttaatggttgtgttacttactgattgttttctctccactagagtgtaatctccatgaaggcagattttaatttttctgttttgtttattgctgttccaccattgaatagtgtagtgcctggtacacagcaggcatctagtaaatatttaatctatagataacaactaaaacagtataatcctaaggaataattttgagctgagattggatcaaggatgttgtaggaaatttgtgtagtggatggaagtaattaaatgttctctagggttgcttctgacactactctatggtttcaaactttttaaagtggttgggagaaaataggtattatttttaacttcaattaatactttgaagtctaacattgttttcagtacctgcaatgaaatgagtctctccatgtatctagggaacctaaacaaacaaaagttgatttgtgtctgaaaaatgatctgacagactctcaaggatgaacttggagtaattacacttagatgtgacagtggaatcaacagaaatgcaaacttattacgtgggatatatctattccacatgttaataatgctctaatgtctcctctctttcctggcagacagatttgtgggaagagggattactgattcacagacttgcatcttcgtgtttgaacctggaattaaagcaggagtggaaaggcattggagtcgtagttcacccagactgtaaagaggcttgatcagttttctctgaccttcacatcttctgtctgatgactcaagttttcaaactttagtgagtctttctcctggagaatggagatacggaagttgaaatctcctcttattctcttcttagcagccaatccacgtttcagattctataatacatttcactaggtagctattgagcatctgtattgggccaggcacattgtggcttgggattcaaaaaataagacacattttatttttcattatggtctgattataaatttaggggacaaaaaacatgtgtaagtgtataatgatgtgataaatttctaaagatggtattacatatgtggaatttaaaaaataagtaccataatcttgaggttgatctgatccttttaaatcatccagatttaattctggatggggttacgtttcaagtgaagccaatctgcaactcttcatagcaaatggagtggcactctcaccagtccaaattgtgataattaaaacactggtcttaatattgcattttaagcttatatttgaatatgagtgcttcaaataaatgtggaaagttacattgtccaacaaaataattaaattatgctgtgaagacttggcttgagccacatttcctggtttactgttctagtttttaatcttaccccataaaccctctatacttgtgaaaccattcttgccaccccagacagaccttattatacctctctctatgacacctctattactgcccatagtgatactcatatgtcattaatacagacagtaatagaaaaatatgtaagacacagtcgtgcagaggaaggttgatgaggtctacctggagctggcaagtcaggtttcacaaaaacctaattcatagagttattgtatggattaattgataaactattttctgttaaaagttaaacgtaattcctgctgcttattagcacatgctcagaaaacattagccattattgtagtaattaatgtgaatttttcttcccattttatctctgttggagacagacatcaacatattttggattggtgaacaaaaccagactgtcctgaattaagttttcctggcacatgtgtaattaaaacctctgtaggactgtaatttgcatattaggtagtatgagtacaaatgagttagttacctcatttcacctttatagtttctggttaaggagagaaagacattttgaaattttcgtagttcataatttgaaccttgaaatttaggattgtacaaaaagaaagggaatttaatgcatcaaatatatgacatgccattattctttgttgccagtagttggccaatttcaactttaattgaagtacaggcttttataatagtttgcaaaaacacagcaaaaaagtctagcaataagcttttaattttagatttcctccttatcctgtagaataaagttttaacaatagtgtcaacataagtaaattataaagaatctaatgacattcaagtgaatgaggatactctatttttgacctactgtacaaattacagtgcataaagtggaattcaaggatcttattttacacaacataaagttcagccatgtgccacataatgacatttcagtggaggatgactgcgtataggatggtggtcccataagattataatactgcatttttactgtaccttttctatgtttagccatgtttatacaaaaataccattgtgttacagttgcctacagtatttagtacaataacatgctgtacaggtttgtagcctaggagcagtaggctatagcatatagcttaggtatgtagtgggccgtaccatttaggtttgtgtaaggacactctatgaagtttgcaaaatgtattcctgagaatgtgtcgctgtggctaagcaatgcatgattgtatctgcatgtgcacatctttaccaagaatatcttactaaagattctgaggcagtgagttttttacttcttcatagataatataaaatagacaaatctaaaggactttatttattatgaatgaatagttcttgaggctggggaggtaagaaccctgtttaaaaaaaggtttataacctgattaaggaaatcatgaatgttgcaaaagaaacacatgactttgttacatttgtttggtaattatgcagttatttattcatctgtgcaagagatcattagagtctggattattttcaaaattttagtttctaaatatgacatgcattttcaaataaacatgaatatatattaagaatacagaattatagttattaataagcattaaaactttgcctatggatagctgctgctatggttaatagttaccttttatttgctttaagtgaacatctggctacttaatctaactcaaaatgatttatagacataaactcaaagccactgtcagtaaatttttctttatttttaagcagtcatgaagataagatacgcagagataagccatatgagcaaatagtgccttaattgttaaaaagggaatgaattctaggaattaagatgaataaacatgactagtttctagcaaaattataaaatattattaatgaagatttggaagcatttagaaaagagtctgatgattactaggaacttttgtgtgttcactagaaatatgccttattaaactaatctcttttgtttttcctttgaaaccatttcttggtgagtagattaggaaaattctgcatataaagcatttggcatactcctctttcattgaatatatttgaagaacattttctttgtgttaataaacaaaataagtgagcaaaataaactttaatctctgaaatttggccaataaaaaaaaagaagcaaacatggtttagtaggatgccttgtcagtgttgaaaagtgggcccagaaggtctctactggggtgcaatcaagcgctcagtccttcagctctgtgcttgtcaaatccagggagcccagagcaagctaaatggctgttatgcttgataacagagctaatattaaaaataactttaagatactggaatgctgttaaaaactaagaaaagttaaaattcataggaaatgtatttataatatgtatatctccatatattttacattttaaatatatttgcattattgccgttaatccactcttagagctgaccaacagtgagacagactccttacagagaacactaggagagagtttacaaagtctatacagggaggcggtcagtgtaaggtgcagggtgacctttgttgaggagatgaagaagtcttccttgtattcagagcctgactgaagggcttctctagtcccgcttgattctaaaattctcaagcttctttattgattacaattgagaaatggtttcatcaaagctgccagagaatttgtcccctgaaatggaataaatcatctgagatcctcaagattgcaaattactaaagaggaagacagtgtctctttttttgtaacttctatgagagttcagtagatgttggttggctcactgacaacacctgagttattctatttgattacttttggcttctgacttttacattatcaaattcacttttcttggatatattttaggtcttttgttatgaaatcaagaacattatgttctttttacagagagagtttataaagtacggagatgaccactctgaaagccatatgcccctagcaccctctgaagcacctcagtcctctcctgactctttcagtgattcattctgccatttgcatgattcctctgaagaaaaccaattatttagtgttcttgaggtgattgacttgcaaataatcttgtgctcttaaagcacatttttggtaaattttcaaatttctgaatactagaaattatttctttagttataattgagtgagatcagatattcacagactaatagactctcaaaaccagtgggtgctgccttcataccacacattttaccatgctaggataaacattcatcttcaatttttttgttgttaaaaaacatacttcaccaaggaatttattatcccactcattttatcacatacctcttctggagcttagggtctcagccccttcctgtctcttcttttgtgtctcccctgctacacccctaccacactttggtgtttttgaggtttcttaatcttaagtaaagtgtgaataaaaagcatttttagaaagtcttaccatgtttattgatctgtaacatgcaatatacatactgtgcttgctgtattaacacagctccaagacaagacccctagcttttctacagctagactaactcccccaaatcccacttctgtagagctttggagctgcagcagctgttgaggtaatggttactttcctcaaaaggtagccattatgatgactggcttcaaaaagtaaaaaaaaggtcttttgaaaaattgacagttctccccacaaagagttgagtgactggtcagctacaatttcttctaacttgtaattccttctaatatatgatgttgaggttttagagagagcagttaaaataaagtggtctaattagacagtgtttgcatcatctttttcagtttagatgttgaggaagtgttcagatcctaccaagcaattttttcttcttttgagtgagaactgtctatacttttgtacttagtgtctttacctgtcccccttttgagctttatgtcttaaagaaatgttatgccatttactccttttaatagattaaacttattttcaggttattgaagaaaacctgtctcacagaatcataagacaaactgtatgaaactcttggaacagtgcctggcacatggtagtatacagtaaatgttatctgctgtttcattttagttttaacatatctaccatgcacctgcctcaatggaatagtgtaaaaggatatttatacttacaatcagtataaattatagttatttgtacttataatcagtataaattatagttatttgtacttataattagtacaaattatttaatttatactagtgagttttatgaatttgtacaaattaaccccttctgagccctaggtttctcagctttatccacttcatggtggtttaatgagtattaagtagtagtacagaaggttaactggtacatgtaacctcctggtagtgttggcttactctggtctcttatgaggtaagagttccttaaggacagggaccatgtttttgtgtttatcccaggatctatcatagcctctggcacatagtagatatttatttagtaaatgcttgtgggttacataaatgggagcattgggaaggagaatgaacagaagaatgtgtagaaatttttctattgtaggtaacactcttccaggagaaaaaggttatttgaaagccacaggggtcttaaaaactcagttttttcatttaaagcttaaagcgttttgatatttacttctaaagtattacaactaatatgaccatgactgatgaatggaagaaacacagaggggtatagactggaagagaaaggagagagggagagaaagactaagagatttagtgagtactatgaaaatgttaaactctaaagttacactcttgaaagtagcttcaagagtcttagctcaattatcaggggcctttggaaagccaaataggtgattacctttattttaaaaattacttgcttttaagactttgaaggatcctttctgaatggaagatacagccaaaggtggtagtgagaggtatggaagattgaggaggatgtgtgtggttgtgtcttcagtaaccagagcaaacggcctgagattagaggaaatcaatctgaggactgggtacattttgtccactttcactgtcagagctaccaagcaattgggaggtaaggttgtagagttggttttgatgtcctgtctcaagacctaattatgcctcttgggattaggtgaggaaaatatgtgtcctgggactggccgttggtaactgcattagagaaaatgagcttgacaggtctcccacaatttggagatttctccagaaacatactgcagtattaggtccagggaacaatcctgatctgcccttggtttagaggcaacacataatcgcactacctatcagtttagtcctgacgcctatgaatgcccagttcttccttgtcattcagcttgtggataggagacaacaatgcatgtcttgtttcttctcgtatttgtaactgatttgcttttaagactgtcttgtctgaattgccttctgctgttggtgtaataagaaaaagcatgtggtgtatttaaccaatgggggaaaatatttcttatatatagagatgaaatagacatgtagctagagaataggcgagaatagacatgtagcttgtttgatggcccatgtcatttctcagatttactgctgtgtttttcttaacagctggttacaaaaacaagtggcactaaaggaaaagaccatattttcttttatcatggccacaggtgtttatttttatttatttttatgagtatataaaatgaaaagtattcagattaaccggttattcagagaggtgatatcaggtggggagtagtgggattaaaaaaaaataccctcccatgccacctgcattctgattgccaatgcatccgtgattggtgccttgctcagcatctcccaggtgccatcacttcagaagtttcccagattttgctctttcttagaaggcagcagggagggccaggcacgatggctcacacctgtaatcccagcactttgggaggccgaggccggtggatcacgaggtcaggagttcaagaccagcctgactaatatggtgaaaccctgtcgctactaaaaatacaaaaattagctgggcatggtggcatgtgcctttaatcccagctacttggtggaggttgcagtgagctgggattgtgccactgcactctaggctgggtgacagagcgagactctgtctcaaaaaaaaaaagaagatgggagtagcagaaggaatgcgggacgtgaaattggaaatcctgggtcctgctttcaaatcttttatgtaaatatgtgattttagataagtcacttaatgcttgagcttgctttctcttctgtaaagtacaagttatatgtaaagttccttctaacatagccatttcattggccagataagaaagaaaaaggagtactgtcatgatctgccacctacttaggccccttctgcaatgtgaaatggacactgtgagtataaaaacatactcaaaagtatattttttaattctctcactcaacagtcaacacaaaagacttctgtgaccaaatgtgggggatttctccccactaacaagcaatcagttttgcagcagacaccagctggatgtcctctaattcagttctcacactgtcaccctagaaatagcgtctgattccacaggttgagggcacagtcctcaagacctgccaccacccccaatgccaacagccttcagacaccggttgcaaatttgggtctctggaactttgaccaaccaactacttcaagttggagtttttacaacaccttttttgggttatattaattttctagggtggttcacagaaatcagaaaacagtttggtttactggtttatttcaaaggatacaaacagataaagagatacatagggcaagacttggaagggtcctgagcacaggagattttgtccctgtggaggtggagtcctccactgttggtacatggatgagtttttgttcccttcctgtcaacctccatatgttcatctgtcgagaagtgctctgaactcagcccttttcaccttttaaagaagtgtcataatcaattatatcattacctaggcataattgattaaaccattggcgactggttaccaacttaaccttcagcttctctccccttgtaggttgggggtcccaaccatctaatcctgccttggtttttccagtgaccaacccttatcctgaagctgcctaggggctaccagtcatctgtcaacttactagcatacaaaaagacatcactttgcagagtctaaggattttaggagttgtatgccatgaaacaagggtggaagacctaataaatatttcacactatcacagacagcaagtggagcatcaggccttaagaggagtcctcaatcctagtctcatacatttacaaaatgctaaatacataacatgaattcatttaaaaaaaaatgaagctgtaagcccagtgctgccttatagtataattttttacatttaccctaaaaacattttaactttcaatagaatgctccattggatttggtgctcagtcctggacaactcttcatttccagtgacctgacttaggttgaattttgttatttgagccagccccgtgagtaagcttggcttgctggctatttgtgtgtttcttgttatttaagacatcttgctgaagttgaagagtgcagtctttgaaagagtgctttttaatggaaaactgttgcattaaaaagtggctttgtgtttttatagaccacacaattctaagccaaatgacacagtttcaaaatagctattgatggatagaacacacaggtaagtacttgagagcctggtggcagaagttggaagtatttgtaagaagaaagcacagcatgagccagatctagagtttcctgtttgatcattttttacaatatcttagtatagatttgcagttaccctgccagatgtgtacttcatcttttattagacacattcaaatatatcagttaaagagcttttggttcagtatctgatattcggagcatttattctaatattgccttttactgcctcccaaatctatacttgtattggtactgtgtacagtaaaggtgaatgcattttaaagtataatgaatgatacctggtgttgatcgaaatggggtaagtcttccacagcctgtctctccactgattacaaccaagaactctggaaataatgcaaaatgcagctgaggattctgaaaagtaaacaacagcaggaagattgggtagggaagtcaaaatttgaagacctactggactggcagtgaatttactgtttgtatcatcttttctttcttaatctcctggcttttacctttggaggggtgagtcccaggactgctcattgaacaccaatggcagaaaagcccaacagaaaccccctccttctagtcagaagattcagaatagggacccttgtgagccagaagatatgggaggagttccccatcctttttttcctttttctccttgccctgccttgaggccagcccagttaaaaacctgcagtgctgcagtggtgatggcagtagtatagcactatggatgctgagatacagccctctttctgtacaaaggaaatagaaaagggatccctggggtctagagagtgtgggagggaatcagttattttttctctgtagtttcccttgctggtatgctgcaaggacagtcccaattatgtggaactgaaaaacagtgtaagggattaagttctaagagaaaatcctggttttatgcatagcagatttggaaaagaggaccctaggggccagaggggtcagggaagtggtggagaagagagctgaaaaaggggatcttctgtttctgtgtataagctgaaacaagtcctgagctcacccctaagcagcacatgcacaattcagacccaaaggggcacagcaaatgttttgagtacagaactgtgacataaggtactacacagtcccagtctatctcctgagtaatctgaataacatagctattgaaaattgctatttaacaagatggctgactagatgcagacaggaagaacttctcccactgagaaaccagaccatcaggaagaactgcatactccaaacagatcttcagaaagaaggtattgagagtagacagaagaaggatacagaccccgggctgaagtgggggaggaaaccctgcatggagttgctgagcaccaggacttattcctgaccctgagcagctcctggggaatgggcgagtgaaataggcttggagtggcccactctcgttacagacctctagtatcttcactgcaggagaccccataacccctatggatatttgagctggcagagacagaactccagcttgcatggatccccaggggtctggcgtgggaatggctgcagtggagcatagtcatgggtgctcatccttcaaggcccactgtactcctctaggtggctttagcctttttggctgccagacctggacagagcatatcttgctcatgggaaggggcctgtctgatctgagtgtccccctatttgctggcctatcccagggtccctgcctggccacacctgcttgcagcatggccttggttgcccagctgaggcacttgccggcagctactgccatagctcttttgttagaatatccatcctcacagagagcttctgtaggagttgtaactgattacaactcaaaactctggaaataatgcaaaatgcaactgaggattctgaaaagtaagcaacagcaggcagattgggtagggaagtcaaaatttgaagaccaacaggtatggctgaatttactgtttgtatcatctttcttaacctcctggcttttaactttgtagggttgagtcacaggattgctcagtgaacactatgtgtacatgccgtgtgcatgctaacctcactaccacactgtcactggtgcacacatgtgcagggacccctgctgccttgccgaagcccttttgctggcagactgcattggagtgttaccagcagactgggaacacctcagccccttcagcacagcaggagcttaacctcaaggggccagagaaaaaaggctgtgggcctggtcccaggtccccagggttagagcacacagcctaggaatgctaagctgagccttggccccctgcaatcatccagacatgaagccaatcaatttatacccagcttataccactgtcaaaccctcaagggcatcaaagaatataaaaagcaaaaagccctatatgaaggacagcaactttaaagattaaagaaacatcatctcacacagatgagaaagaaccagtgcaaaactctggcaattcaaaaagccagagagtgtcatcttacctccaaatgaccacatgagctcgacagcaaggattcttgattgaaatcactgaaattatggcatagaatacagaatttgcatggcaaataaggtcgtccagatttaggagaaagttgaaactgaatccagggaatctaaggattccaataaaatgatacaggaactgaaagatgaaatagccattttaagaaagaaactgttcttctagaggtgaaaatctacaagaatttcataatacagtcagaagtattaaagcagaatagaccaatctgaggaaagaatctcagagcttgaagaccagttctttgaatcaactcagttggacaaaataaaaaaaataaaaatgaacaaaacctctgggaaataagggattatgtgaagagaccaaacctacaactcatttacattcgagaaagacagagagagcaagcaacttggaaaacgtttttgtggatattgtccaggaaaatttccccaacctcactagaaaggtcaacatgcaaatttggtaaattcacagaacctcagcaatatactacaagatgtccatcttgaagatagatagtcatcagattctccaaagtcaatgtgaaagaaaaaatattaaaggcagatcaaagagtaggggcaggtcatatacaaagagaatctcattaggctaacagcagacctttcagcagaaatcttacaagccagaagagattggggggcttatattcagcagccttaaagaaaagaaatttcaaccaagaattccatttccagccaaactaaacttcataaacaaaggagaaataaaattttcttcagacaagcaaacactaagggaattcattaccaccacacttgctttacaagagatgcttaagcaagtgctaaaaatggaaatgaaatactattatctgccactataaaaacacttaagtacctagcccactgacactatagagcaattatataatcaagtctgcataacaacctactaacaacatgttgacaggatcaaatcttaacatcaatattaaccttgaacattttaaacaaggccaggtgttgtggcttatgcctgtaatcccaaccctttgggagactgaggcaggtggatcacctgaggtcaggagttcgagaccagctgggccagcatgatgaaaccccgtctctaccaaaaatacaaaaaaatagccaggcatagtggcacatgcctgtaatcccagctactcaggaggctaaggcaggagaattgcttgaacctgggaggcagaggttgcagtgagctgagatggcaccactgcactccagtctgggtgacagagcaaggccccctctcaaaaacaaaacaaaaccttgaacataaacaggataaatgcccactttgaaggcagagtgtgacgagttgcataaagaagaagacccaactgtatgctaccttcaggagaccatctgaaatgcaaacccactcataggctcaaagtaaagggatggagaaagatctatcaagcaaacagagcaagagttgctattcttatttagaaaaaaatagactttaagccatcaatggtcaaaaaggacaaagaacccaggtgcggtggctcacaccggtaatcccagcactttgggaggccaaggtgggcagatcacctgaggtcagaagttcaagaccagcctggccaacatggtgaaaccctgtctctactaagaatgcaaaaaattagcgaggtgtggtggtgtacagctgtaccagctacttgggaggctgaggcatggtaatcacttgaacctgggagatggaggttgtagtgagctgagattgtgccactgcactccagctgggtggcacagagtgagactccatctcaaaaaaataaaaaggacaaagaaggacattacataatgataaatggttcaactaaataaacagtcttaactatcttaagtatatttgcacccaacactggtgtgcttagatcaataaaacaagtttgtaagagacctatgaagagacttagataaccacacaataataatgggagacttcaacatgtcactgacagtgttagatcatcgaggcaggaaagaaacagatactagggacctaaacttgacacttaaccacatggatctaaaagacatctatacaatatgccacccaacaacaacagaatgtacattcttctcacctgcacatggcacatactctaacattgaccacacatttggccataaagcaattctcaacaaaaacaaacacaaaaccctaccaaccagtctttcagacctcagtgcaataaaaatagaaatcaataccaagaagatcccccaaactgtacaattacttggaaattaacctgtccctgaatgacttttgtgtagagtgaaattaaggtacaaatcaataagttatttgaaattaatggaaacagatacaactcacctgaatctttgggatgcagctaaagcagtggtaagaggaaagtttatagtgctaaatgcttacatcaagttagagctcagattaacaacccagcatcacacctagaggaactagaaatacaagagggagccaaccctaaagctagcaaaagaaaataacaaaaatctgagctgaactgaacaaaaaccacaggtgaaaattcatataaaagattgatgaaaccaaaagttggttcttcgaaagaatgcataagattgagagactgttagctagaccaataaagaaaaaagatcctaataaacacagagatgacaaagatgacattaccaccaaccccacagaaatgcagaaaacagaaccctcagaaactattacgaatacctctatgcacaccaactagaaaacctagagaaaatagataaattcctggaaatgtaaaacctctcaagattgaactaggaagaaatggaatacttgaacagatcaataatgagttctgaaattgaatcagtaataaaaaacctaccaaccagtaaaagccctggaccagagggatttacagctgaattttatcagatgtataaagaaaagctggtatcaatcctattggaacttctagaaaatattgagtaagagggactcctctctgactcattatgaggccagatcattctaataccaaaatatggcagacacaataaaagatgaaaacttcaggctaatatccctgatgaacacagacacaaaaatccttaacaaaacactagcaaattgaatccagcagcacatcgaaaagctaatccaccacaatcaaataggccttattcctgggatgcaaggttgattcaacatatggaaatctatgtgatttatcacataaaactgaaaaccacatgatgatctcaatagacacagacaaggctttcaatgaaattcaacattccttcgtgtaaaaaaaccctcaacaaagtaggcattgaaggaacaaacctcaaaataataagagccatttatgacagacccacagccaacattataacgaatgggtaaaacctggaatcattttccttgagaaccagaacaagacaaggatgcccaatctcaccactcctattcagcatagtactggatgtcctagccagagcaatcatgcaagagaaaagtaaaagtcatccaaataggaagagaggaagtcaaaccatatctatctacagatgatataattgtatatctagaaaaccccatactctctctccagaggcttctagaattgataaacaacttcagcaaagttttaggatacaaaatcaatgtacaagtatcagtagcatttctatacatcaataacgttgaagccgagagccaaatcaagaatgcaatcccattcacaaaagccacaaaaataataaaatatctaggaatacagctatacagggaagtgaaatatctgtgcaatgagaattaccacacactgctaaaggaagttgaagagaacacaaacaaatggaaaaacattccatgttcatggataggaaaagttaatattgtttaaatggccatatgtccaactcagtttacagattcaatgctatttctacccaactacctatatcatttttcacagaattagaaaaaactattctaaaattcatatgcaaccaaaaaagagaatgcatagccaaaaccatcctaagctaaaagaacaaaagccagaggcatcatcctaccaacttcaaactatattacatggctacagtaaccaaaacagcatgatactggtacaaagacagacatatagaggagtggaacaggttagagaacccagaaataaagctgcacactgacaaccatctgatctttgacaaagtcgacaataacaagcaatggggaaaggattacctatttaataaatggtgtttgaagagctggttagccatatacaaaagtttgcagctggaccctttcctttcttcatatacaaaaatcaactcaagatagaacaaagacttaaacataaaacctaaaactgtaaaaagtctagaaggaagcctaggaaataccattctagatataggccatggcaaagattccatgatgaagactccaaaagcaattgcaacaaaaataaaaattgagaaataggatctagttaaactaaagagcttctacatagcaaaataaactagtgtgagtaaacagacaaccttcaaaatgggagaaagtatttgcaaactatgcatccaacaaaggtctaatatccagattctgtaaggaacttaaatcaacaagcaaaaatcaaacagccccagtaaaaaatgggcaaaggacatgaacacttttcaaaagaagacacacacagccaacaagaatatgaaaaaatgctcaacatcattaatcattaaagaaatgcagatcaaaaccatgatgagatagcatctcataccagtcagaatggcagttattgaaaagtcaaaaacaaaaagcatacgaaaaacatgctggagaggctgtggagaaaaggaaacacatacagtgctggtggtggtaatgtaaattagttcaaccaccgtggaaagcattgtggtgatttctcaatgtaaaacagaactaccattcgatccagcagtccccttactgggtatatacccaaagaaatataattcgttctatcataaagacacatgcaaacatatgttcatcacagcactgttcacacagcaaagacatggaatcaacctagatgttcatcaatggtggactggataaagaaaatgtacatatacaccatggaatactacacactataaaaaaaatcagatcatgtcctttccagcaacatggatgctgctagtaacattatccaatgtgaattaatgcaagaacagaaaatcagatacttcatgttctcacttataagtaagagctaaacactgagtactcatggatgcaaagaggaacagtagaccctgactgggcttatttgagggtggaggttgggaggagggtgaggatcaaaaaactacctatcaggtactatgctctctacctgggagatgaaataatttgtacaccaaactccagtgatgtgcagtttacccatgtaacaaacctgcacttttaagaaaacatttttagcaggacccaatgaaaacataatatccaacatgttcagaatataatgcaaaggcacttaacatagagaatcagggaaatctgacaagttgctaagggaaaagataacaggtgctcactacaagatgacccagatggtggatttatcacacaaaaactttaaattggctttggtaactgtgatccaagagataaaagtgaaaacacttgcaatgaatggaaagatagaagttctcaacagaaaaacacgtactttaataaaggactcaaatggaaaatggattgatttaatggcagagagagatgaaaaaagtgagtgaacttaagacagataaatataagtaattcaaacaatagaaattacctaaaataagagggaaaatggaaaaaaaatgaaccaactcttaaggacttgtaggacaatatttggatttctaacatttgtgtcagcataatgccagaagaggaaaaacaaatatctgaagaaaaaatatttaaagatacaaggcctgaaaactctccaaacttggtgaaagacataaacttacagattcaagaaactcagcaaacttcaaatggtattatttcaaagaaagccatgcccagataatattataatcaaattgctgctaatgaaattgttgggcatatcaggagcttgtagtcaccagtctgctctaacaggtaaaaaatgggacaaattgaaaaatcagcagttcttcctggacctaaagagaagtgaggtcataggacaaaccactacccccaaaactggagaggcaggtggatacagctaaccataatttacttgagtgataaccaattaacaaagtcttccatgggaaacattgcttgtataggaaaacctgcattatagttgacaaattgctagagattcactgtggacaaatcttagattttaaaaactccaggaggacctagtaagcagaagtgggtggaggggtcttccactcttatgaatttcacctcttgctgctctaccaggttttcacagtgaatatttgagaaaatttccctttgcttctggcacaaggaagggaaaaggagccattttgaagtatgccagagtactctgttttgttttgtttttaaatgaggtctgcttcagaaaaaattagttaaaacacagtgtaagtggcctggggtaagcaaagcacccaattctagttctctctagccttttatttgagaaaaggggaatattaaactcctctaccctctagccattctgttccaactaagagagaagagaactgagaagcacttgtgaagttcccagtccagaggcacagcctcactaaagcttgagacctaatcataacactgtagagtgtttctccttctcctacaccttaccactttattactgacaatgtatttatatccgttaaccagtgtgtcatgtctggctatcaagaaaaaaatgagaagatacagtaaaagggggaaaaatgggctgaaggaagagacagagcaaacatcagaatcaaactcagatatgtcaggggttctggaatcatcagattgggaactgaaaacaactatgaataataagctaagggctctaatggataaaatagcttgcaaggacagatgggtaatgtaagcagagagatgataattctaagaatctgtaaaagaaatgctagagatcaaaaacactatgccagaaatgaagaatatggggctgggtgcagcagttcatccctgtaatcccaatgctatgggaggctgaggcaggagaatcacttgagactgggagtttgagaccatcctgggcaacatactaagactgcatctctacaaaaagttttaaaaatagctggacataggtggtgcatgcctgtagttccatctacttgggaggctgaggtgggaggatcccttgagctcaggatttggagtctgctgtgagctgtgatcacacccatgtcctctagcctgggtgacagagcaagactccgactcaaaaaaaaaaaaaaaaatgtctttgatgggctttaatagactggacatggctgaagaaagaatgtccaagcttgaggatgtttttaaaagaatcctccaaaactgaaaagcaaagtgaaaaaatactggagtaaacaaaccataacggaatatcagaaccatggggacaactacaaaaggtgtaacatacatataaaagaaatatcaggaagagagaaaggaaaagaagaaatatttgaagcaataatgactgagcatttcccagccaaaccacagatcctacaatttcctagttgacaaagcagaataaatggcagaatagctatgtgaaggcatgtcatttttaaactacagaaaaatcaaaggtaaaaatcctgaaataagccagatcataataaataatattatatattatctatataatagcaaagataagaatacctttttctcaggaacagtgctagcaagaagagagtggagtgaaatatttaaagtgttgagagaatgaagccctaccagtctaggattttgtaccctgttaaatttttccttcaaaagacaaggataaatagaaaattgcttaaacaaaggaaatttgttgccagtagacttgccatgcaagaaatgtaaaaaatgatatgtcagaaactcagatctacgtaagaaaacattggagagaaataaatgaaggtaaaataaaactttcattttttaattaatcattgatctgagacaacactttattgaaaatagtagcaataatgcctttgattatgtgtgcttgtctatatatatacttgtctatacttaagcacatatatacatggtttgtttatggttcatttccccccagtattttttctccttgcttttcagttttggaggtttctgttacatacatatatcctcaagctcagagactctttctggtgtgtacatgtgcttgtatgtgcatgtgtgtgtgtatatgtttatgcttatttatatgtgaaatgcatgacagaaattatacaagggatggatggaaggaattagcattattttgctattataaggtattcatactactcatgaaatgatctagtggcacttgaaggtggacctgaattagttgtaaatgtatattgcaaactctagggccagcacaaagaaaaagtaatgaaagcagtataaccaatgtggtgagaaaggagtgaagataaaatcacgtaaaatgctcaactaaatccacacaaggcagaaaaagggtgaatgacaaaaataagaacaaataaatgaaaacaataaatatggtagactttgatctaattgtcagtaatcacttcgaaggtcagtggtctaaatgtaccaattaaaaggcagattgcaggagtgcctataaaaacaagacccaactttattgctgtctatatgaaactctttaaatataaatacacatggattaaaagcatgggaaagatatgccatgctaacattaatcaaaagaaaataggattagctatattaatttcaaacagcagatttcagagcaagtaaagttatcagggataaagacacatgagttctataatggtaaaagtgttagttctccaatttaccttatgtgcctaataacagagtgaccaaattctcaatgcaaatactggtagaactgtgaggaaaaaatagatgaatcactattatagttggagacttcattacccttctatcagaaatggccagatttagcaggcagaaaatcagtacagacattgttgaactcaacaacaccattactcaactggatataactgacatctgtagactacttcatccaacaacagaatacacattcttccctagctcagatagaacatagaacgtagaacacattctgaactgtgaaaccttaacaatttaaaaagaatacaatcatataataactgtccttaggctacaatggaattaaacaaaatcaacagcagaaggatagctggataattccaaaatgcttgcaggttaaacaacacacttctaaataacatgagtcaaaaaatctgaataaaaatagcaaaaaatttagagctaaatgaaagtgaaaaatgaaaatttgtgggattcactgaaagcagtgcttttaaatttatagtatttgatgtatttagtaacagaaggagaaagtgctagagtcagtcttctaggctttgaccttaggagacaggaaaagagggaattaaatccaaggtaggcagaagataagaaatagtaaatattggagtggaaatgaaattggaaacaggaaattgatagaggaaatctacaaaacaaaaaactggttatttgaaaaggtaaagtaagcagagctttagtcaggctaagaaaaaaagagaccacataaattgcgaatatcagatatgaaagaggtgacagcactacagattccatggacattaaaaatgacaaaggaatactatgaataactctatccctacaagtttgataacctagatgaaatggaccaattccctgaaagatacaatatatcataaccttccaaaactgaaagcaccaggttcagatgggtttacaagtgaattctagcaaagatttaagagagaaactgtaccaattgtttagaatttcctttagaaggtagaggcagagggaatgctttctaactcattttatgaagccagtattaataccaaagccagaaaatacaagaaaactatagaccagtatctctcagatacatagatgtagaaatcatcaataaaatattataaaattgaattcaacactaaagacatataccattatgaattgggatttgtcccaagtatgcaagactgattcagctttttaaaattgatattatcacatcaacagactaaataatcacatcatatcaatagaatttcgagaccagcctgggtaacagagcagtaccctctttaaaaaatagtaaaataagaagaataactaaaaagtgacagtaatcaagacagtgtggtgaaagaatagacacgcgtagatcagtgagacagagagcccaaaaatggactttttaagatgcttagcagcatttctggcctgtattcactaagtgccagtagcaaaacttctgctggtttagcaaatgtgtccagtaggtgacagttgtccctaggtaagagggttcagagggccatatctgagaaccactgccctaatccccaccttgaagtccctgcatataaccggttgggtcttctgttcctttatataaatatgggctgatatttgtcctgcttatattccgaaggtggccctaagcttcaaatgagataatgacttggaagtgctttgacaaaaacgccaaacagagtttattattttatgtggttaggaataagaaaatgctgcaataaaaaatttttaaaggatgtccagaggtgaagggaagtaactaggatggtcacaacagaagaaaaagcattttgaatagagattgagaagattgatatttaagggaagatgtaaaatggctgttcaaaaaggatcttgttggatggcattactttggcatcacccaaatccaggttctggccttctatttttctgttctgtaaagttgattttttccttttcagttcttattgagttgattggggatagagctgattatttccattaacccaacctaaaatagacttgagaaaggaccagaatgctttttgtaaaataaggagaagtaccaagcgaagtgaagtgccctgtttagctggtcagtgttttggggttttttgttctgtctcttcttacagaagaaggatctgacacctttatggaaagttgtttggtgaacttgtaatcagaacaaagcagttatttgcattcctaggacagtgtagttggtgactgataaatgttcatgttcttttggtttctttccagtgtatagagaaatctaccaaatcaagcagaacttttcactggtttgtcagggcactctttaccctgtctctgccagaaacacttcaacaagtctctgagttttttttttttttcctgccatagattttatacagactaattggccttctaataatactctttgtcaaactaataataaatgacaaattaggttatatcatattccgtttatgcctttctgagggaatatacttattgcattcacttatgataactttggtgtttggaaacctccattcaggaatttgtttataaactacctcttaaggaaaggaaccatggtgatagtaatgtttttgtaacaatgacaaatagctctcttaaactgattgtatataagaaataatgagcagcaaaaagttaggggtgcacagtattgacatgaaaactgttgattaaacccagaatttaagaagtcatagcaagtaagtaatgtggaactgatgccttgtctgataaaaaaggttacatgcctaataattagattttaaaacatgagatatttgttagatgaataataataataataaaagctattgaaggaaaccgcttcctgtagaaactaggcacccttctgtccttttttttttcaaccatggtcctaattaattcatatattctgcatttccatggtaacaagatagcatctgtagatgctggtaatttagcagttgctaatgaattataataacaggtactattacagaaatgtcagctattatactggagaccatagttcaggagacttttcttttttctctgacttaatttcttttatatttcttgacatatttaagatgcacatagttttcacccaatttttttttattgagtggatgcaaaagagagataaatttgttactaaataccactaaaaggattgtttggaaacatttaatgaataagtataatgtataattgcattcattaagctatacatgttttttgaatgtattatttctgggaatgaataccagaaagagtgaataccagaaagactttgagattttagatacattgtatttttatctcctttttatttctctttttctttcctcactccttcatttcaacagacactaaatacctaatctttccaaaattatactagattctccttatacattatttttataactatagtatgaagtatataattatccattagctaagcacaaatgagatgcataaatgtatgcaagactgtcttcctctgcccattttatgtctagacattcctagacatggctgttcaccagtggccacatttcttacaagaagacactgtggtcagctcttgatggttcaggcactgtctagctctttctttgtgacttgtttttgggccatattcctgctgtttttacctctcatcagtgagtggatgagaaaaaaaaaacaagagatctcatattaagttaattagtttgatatttatcagctgtgtctatgattttttttttttgtagagtatgttatttttaaatttatgggaaaatttataattctgagggttaaattttctgtgaaacaaaatatttgtgcaccatgataagaatgaacaatttgcttttctcattccctggccatcttggcggctgttcttggttgggggccatctggcacctaagccaggaatatgatggtggcaaaaatgatggaaaagtcactggagttgatcaacgctaggctccaacttgttatgaaaagtggaaagtatgtcctggggtacaagcagattctgaagatgattagataagaaaaagcaaaattggtcatcctcactaacaagtgcccagctttgaggaaatccccaatagagtactacaccatgttggcctaaactggtgttcatcactacagtggtaataatactggactgggcacagcatgtggaaaatactacagactgtgcacactggctatcattgatccaggttattctgatgtctttagaagcatgccagaagatactggtgaaaagtaaaccaagcaaaataatttttctttagtaaaacttgccagaggtttatccttgtaatccctaatcccagcactttgggatgctgaggtgggaggatcacttgaggccagtagttggagaccaccctgggcaacatagtgagaccctgtctctataaaaataaaacgaaaaataaatagctgggcatggtagtggttccccgttgcccaagctactcaggaggctgaggcaggagtatgtcttgagtctaggaaatcgaggctgcagtgagtcaagattgcatcagtgtgcaccagcctcggtgacagagtgagaccctttcttcaacaagaaaaaaagaataagcaattttcaccggaagcaatctgtctatgggattaaacagtgaagaagaaagaagagaaaaagtaaatagaaaaattggattttatgctgaatattctttgactaatataaagtttggggagagagaagaaacgtgcagttgtatgtgctttaatatttctgcagtcctgaatagatgtgtaataaattagtaatttctgcagtccagaatagatgtgtagaagtaatactaattagtattagtagaatgatgaagacaaaaatgagtagaaagctatatgtttagggagacagcagaatgatattagaaattaacactaattgcatagaattagcatgtctgtataaataaaatggtttaaaaggatttggaaacaatattaaccatgtttattatgtttaaataatatactcattttattactaaagagtaaagttctttcaaataaacatggttcttagatacaaaatatattatcaacaacagcaacaaagtgagaccccatttctaccaaaataaaaaattaaaaaattagccaggcgtggtggcacgtgactgtagccctatctactcaggaggctgaggtgggaggatcacttgagcccaggggttcaaggctgcagtgacctgtgattgcaccactgtactccagcctgagcacagcgaaggaccctattgcttaaaaataaataaataagaatttatatagtaaactagcacttatgctttcctcatgcatcctgtacattagctaactgaatcctaaagcctcttggtatcaccctcgatttgcagttttgtacaccgggaaccaggtaagtcattttcccatggttacatatgaagtgtaagtggcagacctgcaactcgaatattgttcgttattgaaattcaaacatgttctgtctatatgccacataacatatatgatttactttgaatttatttaaattagtttccctaagaattgtaaaactaagtccttaagatttttaaatctcataatttgagaaaaaaagctttttgtcaactttgagatttagcttttgatagttatgtggctctgttatcttttcatgaagacttaattttcctttcattgacttacttcattttaacttgcaagcttagttcatgaaactgcctgacaaacccaaagcaatcttccgcctcttatgaatgaactcatgagtctttcttatccataggagtacacttaccacattatgcatcatcataattatgtgtttttattaactgtacttttttgtctccagctacatcactcagttccttgtattttacattttatatgtaggcatggcattttattctggttatgtgtgaaacattttcggaataagtgatggattattattgcttatttatatcttaattctacctctagaacatagtgggacatcttttcctagtgaatatttattaggcagagtctgaaggagctgatagtctttaatgctttatcgctttctttaaaagtgcatgttatttctctgaccagacattgatgtactactcaattttcctttaggatagtgacgttttagataagtagaactagcaagaatatgtgtgggtttgttttatagctagctttggggccatttactgaatgttatactcagtacagtttgttctttcactcattgcattatacatcatgagatgcaggcctgaagctttctggttgacctctttgcctggagagagtggtaggttccagggactcaaagttaaatttataaatatttaatctcaaacctctacatttagttacttcgattaggatgctctgtttaatatgtgtgtgtttcttaagttgctttgaatgtgtaagttttctaaagctttttgaaaagtgtgccaagtataaatacttttagagggactgtttagccacataaacatgaatattaggattagacagtcttgccatttactggctgtgtgaccttggatgttttgtcacacttgtgatgttatagctggttgtaaaatggggctaacaataactatttcaacgtgcttttgtgagactttgaaataaaacacttatgtaaaacctgcctcatggtaggtatttaagaaattattgtttagctcctgactcaccttatctccattgtggttatgttttgtaataaagtatcacaatagaatatttgtatcctctgaaaataattggccctttgggtcacttcaggttgtggtagagaagttataaggtgtccaagccatatagaacatttgtagagtcttagatgacagctaataatttttgtttgtttgtttgtttgagacagtctcattctgttgcccaggctggagtgcagtgatatgatcacagctcactgcagccttgacctcctgggctcaagtgatcctcttgcctcagcctcctgagtagctaggactacaggcatgcactaccatgcccagctagttttttttttttttcttgtaaagatgaggtttcactatgttgcccaggctggtctggaactcctgagctcaggcaatccttctgccttggctttccaaagtgttgggattataagataggtgtgagccaccatgcctggcaacaatagtttataaaagggcagattgtacagggtagcagagagatttgagtaagttattaacacagccagaataatccataattattgtgtactctcagcaatttattttcatgtcgatattcctgttcaggtagcctcctgtggactggagttaccttcattttgctttctgatctcactttaatattgctgttctatctcatttttttagtatctaaaatttaagcttttcaagataagtataactttctggtatcagtatatacagtatttgctgaacgaattagaaataaaaaaactgggattgttttgctgcatcacttaaggatatcaatatttagtttttaaatgctccttttaatcagtattattcagttttaagaaaaaataatttttctttgaaatgatcaatttttagattgaatttttatttgataaggtttgatttaattaattaaccatcagttacaggtttttgcaggatttctagtactataactaatgattcactgtgatttttgctgttgcttctcaccactaatacttagtcttttgtgatagccttgaacagcatccttgatggaaacagtaacaattttgatgaaatattttgctctatttgttatggtggaaagtcagtctactgagcttttcctatgagatgtagcttgcctgtgaaggattctgattttggtaattttaagaaggcaggagaacactgtgggacacttacttggaatgaagttcccttgattttaaaaagaatttccttgcactgtgggagtctgttagtctatttcagagattattgtcatttttattctttccttcttttatcaataaataatgactccatattaggtatttttatttacattgaaatatatcaaaataatgtttactatttatttttgaaacttatatgttaaaaagttaagtccactttcttgtgacaaatggattaagggtatgtgtgtatgtatgcgtgagtatacatattaatatatatgtatacacaatacacataatataatatatatattttagagacagggcactctctctttgtcacccaggctggagtacagtggagcgattatagctcactgcagccttgaacttgcggactcaagtgatcatcctgacacagctgcctgagtagctgggatcacaggtgtgccccactgtgcttggctaattttaaaaaatgttttatacagacaggttcttactgtgttgcccaggctgatctcaaactcctggcttgaagcgatcctctcatcttggcctctgaaagtgctgggattacaggcatgagtcaccatgcctggccatatattttatattttaaatgatatttataattggtactgaagaattctcatacaaaaatcactggagaaaaataattcgaagtttgatatattttgtgtaagaactgatgtttggtttttttaaaaagtaaaaaatagttaatgagattatagtcaacatttttctggggtaagctgaataaaacatgaagtcaagtctttaacatatttggatttgcacaccttaattagtccgtcctctatgactttcttgttggagtcattcttccggttataaatagccccggcttggtcatccaaatgaacgtgcatggctattgtcatttcattgctatggcaattttgcaattagtgtggtagttgctggcacacttctgggcaagggttttgatgcattgacttggaagtggaagaatgaaactgctttcacagctgctgtgtgattctgaatagagacatagcagctgctttttttttttcttcagttttttttttttactaatttagatgtaggcattatgcttcgatgaattgttggcaggaatatctccttgttcccctgtctgtcaaaggaaaactaatttggatttcaagtaaatattggggcaggttgtttgtgaaagtttctttcactccttgtgaaagaaagtagtcctgtaactggtttttctgtctatcctttatcttcaaaacggaaatgtcacaagttgtggaataatcagtaactgacaaataaacttcactgggagatttttagttattgaaatgtatggatttgtcccatttctagggataaaacaaaaagttgattggaggcattaatgagggcgtatctatataaaataagttgtaaaatagataccggaaaatggtattaatagaatcattaatgaaggggtatctatataaaataacttgtaaaaatagatgctggataaatgatatttatagaagcattaatgaaggggtagctatataaaacaacttgtaaaatagataccagaaaaatggtatttatagtggctagcttgctattaacttttttggtcaatgtcacttaaaatgtgagctataatggctccttattcttccatcaccaagttctcataaagatagataaagcagggtagtaaatcagtctttcaaaaggaacactttcctctaaatttagagcataattaatgttaatgtcaccctcgaagatttgaggaaaattttctcctacaactttaatttggatgtttatagtaaaccctttaattttttttccaagagcttattacttttcttttaaacatggaaactcagtataattttcttctagaaatatggaagcttatacaatgcagtaaaacttagtttagacattgatttctctgctgaaagtactcctaaaatatcttagagagttgatgttttaagttacaaacgtcttcttctattttttcctgatagtcctcagatatatatgcttttttttctgttttgcattatgagcaaataattagtacttctttacatcagtatccatgttcacaagtgatggatcttttgaggttttgggatttttttttcccctgaagctacaaaaataagaaagtaagaaatttagtttttttcatgaataataatcttgatttctgctcaggggactatcctctaccatcagctagggcagattaaattgaagattgcaggatttctcattataaaactgtagcctcacaagaccacctatctgatctcttaaaaacttaataagcttatttttggtatgtattttttaacacatcaatttttaacaattgacttttgtatgtaataagaagtaggggttcaattttatttttttacacatggatacccagttgtctcaccaccatttattaaaaggtccatctttcccccctgatctacagtagctgttctgttgtatgtcaagggctgatgtgtgggtgtgtctcattctgggttttctattctgttctaatggcctttctttttctgtatatactgtgtttattatagtagcatataataaatctcgatatggggaagaagtcctcctttatttttcaagagtagtgactaatcttggcccattgtccttccagcaaggatcaacttttaaatttcctttttttttttttggattgtcaaatttgaaaacccccacaaactcatttgggttttgatgtcaactgtattaaatctgtatgtcaatttggaaagtacagtcatcttttgatgttcatgggggattgggttcacgaccccacttgtgtggacaccaaattctgtggacgttcaattcccttgtataaaatggtatagtattggcatatgtccaacacctatgcttcagtgtaccttaaatcatctctagattacttgccgtgcctaatagaatgtaaatgctgtgtacatagttgttacactgtacctttagaactttgtattatttttgattgtgtttctttcccagaatgaccctctatatttctagttatgttttttgcctcaatgtttatgttgtctggattaatatggctatcttcactttcttttgtttagacttttctctgtttgttttttatccttttgcttttagtcttgttcctatcattttaagttatgtttcctgcacaagactaaagtataaattttaagtccagactgattgcccttctttttacttggtacatttgattcatttatatgtattagatctaccattttctgttgccttttctttcccagcttatttatgctgctgcttctctcctttttgcctttttgaattgccttgcttgtgtgtgtatatatattttttcatacaattttttctcaagtagtttggaagttgtatttgcatgtatttttagtagttgccactgaaattttactcatacatatttaacataacaaaatctgaagttacataatatctttatctttattctgaataatatatgcaacttaaagcacattaactttctttaaccttctcccaattttagttctattgttgtcatgtcttttgattctcttctcttgagcttgcatttatgcaccacaagataactgttaatgactttaaaatttattttctacatctttatcattttctatgctcttgatttcttcctgcatctttattcttgcactatccatttgggatcactgtttatctaaaatacactttcagaatttccttatttaggaattttgcccttgttcttgaaagatacttttttctgttggactagaaactaagttgattgtgcaatgaggatactattttactgttttctgggttccattgttactgttgaaaagtcagctgtggtttaataaagaaattctagcagcagtgagaatattgagtatgcccaaagtaaagcgattatttcttgtttcctacttttgtatttaaaacaaaaacaaaagctaaagcaaaaaaacaacccagtgtacatgggaattttcctttctgcgttgatttctgatccctttccataagtatgaagataaacacacaagcttaaggttgaacatacctaaagaaagaaaaccttaggattttggggatcctttacaacttgccatgacaaatgtaacaaaagaaggttttcaagtttttgcatttactgctacttatttaagtagttttcatcaagttaaagtcagccctttgaaaatgaatgtaaattatctttagccatatacctatcatatgttatttacctgtcatccattcatcatccttccacatctgtctatatgtctgtgttactatatgtctgtgatatgagctgtctgtccatcgatgcatccatccatccatccatccatccatccatgcatccatccatccatccgtccattaatatagattttcatccacaatttctggcttacaactcccatagacctttgttacagtctttttaaaataatattggggccctttgggccccagaagtaggatcaggaaacagaatctctctctccctggccttctcttgatctcctttcactgtccaagacaggactctaatcttccattgtggattataaggcccccagtccagagagcatcctccctatacccttggaggaaggaatgccacacagaagggtcaagaagaatctaacaggcctttctgggtttcctcattcattctgttagtgtaaggtcataccctttttgtccgatcacattttgatatggttatctatgcttcaatcatgccttttcaatgaagtctccataaaaggcccaggaaactagctgaacacatggaggttcctggagggtggcacattcaggaagggcatggaagctccgtgctccttccccatacattgtcctatgtatttcttcatctatatccttcatcatatcctttagaacaaaccagtaaacaactttccctgagttctgtgagctgctctagcaaagaaatcaaacctaaagtgggagtttgggaacaccagcatgaagctgattggtcagaagttgattgttgtggtgtgagagcagaggaaaaatagtttaaggttttccatactcaatgtgtatctgttttatctatctatatgtctatcttatctatctgtcatccagttttccatctacttcctctgtctcctctggcatagggtattgactctgtataaatgaaatgtattgaaatgtgccattagcatacttgtagatggagagtttgtaaaaatctaataaaaagggataagacaatggagctaggtgttttacaatcaaatcattgagtagcagcagtgccaaaagttatattacctcatcatatgtcaaagaaaatcactacctctattctggctgtgtcagtgtctcagagttactgcagcagaaataagtgataatgccagcattcatgccagctaatttgtacaagagctaggctctgttggctgagtcacagctgccactagatctacaagtagagtgaaaagatgtttattagccatggagagtaatacatgggtttattttaatcaacttgttctaaagccagcctaagagagatgatactgcccttttcacagtcatctgactcgttcatgaagtgtttgtcatataatgtagagtctgtttctcagaatattatgagccatagttacggcatcttgcttatcacccttcgtaaatgttaggtagctatataatctttttcagccctacaggaaaaagtttgttcaaatgttgtaaaatgtttcaccataattagtgcctgccatttcaaagaactaagcaatttggagttacatgtatatagctggtttactgaagaacaaaatatgaaattgattaagtccattaaaataattttggctgcatagtaaagagaatcaaatgacgttccctctcttttttttcagtccattcccttttatctttagtgagatctagctttatgatgaaagccaggtgatacagaactagagctccaaaaaacagactttttgtttcattttaggaatgcaatttctaattcttctcattgctctgtaacaaacttttctattttctaatttaaaagtatcttggaagatcaagtgcaaaaggtatgcatgtagaaaataattccctattttatagttataaaataagggaaagtgaaggttaatttggctgtgtttttcctcaaacattggaaaactgactatagttagaggactatgattgccatggattatcatcgaagaccctgggaaaacaagttatgtgacattgtttgtagatcttaaaaacatgcctttttcttctgcatgtttacttcgttaagtttttactatatatttatagtaaaatatatatagtaaatcaatctatctatctatctatctatctatctatctatctatctatctatctggagagaaattttcaagtgtaagcagcatagggacatttgtatgccctagatggaaagataatattgtaagtggttgatgaagataatatccgttggtgggtggcttttattatttttaccacttaaaaattcaaaggccaggtccattcagtctaagtttcagacacaggaaagaattaacagagatctttggtaattaaggtggacattatgttgccctataaactgtgcttctttgaaagttgaaaaaataagcagaaatttttgtgtaaaaattattcaggcatagtgttccaactgcgtaaaattcttagccattgttatcacatgctagaacagaaaaagaccagttaatgctttgaagttgatatcagagaggtcaagaaattctatcagtgtagctcaagaaatatgttacttagaactaagaaaatagaaccactggaaaaatggttaaggaaacgctcagcagtgtacccatttacctggatttctgtagtccaaattaagtaaaatattaaataaaacactcgagtcacaataatttttcctcaaatatctgcagttgttgctctatgtcatttcatattacctactttttattactttatggacaagctgttttttcttcctgccccacccataaattttttttaaatcaatttttattaaccttgcaaatcagaaaattgtataggatgtttccagctttagcacccatacctgagttcatttatttttcttataatggtttctttttcaacaatatcttttatcattgcaatttcctttgctttctgctcatggagagcatattaaattgatgttctatacttctgattcagacttcacacagcttcatttctactctttactgtgtccagtatggggtttacttttgttattattatgtattctgctattaaattcgtgtgtttttacagtccttccttatgctactcatttccctatttaattttagtctattgtctttttatttgattccctcctcatggctcttcgtttctgctttttttgtttgtttgttttgttttgttttttgacacgaagtctcgctctgtcacccaggctgcagtgcaatggcgcgatctcgactcactgcaagctccacctcccgggttctgctttttaggcaaggtcaaatcatcttataaaaagaacagcttgaaaaaatggtggagactgtgttcatttattattttgcaactctagtatttccttcaatagtttattctattttactcctcagccctttattgtatgagcatttctatagctaaattctagtcctgggctagtcatattctgtacatattccttgtgcatttcattgacacctatgcaattatcatctgtattcaggtgattcacgtccttttagctctgatttaggccacactgttgttcttagaacatttgcctctagatgtcacatagagttaaatatgacaaaacaccacttatgctgttgcttgttaaattcactgccttggggaaagcatattgatttcttattaacctttgtgcattccacttttcaggtggaaatgcatactgcttctgcttatgtagcacttcatacagtgatctttcccatgtttttataacctcttaaatctattttaggaaatttcttgaatatcaatttcttattttgccatcacttccagtcaagaaattctttctttctctgtgtttttccctggcctttctcatccagtgttgttctctttataacactactattcttaaacttaatttaattgatgaatactctctccaaaaagcagaacttatttccagtatctgaaagttacaggcttcccattctaatgtgtatgtaagaatctagtatggaataagaagggaatggttacataagttatatcttagtattggaatattatactgttatttaaaatgattttgtactataagggtgccaaaccagggtttgttgtatgtggctctgtagagatgtgttttgtttggctggtgtttttttttgttgtttgttttgttttttttttgtttgttttttttggcctgtggagtgtgttgtaccttagttgttatgcaagcagcttaatatcttccactcagttggtctcctatatttgtggtacctgcctagcttatgtaggaagtttgagaccatttttggaaaagaatattttaaagagaaggaaaatgctgtatgagtgaaaactatagatttgtagaaaaaaatactgacagttataaacagatttaaacagtggttatctatgagtgattagaggcgatttttattcactttgcttcttacctgtagtttccaaattttccctaatgaatatcattagggaaaccaatcagttaaaaccaatcagttaacactagtttaaaagaatatagttttgtgtatgcattccatagtactaatcaataactttttattaatcaataacttagtctacgcccttaggcttgacacttaggcaacttatagtacagaagatatgtgaaatctgatcattccattaacaggcttgtagtcctgcttggagagacaaacgtgatacaggctctactgggatgttaccagtgaaaaaggacatagacagatagaagattctcaagcaatctaacagaagtggtcattttagccatgggagacttcactgagttgaaaggctgatgacatgtttgtgatactatgttaagagctctttaagtttgtagaccattgacgttgctagttatctccacagagagaatctttcttataacctgactcttctgttacaggcattttatgttggtattttgtacactttgaagtttcccagcatcttttctgagtgtcttaagccttattagaaaaaagtagaaactgaattctaaattgttaacaacctggtaaccatagatacttgactgtttggaaaaaatgtaaacatatcagccctgagcaagacagccaaaccaaaacaaccacagcgagggattctgattcctttgacagactctgtttctttttattaaaagtatttctttagagatgataaagcaataatttgcaaaatgaaattagaacatcataatccttcttgttcaagaagcattattattaaaaggtagcttcatgtgctactaagaagctaattagttgttgcctggcttatcatgctgagagacagctgtgattcatgggtatttatctatcacaacaggattttctaatggtatttggttatgaaattatttatacttctgactcaggcctttaaaagggcttccagccgtttttgaaagccaacttctgcactccagagcgttttgtgctgttgagatggtgaatcagcttggcagtgtggtagtgtgtgaatccggtcgcactgcagtgtctgagatgcagttttctggtgaaacttctcaagccaagtgcgataatgagtgttcattgatgtagatcttataattttgtaggaaattttctaagaaactgagctttttcaaaatatttagaaataacaccaacatggatttttgtggttatgtttactctaataagctgttaataggaatttataccattatattccttgtgttaatttcaatgtgtgagtttagtatggactattaataacttgttttttctttatcaggcttttattttatttggttagtgattagaataggaaagaaatcaaaagctcttcatagaactctcctgaactttaaatatttaaatcatatttaaatattattcattacattcatttttaaagcacctaactcttcattttgaagatctcaaatcatcatctttgagttatagtaccagagcaaaaatgtgagccttgatatattttctttctttaaaacaggttttaggtaaataacaggagaaatttttgctcatttatttgaatatttctgtggcttatataaatcaagggctgaattacacaaatacataatagtgatttgaaacagactctaaagttaagcagtagttttacttaaccatcccttcttaagtagaataatgagctttgttgagggacaaaattccatttgttttcccaaagtggaaagtagattttggggtgacaaagccttcatgttcaaggttttccacaagtgagctccatgtttagaaatccataaattatagtttgcatgggttgcttttattaacagcaaggtgagttgttaacaggccctgtgcctaacatgtgcgtattgggcagatgtgagtagactgagcacggatcctcctactttcccagtttcataaagcggttttaaggtttaaacttgcctagtcccaaattatacaattaatcatactcagttgtcatttttcttactaattgttccaagctctttaacatgatgtctggtggcagtaagtcacttagcaggcaatagtggcagggaagagagaagactcttttgcccctagaagtttatgtatgctagtcaaagtaagaaggtcaaaaataaaatgtttctaagacatttccaaaggatcacataggcatgacacccagcccttgaatggcacattacaaaggttagaggacctagatctgtgagacccattttgacattaacttgccatgtggctttctgaaaatctctttatatctgtctctggggctgggcatcattacctttcatagggggataataaattatatcagttccaccagcctgtttataggatttttttttttttttttttttttgagatggagtctttgctctgtcgccaggctatagtgcagtggtaccatcttggctcactgcaacctccgcctcccgggttcaagcaattcccctgcctcagcctccagagtggctgggattacaggcatgtgccaccatgcctggctaatttttttgtattttagtagagacagggtttcactatgttggccaggatggtctcaatctcctgacctcatgatccacctgcctctgcctcccaaagtgctgggattataggcatgaacaaactgcgcccagcctgataggatgattttacatgataagacaaaatgataacatagaaagcctttaaaaataacatagtattgaaaggtaaggtagatatttgctcgtcatgaaccttctcagttccccctcctagtcccttaattgttggactgtttcaggattctattctaagcattcttctcgtatgccattgagtgatcttatccatttccgtagtttcagttatgcgcattgtccccatagtaccatcctttgagctccacctagttgtgtaactcccaagccctacctggccgaatgtcagtttgatgttgcatttgaagaaatatagtccagcaactaaaagcaatagtaaggcagaactgctcttaacttatttctcttgaagaatataatagcatgtagcttacaaatcagcattatttcttaaaatcgctgtcatctcctcacttccctgctcaagggttactccctttgttacaggctcccattttccccagactcaccccgagactctcactcacaactgttttttgtcttttttggtcttaacttctcccaatatacctcatgatttgcccatgttttcttttctccaccctttttttgcttagcatgataaaagctcaagaactagactgacaaagaccaaattctcccttgaggataaaggaggagacaggttattctggcgaagaccttattgggtaggggaaacagggagggggtgggaccactcacatgtaaataatctgtattcccagcacaccatcaagcaggccacttactatctacttctatatttcacaaagtgcctctgactcaattccatctatgacctgaccttattatcttgtactcaaacttcattttttccctccctatctttgtacaaagtgcccatcatgctcctagttgctttttcctgacatcaaaacatcatcctcagcttccttctctctttatccttcacatcctattcatattctctttaacctagataccaaagacataattctcaaatctcttcatttcagtccatcaccattgctgccactgtacgtgttgcttccctgcaatcaattttccgtactccaactagaatgatctagttgatcctgatcattgaacctgatcatgcatcttcctcttctaccctattcagaggcttctgcgcactaagcccttaatttggcctttaagatcctttacactgtggttgatccttgcccatttctctaaaagtagtccgccaccccttcctcagcaggatgcttttcgtcctgcctgaaggcccttacctaagctgatctgattgtctgcagtacctcccaactctcccctatctccaacctactctcacttacttattcactacatctcagcttaaatatgacttctatccaaggcccctctgactcttcaggctgggccggtccctttgctatagtctgatgttcctcacacttcccctttggcaatacccatcccactcgactagcagaccctaagctccacgagaacagagctcatgtctctctcctacagcactatctccaaagtgctaaacacagtgcccagctcagatccagtgtctgatgaatactcactgattaatggatgctgcttccatgacttaggcgccctctgtctctcccatcttatctgcacacatattccgcctcacattttctatttatctctcagaaaaccccgtgtcatttcatataaagatttaagctcatgttctgtgcagaattgtctgcccaacctttccaactaccacctggtcattgtcagcttgccacagtagaatccagtgtatagctttattatgacccttaccatgttattttgaagttatttacttgattgtatgcttttgtgagtaggtcttgtgtgtactttccttcatagcagggaccctattttatttgtttgtactcatccttataatcctgtcacctactatagaaagaattgggatgcctcataactagagatgataataagaataaaaataattgctgatcttattgactaccttctgtaagccaggcacaattttaagtgctttacttaactcattgaatcctctcaactcctatgaagtagttacttttattcttcctattttatagatgaggaactttagacccagaaaagtcaagtaagttgtccaaacttaaccagctgataagtggcaaggctggaattgaaacccactggttccagagccttcccttacttatgatgatccgtcaatatagtttgtgccatcaaaattgggttttagaatcttgctgtctgctttaaattctgattcttctacctactcatcatgtgacctgaggtatgaaaaatggagataattacatgccctttaaagggatatcctgaggattaaataagattattagtccctataaaatatctgctgaatgtaggtagttgttgcagtgttaagtcagccagagcactcattggacagaaggtctttcatggttctttccaactccaaatccaatgagtctgtcttcaatctttaccctttgtcagtacgtattactttcaaagctctggtgtttgttttaaataatcgaactttatcagggtctgaggacatacctgcatttctgtcaagtaaaatctatgtgttttttatgagcatgtgttgcctaaaaccacagtcctgatttcccatgctcaaatctggggctacatggctaaataaagatctctgtctaaagagaacaaccaaattcctgtttatagtcagaccatagcagaaaaagaaatccaagttgtaaattattgtttgaattatgaaagtttgagatgttctaatagtaaaagaactaaagagaatatacaaatcccgtgtcaacatttgcagcagatgtttgtttcctctttccaagttagatgagggcatttcagggtggtctgtgttattaaattgattagcagtcaaatggaaacttcagctgcttaggtgatgatttaattgtgaagactgttaatactgtgtctattagcacatgcttattattctatgaaactcaaagtcgtaagattattgacaggcactacagtagcaaacaacattggtggaaattagtatctagttctgagacttaatggtttgacttgtgtgcaaatttaataactacttatcagtagttatgcaataatacagtgaattttcccaaataaatatgtattacttaaataaatcttgcctatctgttcatctatgtatttatttgccttgttcaaagatgtaacaaagcaaataaaaatagaggaaaaatacacttataataggataaattacaactgttatggcattaggagagagtttgggtcacaaaataataccttgaagtccaaaacattggatggaggtgggcctttctgactgtgtacataaaaagggaaatgaaaaaaagctgcaatttataatagccatcaactaacaaaaatcacctgtagaaaaccacaactattgcagttactgagaccatagagaaatgtcacttgctgtatggaatgtaataaatagcaccttcaacagcacttgtacagaaaacacagcaacaggtttcttagtactgattccttcaacacaagctgtttttttgccatcataaattcgttaaaaagcaattagttaaaagcaattctatatagatctgttttattcattttattgatgttctggcttaatctaaggattgatttatagtatctagagatataaacattaaattttttaggcaatctttttttttttatggaggctttggtaagtattgattagatacagcaaatcagtatctgtccaacctttgggtaaggctgaatactataacaggctaaataatactaaatactaaaataggctaaataatcagacatacatggaaattgcaggggccacaagagggtgagactttaagaaatcatttggattggcttaaagttctgtactatacaactttaggtttttaaatacacagtaagtgtcaagatcactctggagaattttaaaaggacaatctcatcccccacctctgtagttttctatttagtaggtctgaggtgggtgaggtaagagcaattttatttaaagaaaaaagtcacatgagtaattctggttatcagtgaagttagaactactgccatagagaatactgcattaatttcagatagaaaaaaatttaaagctaatataatcaaatacaccttagctgtaaaactcttttattctgaaatgtatacctagccaattgaataaggtgatttattatatgaatttcttattagtaaaccaattaaaagtttagtaaatctactggcatctaactatgtctttgaatagttaatatgtatcctaagataattttttattctcactattgtctgattacatttccatatagactaaaaatatttcagtaatcattctatctagagaactttttttgctatttttagtcctcaagaagttataaagcatacttatatgcactctgaaattatcttaggtctttaggggtgctttcatttgtaggctttcaagtgataataagaaaaatgatatctcacatacatttttacttgtctgcagtagccccaaattagttatgaacaaaatcttaaatatgtggtaaacctttgcttaaagtagaaaaccaagcccatatatgtaagtgtatgcctaaatctagcattagtatttattgcaacagaaatcttgagtaaatgtctcacatttacttttcattgtttttataggcattgcttctatgacagtgccagtgtacattgcggaggtctcaccacccaatttaagaggccgattagtcaccattaataccctcttcatcacaggagggcagttctttgcaagtgttgttgatggagccttcagttatctccagaaggatggatggaggtttgtaaatactttttacatttaatttttcaaatcttgattttggggaaggggagaaaaattgagaaatcatagtcaaaatatagctgtgtgttttgaatcattattgctaatttataagtaggtgacattcagcaaaactgagagtggacaggaagctgatatttattttgatgatagacaaggaacctaccattaagaattgatatttacagggcttttttagcatttaggtgacatttctcacactgtgtgcaatcttttgcaatatttgtttaaaaatgaatgcagtgataaatatgtatggagttcatgaattctacaatgattgacaagctgtttatgaactacagatataactaacatcctttttgcattctggaagctacattttgatctgaaagaaacgtagtgtttaaagataaaaatatacctctataaaaagatatacatgagtttaaagtatacaaattattccttgatatttggcttattttgaatcaataaatgacaaaagtggttttaaaactgctttaaaataaatacaaactattattaaaacaaaatcttatgttaaagcttaaaagatattatgggctctggattttgatatctttatagtactcatgtaactgttccagagaaattttattaaaaggcattagaggttatacaatattgcctatcttgttttcttgcctctacttattagaacaaatatttattcagtatttacttctctgtagatactggggaatagaatattcaacaatataaactcaaacccttgtttgcatggcttttacagtgttgatgttaatcctcaacagtagaagaaaaaagggtgtggactgggtgtggtggctcacgcctgtaataccaacacttcaggaggccaaggtgggcggatcacttgaggtcaggagtttgagaccagcctggccaacatggtgaaaccctgtctctactgaaaatacaaaaattagccaggtgtggtggcacacacctgtaattccacctacttgggaggctgaggcaggagaatcgcttgaaccctgaaggcggaggttgcagtgagctgagagtgtaccactgcactccagcctggacaacagagcgagactccatctcaaaaaaaaaaaaagaaagaaagaaaaaggtgcaatatgatgtggacccagggaattaaactgcttgtaagaagcacgataaaccttgtggcttaggatgagccattaaagacctaaatgggtgaagttttaattaaaagtcatgtgagaaaactctttgaagctaatgagggcctacatttgtaaggaccattaaggggaggacacagtttttaaaaacggttgttgtgtctgcagatgttgctaaactgaagcaggaagtttctttcttcttttttttttttctactcagtagatgaagagaaagaggaaagacgataactgttttcagtataacctggtattttgagtttttcttgtaaatgcaatggaagtcagtctttcaacttacatgtctttaagaagttctaaatcatcaatttatattttgttaaaaatttttattaatgtaagtaatatagatatattcaaatgcatagcatgtatagttgcataaatcacatttttcacttacgcataacaattaagaaatcttttctcagtcctggttaggaaagagaaagatctcacagtagtgacaatacatttatgaatgtggtgtgcccgtgtaaaagcggaggtgttgggacaagcctgaaacccccttgcagaggcaaggagacatcatagacagacctggattcaaatctgttttttaccattgattagataagaaccccaaacaaatcatttagcccctctgagcttcacttttctataaagtagaaccagaaatacttataagattattgtgggatccaaattacttattatatgtaaagtgtttagcgtagcacttggcacatggcagataataaatgaagaatcacattgttagttgctgttctgatgaattgagtaaaagatggatgctactatcgatgttgtaagagaggctgaaggaaaatcaacattctgtgttatctgttttctttattggcaagaatgatgcttcaagatggtagggcagaagactagagaaaaaaagatttaaagtgtattgctgctgtgggaagcatgagaaggaaaagactagggacaacacatgatttccaagtaaccatggaatcccagctgaagctggagacatatatttgcagtaaagccaattagcatgctcatgtttatttttctggcaatactggattgcctagggatgaaaaaataaaataagagtatgggaaaactaactcccgttgatatatagaccaaagtattaacaaccagattgttttgaacccaatttattctttgcatgaatacacatttaattatgtacacatgcaaacatgtttccttttttttaggtgaattttctctgttattgtcttctgttatctagtatccttatcagtatatttatctcatctgactcctgggctaataggaatgtggttataagcaaataaaaattgaagtgctaccttagcattaactttagactctgtaattgtcaacaattgataacttattcataattataacaatagataactcatcacttttatagcaatatgtttcaaaaatcttaaggaaaaatctgaaggaaaatgtgggtctaaatatatcatgtaaaatttcttttccatactcatatttttatatatcttcacattagatgtccccagtcttcaaataatttgaatattttaaatttgttttatttccctttttggcttttattgcttctgaaactctacctcaagtttctaatattaaattttatactacaatacccagtgtcccagatttactggtcttgcattatagtgatgaacagtttcagcgtctggtagcaaataccatttgatcctaaccaaaatcttgacaggttagtggaattggtattattctcattttgcagattaaaaacttgatgcttagagaagttaaatatttgcctgagaccacatggctattacttggccttggcagagattagattcaaatcttcttattcaaaagctaactcctttcttcctcatggttctgctttcaagcgtttataatctaacagccataatttttgataatttttacagtagtgattggattaagacagatggaagatgaaatcgattgacagaaaagcaatttagattttgatgttgtagaaacattatagttcaccttttatgccagatgggtcaaagtttctgttctcttattttttagatatcatagaaataaattgttttctgctgaacaactggaagtttactttctctagaaaaaaagaactgccagtagcagaatcaatgttgctatttttctggcacttcattatcatagtacattctgtactgggaaggataccatctggcttcatgaagaaagaggaaataaaattttgaaaatattgttaaagatttgattttttaataaaaacaactttattgagatgtaattcatgcaccattcaactcatccatttaaattgtacaatcacttggcttttagtgtattcacagagctatgcaaccatcgccacaatcaaatttagaacattttcgtcaccctaaaaagaaaccttgcactccttagccatcaccccctaaccccccaagctgtcccacatttaggcaaccattaatctactttgtgtttctataggtttatgtattctgtatatttcatatatgaatatgtggttctttatgactggcttctttcacttagcaaattttcaaggttcatctaagttgtagtatgtgtcagtacttcatttctttttatagcaaataataatatggatataccacattttgtttatctattcatcagttgataggtattgttaacattttggggctatataaataatgatgctatgaacatttgtgtacaaattttaggatagacataagcgtttacttctcttggatatacacctatctgtggaattgctaggtcatatgataactgtatttaggtttttgaggactggccagactgcttccaaagtggctgtattattttgcattcccacaagcaacgtatgagggtttcaatttttccatgtcctagtaaacacttgttatttgtcttttttgattacagtcatcctagtgggtgtgaagtggcatctcactgtggttttgatttgcatttctctaatgagtaatcatgaggataacttttttttttcctaatatattgtagtgttgacaaagatggcagagatgtttcgatagttaatattaatgataaagttctatcgctgcttgcccttttctttgcatatgtatatatttgcattatagtgacgaacagtttcagcatctggcagcaaataccatttgatcctaaccaaaatcttgacaggttagtggaattggtgttattctcattttgcagatttaaaacttgatgctcagagaagcatatatatatatatagtttatttttatttttagtagagatgaggtttcaccatgttggccaggctggtctcaaactcctgacctcaagtgagccacctgcctcagtttcccaaagtgctgggattacaggtgtgagtcaccatacctgtcttctttgctaatatttttaaatcttacttcatgaacatagtgagatttactcactacacttcaagcaaacaaaaaatatccttttttgaaaattgcttagttaaatcctggcttatcagtaaatatatagtaagtgaacttagccatcagaatgatctgtctagaaaacttatctgggcatgccactagtaaaatgtttcaagactgtctatttcctacagggaaaaaaaaattaaattctttatcatggcttgtagtacccaatccatgcattcttttcaagattcttctaactagtgttgcccccgactccactttgtataaaacccaagcttataaaccaaccatatcttgctttgtcatgtttctagttttttttttttttttttcattcttatgctcttttttgcctgtagtgtctccctaccctatccagggattctggtccagctcctgttcatcctgtaaatctctgctcatgaatcatggaaactctgttcctttgtcttttcataatagtttctacaaagctccatttttatactcaccatattatattcaactacttgcttactcttctatctcctctcattcattttggaactcctgaatgtcattgaccttttactcatttttagatctaggaagggcgcagaacatagtaaatattcagtaaatgtttattgaactgagctgaaattcactgggctctagggaagggactcttagttagcataaaaagatatttattataaaccaaataccaatgtattaatttatacagagggatatatatacttcatagatagataaaaattaaatcattaattatatgtgtttctgcaggtacaaataagagaaagaaaattagtttctgagcctatgaaaatttatctccttcaagagaatatacctccctaggaacctgaaaactttcattattttctctttggtaatgctgattttcaaatgagtgtctctgtgtttacaagtatatagtcatcatgtgatttgtattaatagggataggtatatatacagaggggctaaatttttctgtttcatgctgatttttactcatcttattcctagatctactttaaaaaaaaaacaggcttatcttattccacctcactaaactatgtacaaccatttgttaaatgtctggttgtgctagtcattttcatgtttcatcatttaattgatgtaatataggtattgaatgagaaatacaaaatattagtcctgggaacctctataggagagattttcctgagtatcctgaggctgactcatgcacaatgtgagacatgctgagttttgaagaattgatgggactcaggtggacacaggtggatatgggaggcagagtgtagaccaggagggggtaggatcagggaggattaagactacagtgatgatgtacatgagaggctgaagccagattccaatggtctatgaattcaagtccaacttctgtctacaggcaaagggaatttattatttttttagcagagtgtgccatgacaggagtcaaagatcactacggcagtgatgcccagaactaactggggctctcgcctcttgggtagatttaggaaacctagttatgaggctgctgccaaggtacaggtgtgaggttatacttttggagtcatcagttggtgtggaaataattcagtcattcattcaaaagagtttcttgacactttctgcatactagtcttgtatttaatactagagatggaaagatggataagaagtgctcctcctgtcctgaagcctctaatggcctaatataggagagagactttttttagtctgttgaataaatgatggatatagtgtaatgggagctcccaagatgaatgaataacttagcctcacaacagaaagatatttgagctttttgaataaaagaattccaggtacagtgagggagagggaaattctaggtgaaatgtaatcttcaaaggccctgtcatctgaaagaaccagtcatgcttggacaagagtgagaagttagagcagctaggaggagggctatgatgatcatctgggagtttgggggtgaagtgggaaggccggcctttggtgggtgtggatggaacttgaaatcctttgctctcactttcataacacattagatttgggtttgtttattgaaagcctcaaaaaagaccagcctggccaagatggcgaaaccccgtctctactaaaaaaataaaattagccgggcgcggtggtgggcgcctgtaatcccagttactcgggaggctgaggcaaagaattgcttgaacccgggaggcagaggttgcagtgagccaagatcatgccactgcactccagcctgggtgacacagctagactccatctcaaataataataataataataattttaaaatccatgtcaataagatgcttctcagaatgatatttaaatggggatgttatttctaaacaactttatgctggagaatgtgttcttaaaatttcgtgctaatagatcagtggtacttggctctatatgaaatgtagaatatgagtcaatcactatcttaaaaatagaagtatgcagtggtcattttaagaatgatagatttagataacacatgtattaattggtggcaaacagtctcattacaagtaaatacctgccaggtgccatggcttatgcctgtaatcccagcactttgggaggccaaagctggtggatcacctgaggtcaggagttcgagaccaccctgcccaacatggtgaaaccccatctctaccaaaaaatagaaaaattagctggatatagtggcacatgcctgtaatctcagctactcaggaggctgaggtgggagaatcttgaacccagaaggcagaggttgcagtgagccaagatcacgccactgcactccaacctgggtgacagagtgagaccctttttcaaaacaaccccaaaaagtaaataccttagtgctgaagatataaatacgactgtttatcatgaagatattacagtgtggtgggaagaatatgtttaagatttgctttcacagcgtatgaattaatttatctaagctctaatagtctcacctagccagtgttccagcagtcatacaatgttatttacgggatcaaatgagctagtagcagtgaacatacttacaaactcttcagtgctattaggtattgtttgctgttatcttcagaatgttttaggttaagtctctatattcggcatttaagctggcaataaaaattgctctcaccttcagttatctgatttttttccaggaaaatgtaaacatggtttggtaatgacagagcagtttgtataagtctaattcccctgaagatgaccattataaaacatggacagaatgtgtgaatgtatggagcatggaagatatttaggatagtgaaaatactctttattatactttaatggcagatacatgccattatacatttgtccaaacccatgaactatatagcaccaagagtgaaacctaatgtaaactttggactgtaggtgataatgatgtgctaatgtgggctcatcacttgcaacaaatgtcccactttggtggaagatgttgataattggggaggctatgcatacgtgggcaggaagtgtgtgggagatctctgtaccttcctctcaattttttgataatagcaaaagagttggaggcagtaaatggaattatatatttgtgaagcagtatctctaggtagactgataagtgaaagatgcatgtttttatctgtagaacaatgactagaatatattacaaaaagaaacacataagaagccattatgagcattaaaacgtaatacttaaaatatttggataagctgaataaatgcaataaattaagaacacaggaatgaataagagatggcacaaatagcaaatagcaaaatggtatacctaaaacccatttatggtaataatcgcattaaatgtaaaaaattattgtgtactaaaaatgtggcacagatctacattgtctaaagagacacactttaatgctattagattcaaagtgaaaggttgggaaaagatgtaatatacaaaagtgagtataggaaggctggtgtggctatattaatagtcacacaaagtagacttctagagagacagtattagcagagataaagaaggacattttctaatgacaaaagagccaagtcatccgaaataataatgatacaaaatgtgtagtttatctaataagatagcttcaaaatacatgaagcaaaaattatcagctggcagttagccagcagtgtgaatgcacttaattctgtagagctgtatacttaaaagtggacaaaatggtaattttatttatattttaccacaataaaaaaatgggcaaattgagcttatatttgcagaatttttaactcttttttttaacaacgatagaacaactagataaaagattataaaaaagcagtacaatactattaaataccttgtcaaaactgacatttgtagactgctacatccaacaattgcactatacatattattttactttcccttttcctttccttttccctttccctttccccttccctttccctttttcttttctttcttttttttttttttgagacagggtcttgctctgtcacccaggctggtgtgcagtggcatgaacatggctcactgcagcctcgacctcctgggctcaagtgaccctcccgcctcagcctcctgagtagctaggactagaagtacatgccaccatgcccattaatttttgtattttttttgtagagacagggttttaccatgttgcccaggcttgtcttaaactcctgggctcaagtgatccacccactttgggctggcattataggcgtgggccaccatgcctggccttatgaattatttttcacatttacattagacagtctccagaattcatcatatcctggggtataaaataaatgttagtaatttattaaataaataaatgaaatatatgccccctgaccacagcagaattaaattagaaaccaataacaataagatagccagaaaaagctgcaaatctttgtaaattaaagtagcaggttctaaataattcatgggtctaaggagaaatcagaaggaaaattggaaaatagctttgaatggaaagaaaatacaatatattaaaatttgtgaaatgcagctacagcagtgcttagatgaaaatatgtggcttaaaagtgattgcagtagagaagaggaaaggtttaaagtcagtgatctaagtttcatgttaagaagctagaataataggagcaaattaaacccaaacaaaacaaataatgaaatattaaagagcagaggtcaatgttaacagttggttctttgaaaagattaatcaaattgatacactggctacgactgattaaactgattaagaataaaaagataaagtacaaattatcaatatcaggaataaaagagggcatgtcattctatggacattatgaggataatgaaggaaaaatttgaacaactgtgaacaacttggtgccaataaatttaccaacttagatgggatggtcatttgcttgacaatcacaacttaccaaaaatggacatgaaatggaaaatttgagtatccttttatttattaaagaagctacatcattattaataagttacctgcaaagcaaattccaggcccatatagaattttttttttttttttttttgagacctgagtgccaggtctcactctggcactcaggtggctggaatgcagtggcaggatcatagctcacttacagcattgaccgcctaggctcaagggatcctcccagctcaacctcctgagtaggtgggaccacaggcacatgcaaccacacccggcaaatttttgtattttttgtagagatgaggttttaccttgtttcctgggctggttttgaaatcctgagcttaagcaatccacccactgcagcctaccaaattgctgagattagaggtgtgggccactgcacccagcccctggtgaattctataaaatatttaaggaagaaatagcttcaatcttaaacaaaaactttaagaaaataaaggtagaataaacacttcccaataaggtttttgaagccagcataattctattactagggcctgagttgttacaagaaaagtaaatttgagtccaatttcatgaactcagaccaaaaggtatccttaacaaaaaattaataaaactgaaccaagcagtatgtaaaaggggaataaatcatgacccaggaaggttggttggtttagcatatggaaaaataatccatgcaagtcaccatattgaaattattcaatggaggcaaatctgtatgatcatctcagtatatgcagagaaaatatttgagagaataacattcatttatgataaaacctttcaggaaaccagagtagaagatgacatccacacaaaaaaattgcagccagctttattctcagtggtgaaaaaatgatgctttcccttatgactgtttgctaggcaaagatatccactatcatcacttacattcattcaaccagaaaagttgattctaaattttttatggaaaatcagaggacctagaattgctaaactatctcaaagaacaaagttggaggattcactgtctaatttcaagacttattataacactaaagtaatcaggacagtctggtaacagtagataaatgaatcagtgacatagaaggaacaaccatatgaatgaattttttaaatattgtgctgattaaaagaagctagacacaaaacagtacattccccatgattccatatgaagttcatcaatgtgcaatggggtcagaaatttgatcagtggttgtctacggcaatggggattgactggaaaaggggtacgacagaacttcctggaattatggaaatgttctctttcttgattgagatagtgtttacaagggtgtgcatattttcttaaaattcagaatggttacaccttggatctctgcattttcttgtatataaattttacctaaaaataaattaatttcagccttatggtggatttctctgttatattcctgttctgcattgaccaatgaataacataaatgtttctgccagaatttttttctaatagcttctgttggaataactgctctccttaactcctcctacactgggcctaaacccccatcatggcagttaaagaatcctattttgtttgatgattactggagtataggttacttgaagcaggggatgtctgttgatcattactgtttctctataatccctagctcagagcttttcatggatgattctcagagtttggggggaaaaaaggatatgtgtatatttaagaagtgtgtacattattttcagcaacagtactgtgaattttgtgcaggtcttaacgtattttaccatgcagtttaaaactacttaatatttgtgcaaaatgccatattcattgatttcaacgatatcacattctgtcagagcatattttacttcttccactataatcatgacattttaaataaccctggccaagccacttatatgctgatattagtttacttggtggagtcttcttctaagctatgtagacagggttaatattttgttatgtttacttacctggcaattagggtttgtttgtttacagtgtatacagaatctttctcgaggtaacacaggtgttgatcatttgcggatcatatattacctgcttttaacgtgaaagattccatctgtgcacattgaaatttttcttaggtaccttcagccatggtcttatgtttattctctagctgccatctgattatcaagtgtatcagtcatcagggtgcatgtcttacatggtccttggtggcagaggaaaagtaactttccagcctgggatctcaatgtggcaatgttttcttttctgctaaaatagacttgtgaagcatgaactaaaatttaaaaatatgttaccaagtaagttgctgtaacataactctagcaactggctaaattcagtgttatctgtttgcatctaaaacttttgcattaagtagaaacatattacataaatcataactttggtgaccatgttatcatgtaaatatctagttattgatcaataacgatgaccatttcttttgtaaatccatggatagagatctttcagtaaacacatcactcatgtgattattccttcagtatatgaaaaattcaaaattcattggaacattgaacaatgtagttggatagctctggatgttagactgagggcacagtgttcttggatgaggttgaaggggtttgagttatgcttttttaaggggaaaatgtttcactgtcctgtttatcattggaaagttccagctcggggggatgccatctctgggtaagtttattcatgatgctcagtgattagctgtagtgcttggcatttaacatacattcaggagatatttgctgggtaaatagctgagtaacagctcagagaaatcacaaggcttagctttccaagcaaacacaatacatcttcattagttagtgttttcaaagaatctattgattctaattgctaaccctttttattttccgtgaactaatgcaggaaaaaaagattttgagtttattttatagttatttgtgaaagaataccaacttgaagctatagaattttaaagaatacatcatcttaatatttataatattcctctgagctattcagaatgggctaacatggacatgatttgttaatcaatagcaaaagtgcaagccagaagacagagtggaaataaaacttaattggaattacagatacagttttttcatttcctttttttagtttaagacagtattggatattattagagaatttgctagaaagccccactgtactcaggatgacatttcagagattgtcagtgagccaatcttagtgtttcagaaagtatcaagattaactgtgactaaaaagtatgaggtggttattttgcttggaaccacagttttgacaacatgaagttgggaaaccagtaaggaagtgatagttgacctgtaccttaatgctttcatggcctgttgggaggataattgactaaatgagtatggtgtctgaaaacctttactgtgcctctcaaagtgaaaagtgtcttctcttagtagaattcagctcctcaagggctacaaaaacaattgcatgtttttaaaaaatacaatgtagtgtaataaacttcccttaactaggatagtttttccattacagcttgacttaaaatgaaaaccacagatcatatagatcttccagtgtaaggcattggcaactttttcatgtcatttgggttaaggaggaacaggaacataggggagaagggaaagaaacagagcacaaatgcgggatgcagttgttcactcctgtacaatttcttcaggaggagtgaggcttggggaaacctttgggatgcagagattgaaaaataaagagaaagcaactttcgatctatcatattcatcatagaaaatattttcaaaggatcaaatcctttaaaatcttgcagtcgaatatttttgctcctaatggttttttttaaaaatacctaccttcttgttatccaaatttttcctgtatgaaaagcttactagtgtatgttaaagaaacattaaataaaactttagtttggcacagtggtcaaaagaagcagtacaaatttaccctttacacatgaggtattttaactagtagtcagctattttaacagtaatgctcttagggagttttgatttagtaaggataggtgttgagaaaatcacaggatattccatttcctcctagcagttctgtgttatttaaatccagcttgcagttacccagcccagtgggtggtactgtgttgggcacctgtgctgggcacaattaggagtgacagctcccagccagccagctttgcttttgcttttgctttgttatttctgcagtgttttactgcatttaacagaggtgagggaataatacttccaaagggaacctctgaattctttaaacatgaagctaaggtaaattaatgcactttttaatgtgttctacagaattaattatcaagtaattattgaacagttaatatagcttgacttacaataaacatttattgtaggagccagacttcctggattttaactgtagttctgttgcatactaaccatgtatcttctttgtgcctcattgctttgtctataaagtggggataataatggcactcgcctcatagggttgttgtgaaatcatgggagtaaatgtttcctaactgttctgaacagtgcttggcacacggtaactggtgctacacattagctgttactattgctattagtattgttgttactaaacaattacatgtctatgctgagattgtgcattcaactagattttcacatatttggaacataatcatcacacctctggaactacgaaagagcagataacatgctaactcatgttatcagttcagagaggaggtcaatgatcgtgaagtgcaaaattctgtaacttaaggaagcagatatgagaggattattgtcgttagttacataggtgagagcagcaggattgctttaaaacaggaatgagagtgaatgtttagttcagtgaagaacctgtttggtttgttgtgaggcccctggccatctgatggaagagacagcaggcttgctcagctgagccatagcaggaggtctggccccaggaatgcaggatccaccattcacagagcttccatctctggaattgagaaggcttaacctgaggtgaaattggtgggattgttctttgttgacagctggcctaaccttgtcttttggaagtattcctctgcctttaaatggcctgctttggtaggcaggtgctggtactgctagctgtgccagaaaatagttcattttgtaactgtaagtttagaaaattttaaatctttagatgagtgatcatgatggtaaagaacatactaaagatttaaaaactcatgagagcttggcatgtctgcttgactgtgtgtttgtctggtgcgcttgcttgtccgtagaaggtaaatggcttttgccgtaaggtgtggaccttgggtgcttgttgttcatgtttaccctgggttttaaaaacatttagatccttggttctcagccacaactgcacattagcaccacctggagagcttttaataaaacaactccctgggcccagagtccagatcaattaatcaaaatccctggggaagggtggggcctggaaactggtgggttttaccagcctcctaggtgattctaatgtgaagccaggtttagaaaccctgacttaatttagaataatgagatctcttgtatcaataggagactacttgcttttctggggactgcctgccccagtgtatcacaatactctgtcattcatctaattcctgctttccttggatttagaggactggtagtcctactactgccttagtttagtttatgaagagccttctctttttgtctcatgttgaaatttttattagtaccacagcaaaacagcctcttatttatctttcctattctccagtctgcacatcgttagaggaatgtttttcttaagaaagaaattggttagttgtacctgctgaaaatttagttgggtgatacagccagaacaaacacgttacagtgaattgattgcgtggttaggagttcagggaggtgaaacattttttccgagcatcctctctgccttggtgaatgatttcacttaattcccccagcagtcttatgaaatagatactgtcacctgtgtgttaaaatgttaagtaacttggccgaaagcagtggcgcgtgcctgtaatcccagcactttgggaggccaaggtgggcggatcacaagatcaggagtttgagaccagcctggctgatattttgaaaccctgtttctactaaaaatacaaaaattagccaggcgtggtggcacgcacctgtagtcccagctactcaggaggctgaggtaggagaattgcttgaacccgggaggcggaggttgcagtgagccgagatcgcgccactacactccggcctgggcaacagagtgagactccatctaaaaaaataaataaataaataaaatggtgtaagtaacttgaccaggttcttgtggtttgtatgcccggagctgaagtgacacccacatccattcctgtgtcctctctgtcatataagctctgatcttgtgtattgcatttcttcaaagccatgaaaattattcatatcaaaatattttcatcgtgaaaggtaattaaaacaaaataagctttctcattttacttttagaagtattaggatacaaacgtataaaacatttttttattgactaatctctagaaagaagctttaatatgcttaaggattggcaggagggtacaaattccttttccacacgttagggcaacggaattgtacatttcggacccagactcttgcacagatttcaaaaggtgggaaggcctattctgtcttctgtagctcacttaagaaacacaggctaatatatatgtctgtattttccttttctttttgtcttctcttttctcttctcttctcttcccttgtctttttttctgtttaaaaaaaaacttgtaaaaatactgcatcctgggatttaatagcaagtagcagagtgcaaaatattatgtgagcatcttggacctgaaaatgattcagtttctacattcatttcagtgctttttgaagtattatctgctgcttttctatcttaattcatgatctttctttggaaagatcatgagaagtgtagataaatgaaacataaaggctttcacctttaggacttttaaaatttatttcctaatccagtatatttagggtctaccttgaaaaatcccttttaaataatgagcaatatagtataaacatgtctttgacacagctcagatggaagttttattgatttacagcaataaaacatacatttaaataacagattaaattataccagttaacatcttaaggggaagaggccagaagtacatatttttgtgagctgatctctgtagctctcatccgaggactcttccagaagagacggtccagttatatctagaataatgaatggtttggttggaaggaattactgagcaagtaaatttgcagagctaaatgacccagaagagttgttacctaagatattgtcatataaatccaaagcacagttattttctggttagttaatgtagaaagtttagatatacaggtgcttatgtgttatttcataaaatatgtactcaatgcctactgtgtgcaagttaactaaatgctatgttgaatacaaagttaaataatattaagcaattgattgggatagctaaataatgtattataatacaagatacaaagacataaattaaggttaaactgtgtgctctgtgggtgagcagaggcaggagtgactaaatattggtgtaattatcacaatccatggcctaaagcgtaagacacctccaataagatttaacactgcaggccaactgattcatttagccattcattcataaatagtttatttactttccatatcctggttaatttttctgtttccatgtgtagtttaagtttgtaatttgtagtaggaggtattcttactacccatgtaataatcatattttttcttctactggttttttaattaaaatgaaattgcttggaaaatagcagacttattttgtgagatttatctctggagcctttaaggctactatcagtttagcatagcttaaaaggtagaatagctttgaaaaatatattgagccaagtgacttccatgacttatgcatatcagtgtggtttgttatagaaatagaattggcctcctgagctctattgttaggaatctaccctagaacatacctagagaagttggattaacagaaaacattcaggtatcgtagatgcatggaagtttccatttgaaagacagcttaaattttatctaattcagcccctttggttcaaaaagatggaggccttagagatgttaggaaatcagtctggtgatcataatttggagagatctttgatatagatatactcattactatttttgttatttcttggagggagttaaaatgatattgttgtttgctattttgaattttgccagccattaagaatagatatttaaagagataacagttaacttacaacaacatgagcagatttttattaggattattgatttctgactccatctttttttttcctgtgggcccccattcctcagttaatgatgatgaacatgatgcttgatggcaaaatgaaataggaaaattgtaacaacaaaattataactaatgattcacaagtcagaaataactataaagaaacaaatttgggcacttattttaatgaaaagtgtgccttttaagcagatatcagaaagttttatcgtagccccattttatattgtaaaatacaaaattacatatgttagccttacataggaatggtgattatgatgttttgcttaatatatttgggttagaatgtgtatacataatgactgtagcttttgctcattctttttcaatgtaatttgtgggaaaggtagagaaataattagatttttctcattttttaattttcagtgcagcacaaaaatatccttttttcctagtgacagacacacacataaatgcacaaataattctggctaacttcacagtaagtattattgttgtcaacacaacacaaaagtatgtggtgagcacatgatggtaagagcaaattttacagtaaatgtggattttttttctttgcaggtacatgttgggacttgcagcagttccggcggttatacagttttttggctttctctttttgcctgaaagccctcgatggcttattcagaaaggacagactcagaaggcccgtagaattttatctcagatgcgtggtaaccagaccattgatgaggaatatgatagcatcaaaaacaacattgaagaggaggaaaaagaggttggctcaggtatatagactttatacttatatgaatttaaaaactatacagtggtcttatttgtcattattttgtgtgcgtgtgtgtataatatatttttaatatatgggtatttatgtataaatatggatatttatatttatacaaaaatatccatatataaaattatatatgtattattgaccttccatattcatttaaaagctattgaactgttttcaaaataatctttgtaaaaaattaaaatgcttcgtttacatgtgttacattaattttcatactaatttttataaagcgtatgagtacctcatgtactagtttagggataagtttgtgtttccctctttccattaaaatatttaattcattgtctattctgaaattcaccatgtcagaaaaccaagaaaagtctcatgttaatttatgttgatgaatttatttttgaagaagatttcacatagaaatgtaccaaacaattctgaggcaggatctataatcttgacagtctgatttgggtaagtgatttgtaggatgtaaacgaggaaaaggtagacatttcaagatacattttttcaacaataacaattagcctgctcacttcacatttcccaaattggtcttattttctcttgcgcttccttttgcctctacattgttagctcaaggggagaagcagatttgtattagtcaaattatttttcatacctgagaaaatgccaagcacacacactcctttgctgatacatgtctacacaggtgttagaaggtctgtccagtctactttctcctaccatttttggtggagctgaccattgttgccttcctgaaacaacaggatgaacactctgaagaagctggtctctgtgttagccacacgtggcttgatttaactttacctacctgtagcatgatagcatgatgctgtcactttgttgctgagatcaaagcctcaacaaactgtgagcccattctatgtgaagttcattttttttaacgctttttgagcatcagccaggtgtccagcaatgtcagcatttctagagtaacatattagtgcaaagattaaggagaattttgctttaacaaaaagttttacttttactgagttaaacatcgtgttccttaaaaaatatcttaaaatatctatttaaatgacaacttattttatgctcctgtctaaatttctcttctcagtaactcaaatgaaatatgaattttttttttttttttgagatgaagtctcactctgttgcccaggttggagtgcaatggcgcgatcttggctcactgcaacctccgcctcccgagttcaagtgattctcctgcctcggcctcccgagtagctgggattataggcatgggccatcatgcctggctgatttttgtattttttgtagagatggggtttcaccatgttggccaggctggtcttgaactcctgacctctggtgatctgcccaccttggcctcccaaagtactgggattacaggcgtgagccaccgcacctggccatgaatttgttttaattgtagtaattcatacatttgaaagttatgtacaaattatgtgtgagtggaaaaacttttcagagtaagagaaaaattgttaaatactatttagagcctgtatttttcttaatttatataaaggataaaaatttaatttttaaaagccttcttgtttagggatatggatatcattgattttattgcaaagcattaaggatatagcttcattttgactgcttaaaaatatgtctgactactctagccatgcagtgttgacggtgtatcctatttgagttttagacattattcggaatatataaccaaatgaatttttaaagaaatctggggtacatagggttgcaattatcaacatctgctttagtttttatcagaagtctttgggagctaaatagcacccctttgcttggatatagataaaataattccctattccccagttttgttttacattcacatttggcacaggtttttaaaaatactataatgttattcactggatcctaataacgtttgctcatgcttgagtaaatattctaaactttggaactaataggattattaacctatccatttctggatttgtattatttgaagtaatatcatcttgcttaatttaaaagctaatcttaacgttctttttaaaaagtacgcagttaagagcattattgcatgaatgcattcagacagatttgccagattacatggcaccagtgattgaggacctgattttttatgattaagaaacgtgaccacagtaaaacatggtctgcagaactgtgaattgtattatcagtattgtaatgtccaggagcaagactctgggtcagtttaattggaaaatagagagttaacaaactgacatggtcttgtccctccatcatgcttcattcaagaacgataggctagatggacaaatgcacataaaagaatggctaacttcaaagtaataaaaatgcactggcacagaaaagatgaatcagccattgtgttgaagggttagggaatggcctgttaatctgtccatggatcctgagaattttgatccacaacatcaagcctgggaactgtgggcaatagagtgcagctacctgaagggaaccttaatgtaggtaccacaaattatcctgatattccaggaatttagaaagacgttgtttaagacaccctatttcttataaggaggaatgtgttatcaaacatggtggcttagatacctgttcgcattgagcttactaataaataggtctgattctggatcagtaaaccatgtcttatctagcagttccccagtggatttgtgacttgtgacggttatggcacttgcatatgtgatccttctcttttcataggaatttttttttcttgttcacttgaatttaaacttgacctctgtgaggaaaataggcctagctactgaagtgtatattggctacattaatttattttttggatgtgtgagattgttagtgcctagagcatttttcttggtttaaaaccacactttatatagtagatatggcagttgctctggccatgtcagcagcaaagttgaggcttccaggccataccatggaataaggttggagtgcaatggaatctcatctcttctgcccatggcattgaggtcagactcatttgcatgacatccaatgtcttgtgtgtttttttccactatagttggcaaaacaacaacaaaaaggcagtatgggaaaagaagcaaacatttggttttcacgtgtgctcagcactgttgatacatcctgtaggaataataaagtaagactagcagaaacaacagcttggtttggagagctcgctggagtgggagacagggagatggaagaatatcactggctgtgtctcaaacttgccatcttaaatgaatctcgggagagttgccgcgcctcagtttctttttaggtttgtaagaaaagaaaaccagattataataactccaaggtctgtttttttaggattttgaaagtctctgagaagtgcctcctctttatttctaaatgctgtacagcagtatttctttcaaaagtatttattgagtgacatgcatcagaggtggggatgtggcagtaaataagactgacaagattctggtccattctcattggataaggcacacaataaatgaaagagcaattaactactagataactacaaattatggtaattgctttgaaaaagatgaagagaataataaaatgcttatagagggaatgaaaaggggtactttacatgggatggttaggaaagcctctctgaagagatgaacttgaagggtgaaaaggaatcagcaatacagagaactggagggaagactgttccagaaagaggaaacagcaaatgcaaaattctgttttattaagtgggccagattgatttttgcaagttttgatcatagctacaaagtgtacatgtaccagacttctaagatattgcagtaagaactaactatacatcttttatctcaggttcccaagcctaagtgttaaattagtagggacacaattactgttttcagaattgaaagcaaatttaaatacaaagaaacattaatatgatttccatcattttgtggtatgtctggtttgttttcctagtttatatcatattgcatagatgtgtaatagagtcatggcctgtattatcaacagatacagaatcctgatagagacataggtaattacttaagcaatgattggcaaacttttctgcttagcttcaaagttgagtgaagagaggcaggccctttggggcctggttattataacaggaagcagctgtggtaagctcaaatatatttgaatttttctgctttatcctagaaattaaccaaagtttgcattctgttctataatataactgttttacttgactgtaaaccgtttttttcctaaatagttccagttttcattcattggcttcatggaacccatcactctgtcatttatatccctgggatatgtatccctcagtttgacagacatgtcctgaaagagtttggagtttctctcctgggcaaattcattagagatgatattaaaagtagggtctgtccatgtcactagagatgagaagtcatttcttggattactgggcatatagaaggcatagagtctttgttaggagctttagttcctgaaagttaaaaattgtctctcatgacaaaggaagtaaaatcaaccaacagaagagacaggattcttctgaaggcagtcttagggaacaatccagaaatgagaggtgtgttttcatgtgctttatataaccttgtttgatagcacttatttgacttctttagtttcttatcctgtaccagcgaacaagtgtaccctgagaggagatgaaaggaaagcaaaggctgttgctgccatgacttgtcagaagaagccccctggccccgctgcaggagcccctcaagcacagtttctgggaggtcttagataaggcaccatctctgtcatcctcctctccactctgaagtgggcgtgctaaggcaggatcattggatgcttaaggcaggatcattgtgctaaggcaggatcattggaaggaaagcatgaacaacaaaagcatgaacaacaaaagctttctctagagaaacatacagatggtggtgttagaaccactgcaaaaagctagggaagctagggaaattaaaaagcagtatgtttagggagaatgaggttattaggacagcatcagtgcaatgacagattgagtaaaggaaggcaggcaagggagacactgactgcatgccttagggcagtaaagagcagccttttataaatctatttatagcatgggttcaatccaaggaacttaaaaatggtcatgggctttttttcccctaaaagaaaatggctttttttggggggggaggggtgaattccatgttaaaaaattacatattaaaacttttttttttttttgagacagtcttgtactgtcatgcaggctggagtgcagtggcacaattttggctctttgcaacctctgcctcctgggttcaagtgattcccctgcctcagcctccccagtagctgggactacaggcatgcaccactacgcccagctaattttttgtatgtctagtagagacggggtttcaccgcgttggccaggctggccttgaactcctgacctcaagtgatccacctgccttggcctcccaaagtgctaagattacaggcatgagccacaacacccggccttaaaaattgttttacagttaatattacctagatcatctagatcatgtactttcagaatggacttattaaacagaagaatgccagccagaatattggccctaccctttggtcagtaaaatctcaacatttaatcatataggagaagtagcaacccagaggcactagctaatgtttcagattggaattagatgcaggcccactagttgctagtcactgtagtagggcatttaggttacctgtgtgatatgtaatctatgtgaaaatatgcaagccagcaagatttccattatttaattttatcaacaaatgagtttaggaatctgggtgaacgttggctttgcctttgacaaagagtttgatctctagcctggaaagcaagagtattgtagggaagagaacttattcaggagcttcctgtgagttcattttaaaacatgatttgatttacctccagttccttgggggtcatgtctgtcatgtataggaagggacagctgcatctcttttttttttcctctagtaattttgcaatttggtcatgaagtcttacctaccttcgtaagtcattttctttttttgtgaattgatattgactgtggccctttcagcaaatcatattctgcagagaggtcagagggggtaaatatttatcgtattttgatagaaattcttctgtatgtttctttagaaatccaatttcagcataatgacactgcagtcaaatactcgttgcaattgacatctgctgcacttagaggaaaatagtcattctctctaatatatttggtagtttgcttttatttttttcatgtggtagtactacagtgttatctgacccaaaacaatgcatggatgtcatttactaggtgaactttaaatagatattgataaattgttcttggtaagatgacctgcaattttctaaatattggcaaagaaaacatttctatatccaatattctagaggtggttgtaaaattccaaaaattgtcaaagtattaggctggtaaacagtagattaaaacaaaaggtcagataaaaagctactttaattctcaatccttatgttaagctgtaagctgaaggactattaaaacaatacacaactctgttcagtttttagtaaaacttattttcttaggcatgctgacttacttaaaagaaacactatttcattcaatatggctttaaataaaggttgtcgtcgattttctaaaccccagacaacttttaaaatcttatgcagaattggaatcattcttggattttacattaaaatgtcattgactgttctgttgttatatggggataaagaacagcacagagattttccactgagcatactcacgggagaagaaaacatttttcagattacttgtaggcttttaagtcattttccttgatttatactgagaatccagattgtcttagtaagtagataggtaatacttcaaagctttatatttttgttttcttgctaagatgtacttaaatccatatctcataaaagaagatccatgcagaaagaattgtgactttgtcaaagatctcttttttcccacttaccgttaggttcatactatattttactgctctgtatttaatacgattaaatggaatgaaaaaaaaaaaacccacaaggtagacatttgaaaatgaatgtaattcatgagttgctgctcagggtagctcacttccaacttaacttgaaatccatcattcagtataggtgatagtctgcttcgtaaataaaaccatgatttggagacattttttcttcaagatacgacaaattgctatgccctttaaaggttacctgatctttgtagaaggttaccagaaggtcctgaagaaaacccttttttttttcccacctcaaaggggaaggcacaggagccattctttagtgttgggacattttagtttaacaagacaattccatggatagtctgtagaatcagaatatcaatggccatgtgtattagtctattttcacactgtgataactactcaagactgggtaatttataaagacaagaggtttaattgactcacaattctgcatggctgggaaggcctcaggaaattcagaatcatagtggaaggtgaaggggaagaaaggcacgtctcacatggccgcaggagagagagtgaagaaagtcacacagttttaaaccgtcagagctcgtgagaactcactcactatcatgagaacagcctgagggaactgcctccatgatctgatcacctctcaccaggtcccttccttgacacctggggtttacaactcaacgtgaaatttgggtggagacacagagccaaaccacatcaccatgtcatatactatctgaagaaacctgcctattctcaaatgtcagcagagatcttctcagagtttcttaaaaaatcaaagaaaccttattttttccctcatattttaaattggatttgtattggggagctacagtggtcaaatgccattaattttctcctcttacctgaggccctctaaaccctctggtactaagcagtatttttaatcagtatcttactgaataccttgctttagatgcacatttcagttaactcacttattaacacctattatttcttgaaacgttgagccttcaataaggaggtgtgtccttggcaggatacagtgaggagaaaattattaggtttatgaagccggaactataatcagttgctgtgtaagtgtctcacgtttttcagtacagtttttcccctggatttttcaaggtacttccttgaaaatgattcccactgcacatctcttagaataaaataaaccttcaagataattttttaagaaaactgagcccagtaactgttctttcctaaaggggaggggcaactagtgtgaaaatactagtaacaatttctttttcctgaatgcccatttctataaatgttacaagcacatctatagaaacacattctccctttctcttttcactctcattcttaaaacaatcctaaaacagacattataatccacgttgtactgggaaaatggagtgctggcaagggcaaacagctaggaagtgaaggaggcgggatctgggccccagctgctaccactccagcttctccctgttctgctctgcagactgcatctcatgccacatctgtgccatgcagtttggatgtaaatattaggaaaaaaaaaaaaattaggcattgtccttgctcttaaagagcttagaacctaacaatcaaatgtccttaagaatatccttttctgaaaggaaagcattcaaacaactataaaaaatgtgaaaaagccaatgaacttcaaaatcagttggcaaaatagttcagttgcttccaccttgagcctgtattcccaatctctcttctcttctcggttcttgctgccattgcctgggtgaggtctctggtgcttattctctctgccagagtaacagtgtcaactgtccttgtttctagtatcttccctctccatcctttccccatggcctccaaaattatcattgcaacacacagacaggatcatgtccctctcctcttcagaaacatgttccttaacttattattaaacttcctttacaatcttgtttgaatgtatctttccaggtttatttcagtagtgcccagactccatcatcataccaagagagcaagcaagaagcactcaacattactaagtgccttctgactctcagggtgaggagaaaatggtgtgggtgggatctgaggaggtaaggtggagcctggagacaccctgagattgttcacatcccctgaccttccctgtttaccccaatcagtgaaccctgcaaagaagatgcaattattgtctcgcaaaaagaattatattaaatttgaaaagcagtaacatattaggagttttctctgggcaaagaaggccttttgatattagtctccattagcaaaatttaagacaatttattgttcggttgacaaaaaggctgaactaaaagtgcttaagcatttcttcctgcttagtccaatagatgctggtattattttaattgtgttacacaagaatagaaagtctacaaattaggaaaaatcgtatttcatccacaagaaagaactattgagaaagtagaatggtgatcttttaattatactttgaatataagcatttggaggctgttctctgtgttgagggttaggtattaattttgatgcattatcctaggggttgtcaaactttttctgtaaagggccagatagtaatacttggctttttggccagtggtcttcactgtaactacttgtctctgctgttacagtacaaccatagaaaatgtattttaaaaaggagtgtggatttcttccagtaaagtgtgaagcttattattttgtgcttgttatgttttattatttataaaaacagaaagccggccagatttggcccatgagctataggttgctgattccttctttaaccattaagtatgtctgtttttatcagtttcctcagtttttattctttggactaatttgaggatgctattcacgttctttcctttcttttttctttctttctttttttttttttttttaaatatgtgcattgaagccacttcagtgtggtaattcctagtgggtttggcttctgtgcagaaggtaaagttgtcaatgtttgtgtccacgtgtaagtgtgcacagggtgtgtagtcacagaggaacctctaaagaagtattgcagggaagcctctgtataattgcagcaacagacttttatgagaccactgctcagagcacattgcttcttcaaggcccagccacagtcacttctgcatatgtcacagccccacaggtccatctcagcacatgatgtcacatttgatctaatggggcaccaaaagaggccaggtttctatggtgagagttgagtctgtcatcatctgagactggagccagctgtactatcaaaatggcttgatgcaccaacagaaatcttagctcccttgccttgaattgcagtcaaagcaagatgataccttttgtgaatgttaaaatgcaccaaacaattaaggagatggttttattcaggctcttgcaatagagagaagatgtattaatgaggaaatccttaaagaagagggagaaattctgggattttatacagcaggtaaacaaaggagtcagaaggaaggttggaagtaatcttatattggaatatgagagggcagagtgccttccttctctcgactccctggaaacctttgtgatatgtctctggagcagtcagcattagatttgcttccactagcaacttagccttacttatctttgtatcctcattgccagatacagtcattgcctgacgttagcaaggcacttcataaatgtttctttgactttctgtttacgtgagaggagtggatggtgatgtctgatctttgactcctgagatttggaggaggaaatggagctcttacagtgtgtagactccttccctctgtcctacttagtcatcatgagaccctggggaggtgtggttggtgaggagaagacataagtcagtgcacaatgactatttgttgaatgtctctatttacaaaggcagatgtatatgtttagaaactcgttgtggacttttagcaaaacagtttggaatttatgtgtatattaggagttattagtattttcttctagttgctaacatgttgggcccatcgaaaaaacttattttttgacatcaagtatttataagtacaatgaaatttcaaatatgaaagttataaaatctcatgtgatttattatcttagaattaattttgaaggagatccttgttactgtctgaatttaggaaataccccttactaattaatgagccaatttttatttataactctagacaatagattataattcagactaggcccttattataggtatgtacacttcaagatgtgatggaatttctctctactatgaaaggtgagcctatgaaattcaaatatattttcactagctatgactacagtggcttcagcacttttaagacaaatgattatcttgaccatagaattgtagtcagaatcttagatgtgaaatttggtgtttgttttgtttctgctactctcattagctagtttatatttatatacacccactttgagaagtaattggaaactcatggttctcaaaaatgttctgtgaaaaatattttaattttactttctgaaacagcttatcagggtttctgttcatttcacaagaattactgaaaacacaggtggcatcatttatgtaataattctgtagatttttctgtcttaagcttaataatggtcctgtggatattcagatttcaagagtagtttttttttgggggggtggtgtagtatgttttcaaattataagttctttattcttacatggaatcatggctgtagctgcataaccatgcaggtgacatttgtggcagcaaagaggaataatataatttaaagttttattactgttaaagagcaaagtttgaagagcaatcatgtgacttttctgattttatctgttagcagtttttttgaaaactaataaaagagcattattctttttttgaatatttacgatgtgtcatgtactgtgcgtggcacttcacatggtattattatatcttttaatgctacaacaatccagtgtgaaatcgttattattatcatcattattatattatactcttttagagatgagaaaaacctcaagtaaactgcatagatctccttggctactaagtggctaaattcagaattccaacccatctgcctttatattttgctggacaacagcaaaacgtctgctttcgtggatatacatgctgatgaaggaacacagacaataaaggaatatataacacaccaagaagcaatgagtgtgatggggaaagatcaagtgcagtggaggagggagagtgttggaagcctggggttagaaaggtgagtcatggcccttttgatgaggtgccctctgagactggaggaagtggtagtacatttccagaaaggaaacccagacatacatttgcctttagttttattcaaaaggaaaatttgtgctgagaagctctacctgccaagtgaattagtaagctactcaggtaaactggccagagacctaattattaacaggatcttgatgtcagaggcttgttctgataaggaattccattaggttcagcagtattttacaacaaaactatgttgaacaacttttagaaaggtgctttttcaacatcagaatcacctctgttattaagaaaaaagaaaggccacgaatataaattgcataggtctccttggctactaagtggccaattcagaattcaaacccatgttgaattccttggaattttttttttttcttcttaaatgggccagtgaaggttattgttctgatagtcttaagtactcagataagaataaattatagttattaactagtcatatataatgtgagaaatagaccctttaaaaattctttcacatacttcattacttgtaaaattataccagcaggaatagagacgtacctacaagatgtatatttaatttagtcttggagtttttacatattacttaattcagcggtcttagaaaattatttttcccaaagtgtagtcatttgcataaaacatttgttttctataataatctcaaataaaaattggctggatctaatatagcattacgatagaaatcttattttgaatatgaaggtgataattcaagaatatcttttggctggcgtggtggctcacgcctgtaatcccagtacttcggcaggctgaggtggatggatcactgagcttgggagtttaagaccagcctgaccaacataaagaaaccccgtcttgactaaaaatacaaaaaaatcagctgggcatggtggcatatgcctgtaatcccagctgcttgggaggctgaggcaggagaattgcttgaacctgggaggtggaggttgcagtgagccgagatcatgccatggcactccagcctgggcaacaagagtaaaactctgtctcaaaaaaaagaaaaaaaaatgaatatcttttataatctggactagtccaacacttaattttgaagtattcaagtggaatctttttatggaattcttaggtgaattttctctcaatttggggtctcagtgtaccaatctgctatgagttggaaaaccttcctcttttacaaaagggatagtttccttctgaggtaaatcagtggaagctagagatctccacaaatgttagagttttgtactttgtacttaattgacttaattagcatacagttgtacattagttgggtgagttttgtttacctctgggccagaaatacatattcatccattatttgacacatgtttctggggcttttactacttgcgcattattatactaaaagtaatgtggtgtacaaagtttttataaacaaaggcttttgtctccaggaacttttataatgtactagataagatcaggtactcaaataaggaagcaagaagttgatgctatataatgtttgagtatagatatgttccaaatacaaataacatatacatatatatgaaggcatttcctccttatttctcttgaaattatgtggcttcgttttagtatgagtctcatcagttacacaattgggcaagtgattcaacttttccccccaagtatttagtctcttcctctgtaaaatcaggtgctgaaggttgttccacatcctggtgagaagtgaatgggatgagggaaatacagtgcctgcgtagggccgcacacgtaagagctcattaaaagtggatttctcatcttttgtacattagtgaaataagctccaaaggaaattgtaatgattttcattatacaaaatatatatagtgtctgagtggcttaccattgtagatttagatagtggttcttgtgtcatatagtgggctcagcttttcagaaagacagatttgagttgtccaaggctatgtgccgttgggtgttacttaatatctagaaactaattgcctgggtttaaattgcagctgtgcaactttaggcaacttagttgacctctctgtgcttgtttcctcttctgtagcatggagatagttgtaatacctgtctcagataattatattttaaagattggatgatttaatatgtaaggctgtgagaacagtgcctggcacattataagctctgtaaaagtattcattcaataatatttttagacatgaaaagagggtggtaacaagatcccctgctcttaagagcataatccatccctttctcactgtattgtaaatttttgacctcacttagcctttgtagaaaatagtttatattactcaggttttttttttttaaatcattttgtaagaccacttgatgatttgactataccctttttgcacttggttttggaagccatcctctgcatgtatcttttgactatagaaactaaaaacatttttactgtagctgctactgcatattcctttactgtctccttatgtctgaagatcatataaatgtctttagcaggatttttcttaccaactcacttgaacttagaaactgaaagcacagagttagaagtggcatctcctgtcaaacattccctagcgaaaatttcttacagcattgtcattcagtcccggaggcctgctatctctgagtgctggagtgtgatttcctgtgtcactttcctttctgggaccataaaattggattccagacatttgttgggaagtttgcgatatgctgttttgaacattactgaaccaatataataacccactacttgtgttttggaagcagtgttatctgtgacagttattgctttgctgatttacatttggaagaatgttgaaaaagaaaaaggcagagcagtaaaaggtagaagcatgtatgtcctggtgatctttagcaggtaagaccagactgatgatattaagctagaatttaggttcatcatggtcacatccatgcgatagaaaaatatcacatcacatctttaagcaacacacattctgaccttctgtaataaattgtatatctcccttgatctttctggaaacacttccagtttctacacctggagtgaagacgcttgccaaatgacaagaataaattagagaattaatccagtgccaaagataatttttgagaaaagagtatctgtttccaaatggcaaaagaacatcattaatatcttctctagcattcaaagacaggagacagatgctactaataaaatataataaactcctcatggttgtttccaataaaacacaaatgattttgtagttctataattggaactgtcaatctaatttagtaggtttctgttgataaatttgatttcaaaaagttgagatgagaaactaattcactattatgtacaatatttcttgctaagtataaggaatattagcaaaaactgtagtaaaaattaggaagttgaactattaatacctcttggcttattgagatgcagcagatctttatgtgactgtcagtttagtggaaagagtgacaggaatcccaggttgtaactcctgctctgcctatcactaggtggctattgcagggctggcttcatggacacgcgacctctgcagctgcccagagccctgcactcagaagggtcctgcccttggtttaatcctcttctgtcactgtcttcagagttgtaatttttgagcacgggactcacattttcattttgccctcagccctacaaattaggcaaccacaactggctgttcacagcttacttctctgaatttcagagaaggcaaccaaaagattctggagctaggcatcgggtatacatggacataaagatgggaacagtagacgccgaggactactagagggaggagacggggagggaggaaggaaagggttgaaaaacgacctattgggtcctgtgctcactatttgggtgacaggatcatttatgcatgtttatgatgttaaggatcaaaccttagcatcacacaatatatctgtgtaacaaacctgcacatgtatcccctgaatctaaaataaaacttgaaggaaaagattcttgatagatctaagagtatgaaattctgtgagtcccaacaaagggaaggacccaagaaagtttattagaaactgaaagctcctgatccaccctcacttgttctcagtcaggaggaattttgccccctagtgggcatttagcaatgtctggaggcatttttgattgtcacagctcagggaatgtgatgttgacatctagtgggtagtaggatgtttaatgctacaaatacacagaacagcccctgcaacatagaactttttggcccaaaaagtcaacactcaacacaggtgatgttgataaaccctgcctaccgttattatttgtgtctccaactcttggtaccgggcgtgggaggttactcaaaagttagttgagcctctggctgtagcctggatcgtaggttgttgtattttttaccacatgaagactgaagaacgaagctggtgagtaggaagtgtaacttaacatttgcacgagatacactacacagatgctcttcttagggcctctacatctcacacttaccaaaccaactggtgggccccagactcttaaaacctctaaaacacaacacactcacagctggcagatgactttccaggacgccctggcacttgtgatgcggtctgttgggctgtttaccaagtcatttaggtttgtttctaaatctgtttatgccattgtgctggttgctgtaattaggcagtagaatcaactattacagaaatttaaagaaagaaaaatataaaaaaaggagagcaatttcagtgaaaacctaagttgaatgttttggaaagattcaataaagatgtcattaaagaaaactgctctcaaagtgtgggcaagatggttttaaaaggtttgtgaaaaaatcattaaaattagatggattctatattgaatttgcttaactgtcttaagttttcagtattatttatggagattgtagacaatacatttttttctgtggtttttgcaagaaaaacaatgctttagtcagctgatccaggctcagaaaaaaaaagccttacctacatcacaagatggaagaatgaatggcatttatatattttagggtgataaaattatttataaatgtaacctcagctgactttccctaataatcaatatttcagacaacagggcgtctattacctttattttccagtgggaaaaatatcaaatattctacttttctcacttgcagatccaaacaactctcagctcagtgatgtctctgaataatgttccttatttaacactaccttatatgttaagaagatattcatttgatttctgactccacaaacaccatcataagatctgtctcttgccagattcaatactgaaatgtttaagaactgtgcttccttttcagtgcatatgttttcttgagttgccatgtgcctgtatagattagcggcatctgggatttttaccacgtcacattcttttagaattgaagaagtataaatattaccagaattgtagtcaaataatttcaagttttttatagaaaatatgacaaataacctaatgtataaggaaacaaaagtttctgcaattccatcactgtttctaatagaaaattatgaatgagacattaattgtcagtctgcctcttcttcagatggcttttgacttagtattattttgttttaggacccatgtctctacattggactttagagcagagttctggcctcttatcttgagcttgttaaaagaaactgtcgccaggcatgatggctcatgcctgtaatcctagcacttttggggaggccaaagctcgaggattgcttgagctcaggagttcaagaccagcctgggcaacatagtgagaccttgtctctgtaaaagttttttaaaaaattggctgggtgtggtggcacatgcctgaagccccagatactcgggtggctgaagtgggacaattgcttgagcccagggagtcaaggctgtagtgagccatgaccattgccactgtactccagcctaggtgacagaataagacccagtctcaaaaaacaaaaacaaacaaacaaaaaaaccttaatgttctatttcctattaatagtcacaatattatagatattatctaacagtttaaagccataaacattctatttggctagtaaaatgttttcatcatttatgatcaaagatttcaggcatttttcttctttaattagtttaagttaacaataaataaattcagcctccctttggagggttagaacaggacagataaagctaaattcctctttgcccatcacatcgatcccacgcattttatacctctctgctccactgctggccataacagatttggggaatattcttccagacacacacacacaaacacacctagagaatttttatggtaatagtatcataatgcatgtattattaagttacttgtttgctttctttcaagttgagttgatttgagtcagatcttatataaatctagtccatccctttaaacttctctgtgatattccagatatggaatgtcacattctgtttatgtgttcttttattaataggcattacatttgggggtatcataaacagtgctgtaatgaacatccttgtatatgttttcttgagcacatgtatgtgtgtttctctagggtagatatctagaagtagaattgtgcacaaccatttatctcatggtgttatagtgttattttagttcatttgtttccatggtaatttctttctaagcttcaaagtatattggctggaagtcatcgaatcacaaccttttagaaatcaaagctcaggtatcatcttacaatatgaaggattagtttaattgtttctccatattctttttttttttttttggagtgacgcagtctcgctctgtcgcccaggctggagtgtagtggtgaaacctctgctcacagcgagctccgcctcctgggttcaagccattctcccacctcagcctctcgagtagctgggactacaggtgcccaccaccatgtctggctaatgttgtttttgtattttcagtagagacggggtttcatcatgttagccaggatggtctcgatctgttgacttcatgatccgcctgccttggccttccaaagtgctgggattacaggcatgagccactgtgcccagccaattgtttctccatactcttaacatttggtatcttgaccctggagcttcctgtcatcaccaccaccctgctgctttttatgccttagtaaaatctttttggcttctctgttctacttttattaacagaatttcagataagagaatgttgttataaggaatcattttagcaggtgtgttactatatttagtctaaaattttaaaaaatctggataggttttttaaaaaaaatccttaaatgttttgagatgctgattagttcagaattatacatatgttggtttaaactagttgaatcttttgatgctgtttaattacctcagactctacctcagaagtagaaagtgcttatattttaaatctgggttttcccgtaaaacccattgtatattataaaagtaatatagataaggcgtttttccatgtatggaatctttaaggctggtaaacgatatcttccttctttgaatagtgtttcttcctttgaataattatgctaccactcatatttaatggcttctatgtgtgaggtattgtgccatatttttttcttttaattcttacagcaagccaaataactaaaatgtgaactattatcattttatagttgtaaaaattgatagagaagttaacaatcttgcccaagtttaccctgttaggaaatagaagaactaagaattcaaaacaaagcttatcttattagaacagtatacactcttcaatgtactatataaggatacccttttccatcatcatttaaaaactatgtgagtctagttctgggattatgcttaattttaaaatagtaatgacctttttttaaaaaaaagttttaaagttgttttcagcagcaattgtaaataaaatagtttggtggacagtcaattaattttgtgtggcttttttttggatagcaaaaaagaacttatgaagttttagaatatttatactattcttgaactatttactgattcttctttcatatacttactagaccgtgtgcttaaaattttgaatctttaaaagtaatgcaagttttttatagaaaatatgacaaataacctaatgtataaggaaacaaaagtttctgcaattccatcactgtttctaatagaaaattatgaatgagttcccttctcgcagcatctatgtgcccacttcacattgggcacttctctcagccacagagcaaaggtgggaggggctcattagtttcaagaaattcttatactgggtcaactttagtaagaaagaaagaaacgaaagttgaacacacatgactgttagctaattaaaagatgtggctcatcttctttataaataaataaactgattagtgacccattgctggaaactggaagaatcagaagtaagtgtgcatctgctagcattacaaatactcaaatgggaatttctttatattattaatgattaaatttatgaaggaattaaaaatatgatcttggcagcagagagtatgaatttgttatgtgtatttgagatctgtctagccgacactgtagacatgggtttattcttgtaaaccactttttctccagagagacttgagtgaacaggtgggattgcttccattgataggaggataagggaagtgagtacaatgtttatatctaactgtacttgcttcctgcacttctgatatggagaccttcacctaaatctttactactgttattgtcttaatacctctttttctttgcttagactattagaaagaaattttacctgactcttagaatttattcattattttgttactatattttcattttaacataattttcttactaataagcttacatttaatgaacataaactatgtgccagttatggtggcaaatgctttacatgctttgttttgtttaatccttaccacatctctttgatagagattcatattattgactgttttctggaggagaagtggaggctaaggaaagaaaaataaaattaaccaaaatgttacagctgatagaagacagaggcaaatctcttgcccagatatacctgagatacaaagtcaagtattcttgccactctgttacagcttatacatttcaaaatttctttttggaaaaaaataatattgtattcttatgttttcccagtgagctcctgtaaacatttaggtttcattttaatcctgcgttattaatttcaattttgtattttgcctaagtattagctgactgtatggggttattaatttatactcatatggtgggaagttgagtatgtttagacttaaaacattcatgtactgtttttctttttcaaattttaaccctgtttgattgaaattattaaatcatctagaaatgtgattctcaaccttggctgatcattggaagaagcaaaaactgtgaaatcagattctctgaggtagggccttacgttggaagcttcttaattatacacatatgcagccaaggttgagaaccacggacttaaaatagcctttggtatccacgggggcttgattccaggatacccctcagataccaaaatctgtgattgctcaagtctctgatataaaatcgtatagccttttggtggcacactgccacttagtggattttagagcagtggttcctaattagcatgcatctgaatcagtggcaagagaccctattaaaacatagattactgggcttcatgcacagaaccctgaatcagtaggtctaacgggaggcctaagaatttgcatttctagcaagtttcaggtgatgccagtgctgcttttttggactgccctttgagaaccacttcagatttaggtatcactctttgagaaccactgatttaggatcttactttctgagttggtctcttaaacttccttttagtttaagtgatcaccatactccactacccaccagatacacacccacataccctttgtaagctatcattaagcattactaggagcctccagatgcctgcactaatactaaagggtagttgtacctctggatgagggatttgttgtggctcacctggggacacttcaaatgaacttcattcttcccttcctctattctgtgaagtataaagtacacagattagtttagaggtctcttcatactgtagctacaggcccctttttctttaactcttcaataattttgaaaaatctcaaaagtttaatgttttcacccctaatttctcttgctaatttgtttctagcaaaaatgtgtctttgtcagcagtgctggtaagtgattacagataaggtagggttaggcagtaccgatgaccctccaacaacatgggtttgaacttacaggtggattttcttcccccgccacctctgacacagcaagaccaacccctcctctgcctcctcttcctcatcctactcagtgtgaagacaataaggataaagacctgtacgataatccctcttctactcattgaatagaaaatatatttttctctcttatgattttcttaaaaactttttcttttttctagcttactttattgtaagaatacagtatatagtacatatgacttaaaaatatatattaatcaactgtttgtgttattgataaggctcccagttaacagtgggctattcgtagttaagcttttggggagccaaaagtgtttaaggtgccatcttgaaaaccagaggctagtaacatgatcttcgacattttagcctctagaactgtgaaaaaaaaaaaaaaatctgtcctttactcattgcccagtctgtgctacagtcattttttggtatccatgggggcttgattccaggatacgcctcagataccaaaatctgtgattgctcaagtctctgatataaaatggtacagtggccgggtatggtggctcatgcctgtaacaccagcactttgggaggctgaggtgggtggatcacctgaggtcaggagtttgagaccagcctgtctaacatggtgaaatcctgtctctactaaaaatacaaaattatccaggcatggtggcacattcctgtaatcgcagctacttgggaggttgaggcaggggaattgcttgaagccaggacatggaggttgcagtgagctgagattgcaccattgcactccagcctgggcaacaagagtgaaactccatctcaaataaaataaaataaaattgtatagtatttgcatataacctatgtacatcttcccatatacttgaaataatctctggattacttataaaaccgaatacagtgtaaatgttatgcaaatagttgttatactatctttttttaaatttgtattttgtatttttattttttgtgttttttgggaggaattttttgttttgttttgtttttgagatggagttttgctctcattgcccaggctggagtgcaatggcgcactctcggctcactgcaacctctgcctcctgggttctagcgattctccttcctcagcctcccaagtagctgagattaccggcgcccgtcaccacgcccagctaatttaaactttctgtgcttcggtgtcctcatctacagaaagggaataatactcccattttgtagaatttttgtgtgtggtattatatgagagaatgagaaaaaatgtctggtactttgtaataaattaaaaattcaatacatttctaaatgtattgaaaaaaaaaacccacgatgatacctcttgagtgtttcttctccttggagatgacttgcttttttatagaacaggggttaaggcatattaggggcctggcatgtcattagtcccttcagtaatacacgttgatagggaaccaacagatttagctaccccacgatatagcatatccaaggcttagatttatagattcaagaacatttaaaaatatttgtctatggggcacctctgacggttgagttttgttattgccatcagcgcccactcactttttggttaagtgttgtttttgtctctcctcttccttggtccttggagataatcgttataattttaataagctagcactgcattaaaaatgatatgcattgaaatttaagattctagttgttaaatagggtaattcatatactattctttttgaagtggaagttgaggctagcataattcataaactccttctcaataggtattgctttttaaaaaattaactttattcctgattatataactgttttaatttacatagttgtgttgggtgaactgtataaatgtccatatttacaggagtggttcccaaacatctctccctgtcccagtccattatgatggcattattattcaccaggggagagggtggttgtggagcacagagcagggcactgagccagtgaccaatacgcctagcgtgagggctcctttccagtgtacaaatcatggatgtaaattattaacccctagtttgctttttttggctaacaaaatatcattatgtcactggctgtcaaggagagtgaaaagcagctttatgaagttccttctcccattttttttttttaggggaatatacactatactcagccataccctagaaatcagagccccatacatgctaggcatttttgtaaccttagcctatgccatcatccatattaatgccttttaaaacttcctctgtgtctttaccttcctcagtggactttgaacccttcacggggatggattgtgtcatattattctcagagtctcaaggacctaagagagttcctagctcatgacatgtgctgagtagttttgctgcatgaaagaatttgaattgaagatcatttgttcctttttaaaagacttttagaggaaattccatgacctcattcattcatttcatgtttaatagtgcatattgcttacagattttatttattttgttgctttctgagcccatctttcagtctgttttcagttgtgataggcaattcattcattattctttgtatttgggatcaaggcattagagagatgtgtaatacagactttggagtcaaacagagctgggtgtgaattgggactttgccactttttaaatgttgttgttggatacattacttaacttcactattgtctcttcatttgtaaaatgagtatgaaaaagtacccactataggataattatgaggactgagtgaggcagtgcacacaaagttcttaggctggcgcataataagtgcccaatacaacaattttttattgtagttgacgtttagatagttggttttcaataagcatgtttttcttaaacctgattatttaaagtcatccaatgattcatttgttttccttaatttcagttgttagttggagaaatgtttacagcctagtgaaaatgtgtgcggtagaccagtaagatcacctacttaataaaatcatctatttgctaggttaaattttgctctgtattattaattatggaaattgattttcttgctttgaaactttattatgtttacccagttatttatcctagtgaaataaattatcaacgaaaatgctgcttctaaaattttcattgggatgattgataacttagaaatgtcatatttattgaagaaatagaattatttttattcagaacaaattcactttgtgattatgcacatttaattttatttatagacttttacatcccagtggtgctaagtgaagtgaattttgcaagatcatagtttcagtgccttgaatgtcattaagtcccaagaataaagagtgctgacttagatgtcagaagacttgcattctcattctgattccctcagttcttagtctgtgaccttgggcaagtcatttaactaccaagtttcattttctttatcttttcctgccttgtctacctcacagagtcattgggagagtgaaatgaaaaaatatttaagaatggtgaagactgtggaaattaaagatattatttttggtgtaaggcaatttttagaaaagataacagcatgtaggctaagacagtgaaaatacatccattcacctgactttttattccaaatcaatatcagaaatattcaagaagtgtctttaatgtcttttttatagctcactttgaaagaaaatttacaaattacagggtggcttgttatttgtgttcccctctccagtatgtgctgccagtttggattttggcaatgcagttttttgttgtcgttaaggcccactttgagtgaatgctaacatcagcagatagagttgaggaaactttctgaaaacagctaaacataccagtgcttatccattgagtgtgtgagtcaggagactcctgtttgcttggtcatgttgatgtttacatatgctaaaataatttctcctgagtgtccatgccctctcttatcatttctcctcttggtgaggacctggagcttttggacattggggaatgcattgcagcctgtgtgtggcactcattggccggccagctagccttttttagtgtttactgttccactgggattaagtagtgagtggggcttcatgtaataaattgtgtcccctacaaattcatatgttgaagtcctaacccccagttccttataatgtgactacatttggagatagagcctttagagatgattaaggttaaatgaggtcatatgagtaaacgctaatcactataactgcgattcttataagaagaggaagaggcaccagggatttgcacacacagaggaaagaacatgtcgggatactgcgggaaggtggctatctgcaagccaaggagagagaggcctccagaaaaaccaaacctgccaatgccatgatcttggactttgagcctctagaactgtgagaaagcaaatttctgtttaagccacccagtctgtggtactttgctatagcagccctggcaaaccattacatggagatcccaggtgcttggcactaccaggtgtatgtgtcggtcattaggactgtgaaaagcaccttaaaagacctgatgaccttaatgtaaattgagtttcagtttaaatttagtagagggtagaggttcacagattatatagcctgttacagcctgtaagtttttgggttttgttgctgttgttgttgttttttaatgtagagctaatggtttattagtccattttcatgctgctgataaagacatacctgagattgggcaatctacaaaagaaagatgtttaatagacttacagtaccacatagctggggaagcctcccaatcatggcagaaggcaaggagggtaagtcatggcttacatggatggcagcaggcaaagagagcttgtgcaggggagctcccatttttaaaaccgtcagatctcatgagacttatttatcgggagaaacaggccccaatatttcagtgtaggttctttctattttccataagtgccagctggctgagaaataaagagaaagagtacaaagagaggaattttacagctgggcctccaggggtgacatcacatattggtaggaccgtgatgcccacctgagccttaaagccagcaagttttattaaggatttcaaaaggggagggtgtacaagaacagggattagttcacaaagatcacatgcttcaaagggcaaaaaggagaacaaagatcacatgcttctgaggaaacagcaaagggcaaaaccagaaactcctgataagggtccaaaaaagatcacaagacaaagggcaaatgcaaagatcacaaggcaaagggcaaaagcagaattactgataatggtctatgttcagcggtgcacgtattgtcttgataaacaaacaacagaaaacagggtttgagagcagagaactggtctgacctcaaatttaccagggcaggtttttttcccaccctaattagcctgagggtattgcaggagaccagggcatatttcagtccttatctcaactgcataagacagacactcccagagcggctgtttgtagacctccccccatgaatgcattccttctccagggtattaattattaatattccttgctaagaaaagaatttagcgatatcttccatacttgcacgtccatttataggctctctgcaagaagaaaaatatggctctttttgcctgaccccgcgggcagtcagaccttatggttgtcttcccttgttccctaaaatcgctgttattctgttctttttcaaggtgcactgatttcatattgttcaaacacacatgttttacaatcaatttgtacagttaacacaattatcatagtggccctgaggtgacgtacatcctcagcttatgaagatgacaggattaagagattaaagtaagacaggcctaagaaattatgaaagtattatttgggaactggtaagtgtccatgaaatcttcacaatttatgttcctctgctgcggctccagctggtccctccattcggggtccctaacttcctgcaacacttatttactctcaggagaacagcatgggaaagacctgcccacatgattcagtgctctctcaccaggtctctcctacaacatgtgggaattcaagatgagatttgggtggggacacagccaagccatatcattctgcccctggcccctccaaaatctcatatcctcacatttcacaaccaatcatgctttcccaacagtcctccaaagtcttaactcatctcagcattaactcaaaagtctacagtccaaagtctcatcctagacaaaacaagttccttctgcctatgagcctgtaaaatcaaaagcaagttagttacttcctagatacaatgggtgtacaggcattgggtaaatacagccattccaaacgggagaaattggccaaaacaaaggggctacaggtctcacacaagtctgaaatgcagtgagacagccaaatatttaaagctccaaaatgatctcctttgactccatgtctcacatccaggtcatgctgatgcaaaaggtgggttcccacagccttgggcagctccacccttgtgacagactgttttattcctcacccccttcccacccttttccctcaagtccccaaagtccattgtttcattcttatgcctttgcatcctcataatttagctcccacttatgtgtgacagcatacgatgtttggttttccattcctgaatatttatttcacatagaataatagtttccagtctcctgcaggttgctgtgaatgccactaatttattcctttttatggctgagtagtattccattgtatacatatatatatacataccacaatttctttatccactcgctgattgatgggtgttagggttggttccacatttttgcagttgctaattgtgctgctgtaaatgtgcgtgtgcaagtatcttttttgtataataacttcttttcttctgggtatatatccagtagcgggattgttggatcaaatgatagttttacttttagttctttaaggaatctccacacggctttccatagtggttgtactagattacattccgaccagcagtggtgaagtgttccctgttcactgcatccccatcaacatctactattttttaattttttgattatggcaattcttttttttcgagatggagtctcgctctgtcacccaggctggagtgcagtggtgcgatctcggctcaccgcaaactccgcctcccaggttctcgccattctcctgactcagcctcccaagtaactgggactacaagcacccgccaccatgcccggataattttttgtattttttagtagagatggggtttcaccatgttagccaggatggtctcgatctcttgacctcgtgatctgcctgcctcggcctcccaaagtgctgagattacaggcgtgagccattatgcctggcctgattatggcaattcttgcaggagtaaggtggtatcacactatggttttgatttgcatttccctcatcattagtaatgttgagcatttttttcatatgtgtgttggccatttgtagatcttcttttgagaattgtcttaggtttaagtccttaatccatcttgagttgatttttgtataaggtgagagatgaggatccagtttcattctcttacacatggctagccaattatttcaggaccatttgttgaaaatggtgtcctttccccactttatgtttttgtttgctttgttgaaggtcagttggttgtaagtatttgggtttatttctgggttctctattctgttccattggtctatgtgcttatttttatactggtataatgctgttttggtgactgtggtcttctagtatagtttgagatcaggtagtgtgatgcctccagatttattctttttgcttagtcttgctttggctctgtgggctcttttttggttccatatgaattttagaattgttttttctaactctgtgaagaatgatggtggtattttgattggaattgcattgaatttgtaaattgcttttggcagtatggtcattatcacaatattgattctacccatccatgagcatgggatgtgtttccatttgtttgtgttttctatgatttctttcagcagtgttttatagttttccatgtagaggtttttcaccttcttggttaggtatattcctaagtattttaatttttttgcagctattgtaaaaggccaaaccccgatttttgacttctgtgcactggcaggctcaacacaatgtagaaggtgccaaggcttgaagattgcaccctctgaagccacggcccgaactctatgttggccccttccagccatggctgaagcagctggaatacagggcaccaagtggctaggctacacactgcatggggcggggggcccagcccacaaaaccactttttccttctaggcctgttggcctgtgatgagaggggctgctgtgaagacctctgacatgctctggagacattttccccattgtcttggggattaacatttggcttctcgttacttatgcaaatttctgcagctggcttggatttctcctcagaaaatgggattttcttttctaccacattgtcaggctgcaaattttccaaacttttatgctgtgcttccctgataaaactgaatgtctttaacagcacccaagtcacctcttgaatgctttgctgcttagaaatttcttccactagataccacaaatcatctctctcaagtttaaagttccacaaatctctagggcaggggcaaaatgctgccagtctctttgctaaaacataacaagagtcacctttactccattccgcaataagttcttcatctccatttgagaccacttcaacctgggtttcattgtctatattactatcagcattgtgggcaaagccattcaacaagtctctagagagttccaactggtatgttttcagcagcgccccactccaatgtactgtatttgttttcatgcttctgataaagacatacctgagactgggcaatttacaaaagaaagaggtttagtggacttacagttccatgtagctggggaagccgcacaatcatagcagaaggcagggaggagcaagtcatgtttttcacggatggtagcaggcaaagagcggcagcttgtgcagggaaactcccgtttttaaaactatcagatcttgtgagacttactcactatcacgagaacagcatggaaaatacctgccccccatgattcaatgacctctcaccaggtccctcccacaacacatgggaattcaagatgagatttgggtggggacacagccaaaccatatcagatgtcaaagctacatttggtatggaaaagacaaaaacaacaatatttgagatagtgcatttgtatgcctacttttatatctttaatagtttgatatgcttttttactcttaaaaatctggaggaattaatacatgtagctcaaaatctctttaagtgacatgcacatgttctcatatgggagctaaaggagtggacttcatggaggtagagagtagaatggtggttactggaggatgggaagggtagcggggaggggaaatgagaagaggtggaaggaataaagtgtagtgtttgatagcacagtagggaggttatagttaatggtaatttattttatattttgaaatagctagaagaaaagatttagaatgtacccaacacaaacaaatgataaatgtttaaggtgatggatatcctaatcaccctgatttggtcactacacattgtatgcatgtatcagaatactacacgtacccataaatatataccattattatgtatcaatagaaatctttttaaaaaagagacctgcacaacgtgtattatttttatagttttgtttgttttaaagcatcatgctttctcatactggttaactcagaccaagtattgttttgatgttaatattaatgacacagtctaatttatgtatgaattttggggaagaagacacttatccattaatgttttttagttggcttaattttgatgtttaagtattgagtcctgttgatatgcctgttcactgaagtgaccattttatagataagaaaattgtactatcttttcatacacagttctgtgctatttgttgttgcttgcacatgcactatctcatcctctcaaaaacctgtagaggttagcattactcccttaattttcagatgaggaagcgatttccagaaaagttaaggtactttctcagagtcacacagtaaattcatggatcccatatttcctgactctctagagctctttttctgtttattacgcccaggtagatgaaaagcccaagaactgagaagtgcatttgaaatgtgcataaaactatatgcacagatatgcttgtgtttgtgtgtgtttgtaatgtgagacagaatgtgcttcccttgtttcgagttctttgcctttctggttattatggtggtagtgatatgggtatgtttttttttccctttttctatcttttatgtatatgcacacacatatgtatgtacggcagtatcaaaatacagcttgaagtgtgagattagtttttttttgttttttttttttttgagatggagtctcgctctgttgcccaggctggggtacagtggcacaatctcggctcactgcaagctccgcctcccgggttcaagcgattctcctgcctcagcctgccgagtagctgggactacagtgcctgccaccacgcctggctaattttttgtgtttttagtagagatggggtttcactgtccaggatggtctcgatctcctgacctcgtgatccgtccacctcagcctcccgaagtgctgggattacaggcgtgagccaccgcgcccggcagagattagtttttatcatctgtaagttgataggatgggtacaacttctgactggaaaaagaagattgcaagatgtctacagttattacattttatttcagtggataccagaacctgtttcttaaagctaaatgatgagaatttttattattattattaaacaaatctgtgtatgtttcctttgctccttgcttttcaattagatttaaatgatatttaagtagataagaaacaaatacgtgtctgttttcttagaaagaatagtaaattcaatgttgtttggaaatatttgtaggcttttgaattttctccacccttttctacagatgaatgcaaagattttcctaatcattacataagaacataacacttttatatcaattaatggctcatgacctattaaataagcaataagtcttgcttgtatctcaattatgtttttcagtccaaaagagatgggactacatcaaaatcagtttctctggaaaaacatcacatgtaatcttcagtcttctaatgttgacaacagtttatgaaggatatgtgttagtattcagataactcttaagctagctcattgttctgcagtttttactgaatccctgtctttcacgtttcctagcaactggctcacacatggaagatgcaggagtaaagccatcagggatttgctctgcatctatctcttaaacagcatctgagaaatggtagccagactacattgtttcacttcatagtttccactaaaagcttgccttttatgtttattagcttctaaaataggattgccataaaagattagcattaaaaattgagtagtgatgataaaatatcaaagtcaaattattggaaatttttatcagtaatatttcttgaatagtcattgctatttatgtatatctaaaaatgtgatggttactgtgatacagagatgaaataaaacgttttatatttgagaattaaaatctttattacaatattattcctcttaaatgcataagtactttagaattgtaaaataagatgcatcttcagttttgttttccttaaaagaaaagagagcaataaactttaaatatattacatgtatatgtatgtatatgtaactgtactcatatctgtcaattttaaatatttaagtcagcaaattgaaaaatgctttgtgagctaagtgatagattttattttggttaaggaaaggaaaataacaaggacacagccccagtttttctgtgtgagaaaatggtagtaatttgattgtgtcaattttaacacatttggaaaatagaagctacaatatgaatttgtgcttttctgccttatattttcattgccatttaatctttctgtctaatcttggtggtcccaaatgtaaactataatgacatacacctgttaatactactactactaagaacatatatgttagtaaatatgagtactccaagcttgttgagctttttgggttataagaatcttaagtgatgtctctttcatttttaactgtcacggccattttccataattaaccctaggaaggggatgaaaaggaaggaaaacagtgacaggggaaagtggcaaaatagagcaagagaaaaatagaaagaaagatgaaaatgagtgaaagaaaatggctatgagctgtaaaaggtagagtggtagaattcagccaacctgctattgtctttctccctgccacctctgtggtagtaatattctgtttttctcttgcccagtattgagtttgcatatcatgctagcatctgtcaggggagaaatggtgtgatccatggaatattcagaatgaaaatagaataagggtagaaagcacaacgtaatcacttgggtcctcatgtgtgtgctctctttagaatataggctgcttaatcgcccctttgtcctctcctgctttggacccccacccattcacaatatcaattcagggcaaatgaaggcacctccctcactcctctcttctacccctacatcaggcatcgctgagcaaggtcacaggtaccaggggagctcagtggtggtattttggataaagctgtaatccctgctacaattgctgtttctctctcctttgtaaatcagctttggggcaatggtagcatgcatcttactgagatcttaagcataattgcaatcaaagaagaggaacaaggatgcctgcagaacattcaggctcaccaaatcaggatgtgtgagctataagggcaggatgggtgagctataaaagcttttgattttacatcagaaacaaaataactcaactaccatcaccgtttcatttttttttaaaaagatagtagaatataatcttgaaatgaaggacaatactttcaaacaaagaatattaggcaacttcatactgacacacaagaaaaaataataggatggtgagtgggacatatttttattgccctgaattgatgctgtggatgggtgggggtccaaagcagcagaggacaaaggggctggtaagtagcctgtattctaaagagagcacccatgtgggaagagaggggtcttcctcacatcccaaaccaaccaatacagatcaagaaaatcattggtaaacatgagagggacctgcttgactgggagaggctaacatcccattgcctagctagacatgcacttatgaggcgtccttgctaatctgcctcctgtgtctacttaagtaggaacactggagcatgatggcagcaggggagtggggtgaacacggaagatgatgggagcagagcactggagtggcctgaaaaactatcatgtggtagggctacgatgtcacttggagcccatttgagatgaaggaaaaagctttaacccagatataagattgaagttttaaagcaaatggacttacacaaattgaggaaaaggatttgagaactctgctatctatgagaaactgtgggcagttctacaaagcactgctgtgtgaagtaagtagagaaaaacacagtctttcatggttgaactccgtgaagttaagactgtataaggaacaagataactgtctgcaaatcagaggaaacttctctgtggaccagtacaggctcacagattgatttttaggaaagacctaatctggtccaagccttcactttacaggaggaaaatcagtgtttggcacacacttcagggggagagagagagctccgttgatgaaaaaaggagacttgaaccttgaagcctaggtttgagaatcgaatacaattgagactaatttgagtatgtgtttgtgtgagtttggaggtttgaaaagctctgattagagcttttgttgtagagagagttggcattgcttaaagtttctaaactgtgatcatataatgcatacataaagtatggatattaatatattgaagtgtcccaagcacagctgccactagggggcaatggaggccccccacagtgtcacaaccacctagtcgtagccctagaaccagggttgcaagaaaatccctttgcctgcttttgccctgtttccttcagcactgttcagcactatgggtgaatagagcacccattccccagattttgtgcttccctggtgtgtgctgagatactatccccagaatacagtacagccagaaatccaagtgtgggcacatccttcttgtacttttgataatgttgttaagtagaagaactcttactcagaggagaatgcactgctggaacatgtgttagaagttaaagtccacactccccatgtaaaatatgtatttatctctcatgtgaatgttattcattcaatcattgagcatttattgagtactctgtgtgcttggccctcttctgtcctcagggatattgtgaagagatagagacattcctgctctgttagaaggaactcactttccagtgggaggaagatgagaaataaagaagtaaataaatatgtgtaagactactttatataataaaaggaactaatatttgatcgttatgactccagaatacatggccataggtgttactagagtagacatagaacaatagaactgtatataaaaggaaggagtcctagacttggaataatattttctcctcactggcttcctgttaaaaattagagctatagtcctatcagagaaaactccaggagaataaaattgtgattttgtggccaaaaaacccaagtgtggatgcaaccataaaccgatcactaagaacacatttacattatttaggagcttgatgtattttacagtaatttctcatctgtaaaatttcctgacagcagtggcaattttctttttgtttacccaaaccttgatcctcttctggatcatggggattaatttctttactggggattctctcaactagaacattaaaagtctgcttccctacagtgtattcttatgcaagactttgtggaaaaaaagttgtgcatatggcgatgatatttttagccctttccatgtcagtcaagcctgaatcttcttttaagacctagtttcagtgtcattggttgtgtgtgtcttcttccctggcattctccataacccagccagagcaagacatccatttttgattattcattcactcagaaaatgaatacctgttacatgccaggcaccattgggggcactgaagatttggcagtgatgaatgaaaggaagcctgccttaaagttttatttctagtggggaggggtgaccaaggaacacataaacatatgaaggtggtaataaatgttaacagataatggtgataaaaggtaaaatttaatgagcagattgataaaggatggttgaggatattgaggcaagagggttgcacctttttataggttggtccaggaaagtcagagaggtggcatgtattcaaaagactaaaatacgtgaggagagtgagccatgtggctatctgagtctgtgtgggtaaagcagaattggcatggagagtttcagggggtaagggcagaagaccagattatgtagggactgtgaggatttaggcttttattcaagaatgagaagggaagccactgaagggttatgagtagaggactgacacagcagacttaggtttacaaaggctcatctggctcctgcgctcagagtacatggagtgagacaatggtggaatctggccccttaaattggaggctgttggaataatttgggaaagagatgctggtggcctaggcctaggtgattgctatgggggttgtgagaggaggcgacgtatagagttaacaatatttactgatgcattggatggggatattagaagaagaggaatgaaagatgactcaaaggtttttgacttatatatgataaaaatcttaagctttggtcataagctatgaatttaacaacttggtttcctctttagcagcattttcctcccccccttccttccttccttccttccttccttccttccttcctccctccctcccttcttccctccctccctccctccttccttttctccctctcctccccctcctcctccttcccctcctcctcctagtcttcttcttcttcctctttttttcattcattctttttctctttctttctttcctttgttttcttttttctttcttctttctttctttcgttcattctttctttctttttctccttccttccttcctctttttttaaatataaaaacaggcaagtttcatgaaagataactcacacaataagtaacatatctgactaatagatatatgaaaagatctttattttccaccagttaaagtaatataaattaaaacaatgcaataatttttttcaacaattatgttgttgatgattagaatattgataataccaatgtgccaaagtatgaaaaaatgattactcttttacacattattacttggtggcagcttatattggtacaacattttaaagtggcaatttagcactgttaaaaataagacatttacaaaactttcggcccagcatttttgcatctgggaatctatttaaaaaaaactgtccctacatatatgcaaagatatgtacatctagaagattgttccttgcaatattgtttgtagtcgcgaaaaactggaaaccatctaaacatttatcaataggggatttactaagttcagaccaaggcaaagaattaatagtgatgattttcacgggtagaattggagggtcagtgggggatttcactctttttcttgtgtgcctttattttaatgttttactatattaaacagtacttttacagtaagaaaaatatttcaaaagttatttttagaaaaagcctcaaaattattttgatagaataataatacaaaataagcactcacaagtatatgacagcattatattaaaaagattaaactgtagtaataaaggataatcccaggaatccgatgatgctttattacaagaaaatatatttgtaatttatcaaaaagtgaaaaaaaataaatttgacctttggcagcttttcaagtaaccttttggttttaagaaaaaacagtgtataaatgtataaagatcatggtctcaggtaccttctacatgctgttgattactaaattcatagctgtttgaatatctcaaaggatgcagtagctattaattgagaaggactgtgagagaaacaggttattgttattattttggggaagggagtcaggagtttgcttttgacacatttcatttgagatgtcttttagacatccagctgaagaaattgagtagacagttggtgagcaagttttcggttcaagagacagggcaaatttggagatatgaatttgggaatcagcagtgtatagatgtatcatgatttttatacatgtgtcagttgcagcacttacctcattattttgtcattgtttgttgacatatttgtctgtctacattaaaatccttgggggcagagaccacatcttgtttgacattttaatatttcattcatggcaatcttgccatgatgtgaagctataggtttgttttctttggatatgattgactggagctatgattaacttaggctttgtccagggaaagccatttttcttaaaactaaaaggttatagcttaaaggcagccaaaggggaaaccaggttgttaaatttatagtttatgatcaaagcttaagatttttattatctctaggtatttaaatcttgccctcaattgctgatatccttgtgtctctaggaaataacatgccttttgatggctcaactcagtacacagtcataatctaggcacaaatggcagctttaaccaagaccaggcttgttgccttcgaggaaataaacttcatgccaactcagactgttggcaagcaccatagatatgcctgagatttgttctctttgaaattggtcggtttgatcagtgtggtctacagactgatttctgtccataaacaccctccctctttttttttttgtctgctaagatacatttaaaaaatctttttttttttggtctgcttaaatacaggttaaatacagaaaaagagagtaggcatatagaaagttttatagcaatcagtcaccgtaattttatgtctattgaatttagttttcaaaattgtattttgtgtgccttttttcattttttttcagtaattcatttcgttgtatttaacaaaagtatcaatctgcaacagattgaacttaaaaaacattggtccttcctccatagtttgagaaaccatgcactagttcatatcacgaagcacctcatagattgagagctcagataaatcagtggcgacgaggtgggtgaacgtgtagtaaacaggcatggatcagtatctccagaatatgtgtatgctttgaaaataattctgcaatggtccaaatgtttgtgtccctactccccaccccaattcatatattgaaatcctaaccccaaggttaggccccatctcccgatgaccccatctcctaatataaatcctcacctggaggttaggatttatattaggatatggggcctttgggaggtgattaggtcatggtggaaccctcacaattggaaccaaggcctttattttaaaagcctgagagagatctctcccctcccgtcatgtgaggacacagtgatgtgctgcctgaaccaagacacaggccctcaccgcacagtgaatcttctggagccttgatcttggatttcccagcctccagaatggtgagaaataaacatttattgtatataaacccctaagtttatggcactattatagcagctgaaatggactaagacaaattctttactccatttttcgtatcatgacttattgaaggaggtatgatatggtagcatgaaaagaggtaaagaaccaccctactgcagagaacagaaaaggtttggagtttgatttttgttgattaagctgcctgtgatctcaagtctggcatttaatgggcagactataaggtatgtgaccactgctggattttgtaaacatttcattttagcattcaagctttagatgtgtctttctgtatcagtacattgttttatgctttcctaaaagcagccttcttgtctacaacctctccatgcactgaattcctatgcactgaattcctaactttattttttagctcctggaacacttttatacctttcatttctcttttgatacttcaagcagaagctatttagagacacactgtgaataaatcattttagtcagttccttaatacttttcttaaccattattacctcctatgaataattttatttcacttttattaaataagcagaggtaatctgcatcagagaatgcaaataatggctaacttggtaattttaggaaagagaaacaggcagatataggcataacagtaaagggaagctaaaagaattctaacaaactaacaccaagaaaccaacagcaggaggagtagaaaacagagcactgggaagagagacaaaattgcgataatcatgatttcctcgagacagtgtttggagatggtttccctttgtttttcattttttgtaattttccagattgtgaacattaaccatgtattactattattatagttaaaaattgtttgcatatatccctcccccatatgtgtgagtaacttaagtataggtaacagaagcaaactggtgggtttggtattctagttatgatattctcgcttttatggggcataaaaatcattgtcagattcttccttcttggtgatttccccagtggcctcccatagattgcttcttcgtctttgtaaagatatatgacagcaaatctctaccagttaatgagcacgtgaaaagctatctatctaagggctgtgtgttttgctacttacaaagccgtaaagatgttgacaaaaatatctgaatccctgtaggatattctccatttttcatcaagacggacattagcctcttaaaaaaattaactgagagaaactgttgactaccttttaagtaacatcatcaaagaagtaaatggctttgattttttttaaaaagcagtttttagaaattatgaatggaatatattcactggatattagtaatccagaacttctgcattaaaccttcataattaattgtagtaatgcttttctaaaaatttactttgtctattgtatattacacaatattgtaatctagttttggtaccaggaatttacacttaaattgggtaaaaacaaaagttaaatgaaaaacatttaactttttaaagttatttttatttccgtctcttttattaaattctttgtttatagaagattgcacttaccgttgctctgttctcatattttataagcacttttttttttattatactttaagttttagggtacatgtgcacattgtgcaggttagttacatatgtatacatgtgctgtgctggtgcactgcacccactaactcgtcatctagcattaggtatatctcccaatgctatccctcccccctgcccccaccccaccacagtccccagattgtgatattccccttcctgtgtccatgtgatctcattgttcagttcccacctatgagtgagaatatgtggtgtttggttttttcttcttgcgatagtttactgagaatgatggtttccaatttcatccatgtccctacaaaggacatgaactcatccttttttatggctgcatagtattccatggtgtatatgtgccacattttcttaatccagtctatgattgttggacatttgggttggttccaagtctttgctattgtgaataatgccgcaataaacatacgtgtgcatgtgtctttatagcagcatgatttatagtcatttgggtatatacccagtaatgggattgctgggtcaaatggtatttctagttctagatccctgaggaatcgccacactgacttccacaatggttgaactagtttacagtcccaccaacagtgtaaaagtgttcctatttctccacatcctctccagcacctgttgtttcctgactttttaatgattgccattctaactggtgtgagatgatatctcatagtggttttgatttgcatttctctgatggccagtgatgatgagcattttttcatgtgttttttggctgcataaatgtcttcttttgagaagtgtctgttcatgtcctttgcccactttttgatggggttgtttctttttttcttgtaaatttgtttgagttcattgtagattctggatattagccctttgtcagatgagtaggttgcgaaaattttctcccatgttgtaggttgtctgttcactctgatggtagtttcttttgctgtgcagaagctctttagtttaattagatcccatttgtcaattttggcttttgttgccattgcttttggtgttttggacatgaagtccttgcccacgcctatgtcctgaatggtaatgcctaggttttcttctagggtttttatggttttaggtctaatgtttaaatctttaatccatcttgaattgagttttgtataaggtgtaaggaagggatccagtttcagctttctacatatggctagccagttttcccagcaccatttattaaataggggatcctttccccattgcttgtttttctcaggtttgtcaaagatcagatagttgtaggtatgcggcgttatttctgagggctctgttctgttccattgatctatatctctgttttggtaccagtaccatgctgttttggttactgtagtcttgtagtatagtttgaagtcaggtagtgtgatgcctccagctttgttcttttggcttaggattgacttggcaatgcgggctcttttttggttccatatgaactttaaagtagttttttccaattctgtgaagaaagtcattggtagcttgatggggatggcactgaatctgtaaattaccttgggcagtatggccattttcacgatattgattcttcctacccatgagcatggaatgttcttccatttgtttgtatcctcttttatttccttgagcagtggtttgtagttctccttgaagaggtgcttcacatcccttgtaagttggattcctaggtattttattctctttgaagcagttgtgaatgggagttcactcatgatttggctctctgtttgtctgttgttggtgtataagaatgcttgtgatttttgtactttgattttgtatcctgagactttgctgaagttgcttatcagcttaaggagattttgggctgagacgatggggttttctaggtaaacaatcatgtcgtctgcaaacagggacaatttgacttcctcttttcctaattgaataccctttatttccttctcctgcctgattgccctggccagaacttccaacactatgttgaataggagtggtgagagagggcatccctgtcttgtgccagttttcaaagggaatgcttccagtttttgcccattcagtatgatattggctgtgggtttgtcatagatagctcttattattttgaaatacgtcccatcaatacctaatttattgagagtttttagcatgaagggttgttgaattttgtcaaaggctttttctgcatctattgagataatcatgtggtttttgtctttggctctgtttatatgctggattacatttattgatttgcgtatattgaaccagccttgcatcccagggatgaagcccacttgatcatggtggataagctttttgatgtgctgctggattcggtttgccagtattttattgaggatttttgcatcaatgttcatcaaagatattggtctaaaattctcttttttggttgtgtctctgcccggctttggtatcagaatgatgctggcctcataaaatgagttagggaggattccctctttttctattgattggaatagtttcagaaggaatggtaccagttcctccttgtacctctggtagaattcggctgtgaatccatctggtcctggactctttttggtgggtaagctattgattattgccacaatttcagctcctgttattggtgtattcagagattcaacttcttcctggtttagtcttgggagagtgtatgtgtcgaggaatgtatccatttcttctagattttctagtttatttgcgtagaggtgtttgtagtattctctgatggtagtttgtatttctgtgggatcggtggtgatatcccctttatcattttttattgtgtccatttgattcttctctctttttttctttattagtcttgctagcggtctatcaattttgttgatcctttcaaaaaaccagctcctggattcattgattttttgaagggtttttgtgtgtctctatttccttcagttctgctctgattttagttatttcttgccttctgctagcttttgaatgtgtttgctcttgcttttctagttcttttcattgtgatgttagggtgtcaattttggatctttcctgctttctcttgtgggcatttagtgctataaatttccctctacacactgctttgaatgcatcccagagattctgatatgttgtgtctttgttctcgttggtttcaaagaacatctttatttctgccttcatttcgttatgtacccagtagtcattcaggagcaggctgttcagtttccatgtagttgagcggctttgagtgagattcttaatcctgagttctagtttgattgcactgtggtctgagagatagtttgttataatttctgttcttttacatttgctgaggagagctttccttccaactatgtggtcaattttggaataggtgtggtgtggtgctgaaaaaaatgtatattctgttgatttggggtggagagttctgtagatgtctgttaggtccgcttggtgcagagctgagttcaattcctgggtatccttgttgactttctgtctcgttgatctgtctaatgttgatagtggggtgttaaagtctcccattattattgtgtgggagtctaagtctctttgtaggtcactcaggacttgctttatgaatctgggtgctcctgtattgggtgcatatatatttaggatagttagctcctcttgttgaattgatccctttaccattatgtaatggccttctttgtctcttttgatctttgttggtttaaagtctgctttatcagagactaggattgcaacccctgcctttttttgttttccatttgcttggtagatcttcctccatccttttattttgagcctatgtgtgtctctgcacatgagatgggtttcctgaatacagcacactgatgggtcttgactctttatccaacttgccagtctgtgtcttttaattggagaatatagtccatttacatttaaagttaatattgttatgtgtgaatttgatcctgtcattatgatgttaactggtgattttgcttgttagttgatgcagtttcttcctagtctcgatggtctttacattttggcatgattttgcagtggctggtactggttgttcctttccatgtttagcgcttccttcaggagctcttttagggcaggcctggtggtgacaaaatctctcagcatttgcttgtctataaagtattttatttctccttcacttatgaagctttgtttggctggatatgaaattctgggttgaaaattcttttctttaagaatgttgaatattggccctcactctcttctggcttgtagggtttctgccgagagatccgctgttagtctgatgggcttccctttgagggtaacccgacctttctctctggctgcccttaacattttttccttcatttcaactttggtgaatctgacaattatgtgtcttggagttgctcttctcgaggagtatctttgtggcattctctgtatttcctgaatctgaacgttggcctgccttgctagattggggaagttctcctggataatatcctgcagagtgttttccaacttggttccattctccgcatcactttcaggtacaccaatcagacgtagatttggtcttttcacatagtcccatatttcttggaggctttgctcatttctttttattcttttttctctaaacttcccttctcgcttcatttcattcatttcatcttccgttgctgataccctttcttccagttgatcgcatcggctcctgaggcttctgcattcttcacgtagttctcgagccttggctttcagctccatcagctcctttaagcacttctctgtattggttattctagttatacattcttataaatttttttcaaagttttcaacttctttgcctttggtttgaatgtcctcccgtagctcagagtaatttgatcgtctgaagccttcttctctcagctcatcaaaatcattctccatccagctttgttccgttgctggtgaggaactgcgttcctttggaggaggagaggcgctctgcgttttagagtttccagtttttctgttctgttttttccccatctgtgtggttttatctacttttggtctttgatgatggtgatgtacagatgggtttttggtgtggatgtcctttctgtttgttagtttcccttctaacagacaggaccctcagctgcaggtctgttggaataccctgccatgtgaggtgtcagtgtgccgctgctggggggtgcctcccagttaggctgctcgggggtcaggggtcagggacccacttgaggaggcagtctgcccgttctcagatctccagctgcgtgctgggagaaccactgctctcttcaaagctgtcagacagggacatttaagtctgcagaggttactgctgtctttttgtttgtctgtgccctgcccccagaggtggagcctacagaggcaggcaggcctccttgagctgtggtgggctccacccagttcgagcttccaggctgctttgtttacctaagcaagcctgggcaatggcgggcgcctctcccccagccttgctgccgccttgcagtttgatctcagactgctgtgctagcaatccgcgagattccgtgggcgtaggaccctccgagccaggtgtgggatattgtcgcgtggtgcgccgttttttaagccagtctgaaaagcgccatattcgggtgggagtgacccgattttccaggtgcatccgtcacccctttctttgactccgaaagggaactccctgaccccttgcgcttcccaggtgaggcaatgcctcgccctgcttcggctcgcgcacggtgcgcgcacccactggcctgcgcccactgtctggcactccccagtgtgatgaactcggtacctcagatgtaaatgcagaaatcacccgtcttctgcatcgcttacgctgggagctgtagactggagctgttcctattcggccatcttggctcgagagtcaagcactttgttaaagagatagtgtgactctaaagtacaagttggtttcttcaccaattaagagttcttccatttgggggagatggactgtatttttgtgatgctgccatttgttgctcagaaaacttctatttttattagaattgccttgagagccaatttttgagccataaaacgtttcattcactcactcaacaaaaatgtattgaaggcttacttctatcagttctctctagatgccagatatactgcagtgagaaagctacatggttactgagctcacagagcttacagtgtggtgggggagacattaatgaaaacacacacgtgaaatacacaggcctctgaagaaaaattatcataaagataataatttagataggagggaaatgggcatttaggggaggcatctctggtaatgccagagaaagggtgaagaccatgagccaaggccctggattgagccacaacttggcacaactcattaatttataggaatctcttctttttgatctcaaatgctttcactcaactgaataagccattttagcaataatgcttgcctctggattactgccaaaagctaccttgattagcagagagtgaagatttgtgaccactgaggatattcggagtgtgtcactggctctgaagatatttctaaaagattttcagttatattttgagctgtagcaacatcaaggaaataattttgtaacctccctcccaagatgactttgaaggaaacgtatttataaattctgatgtgttttttcagccacattatttaataaccgttcttgatgtaatgagaaaaagactgtgcctcttttcagagaagctcagtctactgctttcttttccttcttgagaaagtgaacactgagacaaaataatctctgcaacaacgaaggaagttctgtttgactcagttgctaattcaatggctgaaagagatcagagacacagtttgatatgtgggaacattagaaactttgaggggtttggggttagataaacattgaccttaccactcactagctccttgatctttgaaaagttactgagcctctttgagcctttgtttgctaatctgcccaatgggattaatactacaaacctcttagggagcactgcagattaatctatatagagcttgaatctagtaggaactgaataaacatgagctcatgcctaccttcctctttccaaacccctcatccttttatctgttaccatagatgtcaaactctatgaaatccagtcatttagcttaaagtacgtatgttgttttcatgctttccttcctgatgttgtttaaagttaatttttaggaaaacattttaatgcattgcataagatggcaatgctagggttagggctaaagaaagacaacatccttgagtttttctacaggtagatttcattttttatcttaatgataaggccagaaagtgccaagagatgttaagtgtccagaaagttggaagttttggtttgggttaggtagaaggtatacaatgaaaacatcttatataaaatatttaataaagtcagtttggttctccacacacacaaaaatgacatactgatgattaaaaagtgaaacatggccaggggcagcagtttcactcctgtaatccaagctacttgggaggctgaagcaggaaggttgcttgaggtcaggtgttcaagaccaacctgagcaacatagtgagacccccccagtctttaaaaaaaaaagtgaagatttaaaaattaaaacattgttacaagtgggaaataccagaggtaacattaatgaaaattaactattctaatttcaaatgaatcgtggaattaataaatgtgttcatatatggtctgcttcagctagaatatatctctcttgtttgcaactctgcggtcatgaagtcaacccttatggcacttatcattgtctactttggtaagtgccacgtaccattgtgtttcttgacatcaaggaccatgtctaatttatcttggagcctaccatacagagtcctggtgctgatggtgaattgcatttgacagtaactaaaaagatggtgggatatggagaggttaagtaacttgcctgttctaattttgggtgttgtttatgggggcagctatgtccttgaacttgctgtaatgctgtcataatgggtaccccaggtgcttatctaagggtgggctgtctgttttcagccccattagaagacaaaaagatgaactcctgagcagagctgacaccatgtgacaattgtgcctcctctgtgtttcacgtatctgattgtgatgtcactgttttgattagcagttattatatttggaaacttagcttagaatggagcactcctagtctgctgtttgttagtgcacatagctatttagaatcttcaactttaagaatccggtttgatgcttatttacaactgaagattcataagcaaatatacgttattgaacatttgtatccgttggctccttagagttgctccatccatttgtgatgcatgttaatagagagtgaaataaaaatacttgcatttaaagagctacatctgttttgtgcatgagtcatctgaagtttggacagctattctgatcaaataaataaatcttcctccagacaggtggcttacttgaatacgtctaacttattttcagttccttctgggaaatcttacatttagctgcagtctctaaactgttttatctgccaaggataagctggcaatgggaagctttaattagaattaatggggcttgccatggagaaatttagaaaatgtctactaccttttagtggcacaaatatggcaaaaatttaggcattgtctaagtcatcactgaacaaaccttattacacgaacatatttttatgagaattcagaatgtctgaacttagagtgtctgaatttagattgtcttaaaagaatgtacgtagttaaaatatttagttggtctactattagggaagataaatttttttcacttccctcctttggcattattttcttcctattccatagcaaattagcaaactaaaatgtaagtcaggtggtggggagtgcttttaaaattaggatttaacagaaagtaagtatacattttgtctgagtgaaatttgtccttcatatctatctgttgcatgtctgtttgtctaaactgaaggtatttgttaaaagcatcaccataatgaatagtaattcagccctttccaggcctagcaaaagcatttgctcatgtaacattaaaacattgaaaagaaagaatgcatgccttttgatgctaatatgaactttaagatttctgaatggaaaagtaaaatttagctatagttttataatacataaaagtgcctgaacacaaaacacttgattaattcaaaatttaagaaatgttggcaatagaaaagaattttgcctgtaagttttctgtgaaaaattatgtaaaaggcttacaggaaaatgtaaggtgtaaacatgtaaggggagcaggagaattatattgcaaaattcacagtgtaaaacttctcaattagtttacaggcaatggtattcagtgatattcatcattgccccatgccatttgtctagaattgtgtaaattgctacataatacgatattttaataatttgaacgtatcttatgattttgtagttttgcatttagagtctcaatgaagtgcttcaaaagtggtagaagatactacagggactaagaaaacttttataaacactgtgatgctttaacaaaaactcagtcatgtacctgtaaatatcagaacccagtaaggggagctagcagctgttgagtgtatgccttgtccaggcagtatgcatgcatcatcttggtttgcgtcatcatcctgttttataaatgaggacaccaaaaacaggcaggatggttagcaagaacatgggttgaggtcagatatggccccaaccctctctgtgctgttcatatgtaagtgggtgactttggataagctgttgaactgggattgcagatgaatacactggtcaagaggaagagttttggtttacgattcttgactaagttctagctgtagtagttatcagttctgggatctgcataaacttcatctgtaaaacaggaatgataacactaactcatatatttgttgtgagaattaaagtatataaagaagttaacatggtttgtggaaaacagcaagtgctgatacattgtcagtgataaagataatgctgctactgctgctgctggtagggttggtagggtagaactcttacagaaactgaggcatgtctaattccagagcacatgcttttcccactgactctggtcctggaaaagatcagacagaatggtatggaaatgtgccttgaatcacaagcagttgtcgtttttgaagtagaaaaactctttccaaaaatatacaaattatggaccactctgcagatggaaattagaaccaaatgcatggaaattagagcctactaagagagaaaaacaagacaacaaatacatccataccttgacctctgatagcagtaagtgctctgaagaaatgcagcctaagtgattagatttaacagacaggtgtgagggaaagatgactctagttgcttaagcacctgggtgaatgggggatttatttcatgaaggggggaatgctgaaggagaagtgagtagccgaggaatcaagagtattgtcttggctagtacaatttgagataccagttgtatatttcaatgcagatgtggaataagaagtcagatgtgtgacagtggagctcagaggacaggttggcatgacagtgttgatttgggagtcatgagattggaaaacatccatgaggaacccctctatggggagaagagaaggaatctgggctctggggcattccaaagtttggatatcaggaagcaaagctgaatccagaaaaagagactgaacagaggcttccaatgatacagaagtaaaaccaaaagaaagtggtttctgaaagccagtgaagggagtgtttcaagaaggagaaagccactgtttccaatgctgcgcttagtttaggtgagatagcagagacttgatcattgaatctgcttagtagaggtagttggagagcttgacaagaacaatttcagtgaatttgtggagaggaaagcctgcttagaatggagttgaggagacagtagaggcaagaaagtggaagtaaaaggtatagagacattgattgattgattgattgagatggagttttgctcttgttgcccgggctggagtgcaatggtgtgatctcggctcactgcagactccacctgccaggttcaagcaattctcctgcctcagcctcctgagtagctgggattacaggcatgcaccaccacgcccagctaattttgtatttttagtagagacggggtttctccatgttggtcaggctggtctcgaactcccgacctcaggtgatccacctgccttggcctcccaaagtgctgggattacaggtgtgagccactatgcccagcctggtgtagagacttttaattagcttttctataaatcagggcaggagaataagatatgaactggagaatgatatgggttttttaaaaggttgatttttcagttttattttactatgaatgatactacatcaatgttctctgctgatgaagaagatctaatagatagggtaactgacgttgggattgagggagagataattataggagcaatgttctccataggcttaaagagtatgatcaacatccaacatagagaggttgatcttttcacattttggatggcagatgatatgggccaagatgcagggagattgcagatttggtgggaagatgaattagttctcttctaattgcttctgtttcctcagtgaaataagaactgaggtcattagcaagtgcagtatgatggatgagtcatgttaattaaccatcatctgcataaactgcattcttgggcagcaggctcttgggagatcatttcgcaatagaattttgctttgtgggctatgttccctgccctactttggccataagtgctgttcctgtgttcctgccatgtgattcttagagataacaattgaccatcagtgaagagcctactttataccttcattttttcactggtaactctgaaagagtatattttatcagatggtagtctaagaagtaaagcagcaaaatcaatttatatatatatatataaatataaattctatatatataatttttatatattatatataatttatatatatatttatataaaaaaaaatatatatatatatatatttttttttttttttctggagacactcttgctccatccccttatctcccaggctggagtgcagtggcgtgatctcagctcactgcaacctccgcctcctgggctcaagcgattcttttgcctcagcctcctgagtagctgggattacaggcgcaaaccaacatgcccatctaatatttgtatttttaatagagacagggttttgccatgttggccaggctggtcttgaactcctgacctcaggtgatctgcccacctcggcctcccaaagtgctgggattataggcatgagccactgttcccagccacatttttattttttcttgtaggcatatatgttgttccaaacccctaacataaactatatggattgttatagagtgtgtcagaaggtaatgggaggaagcaactgcactatgaatttactccctgtcataaagaaattatattatagagcctttcatccacccagagatgttgacatgactcaggctgattctgaaatgatggaaacaggttatggttaataaactcttgtactttttgccagaaaaggtaatatttcaaattcttttctaatgttagaccttaatagaaataaatgcttattaggtgaaaaacatctaaaggaaatatttttaaaaaccaaattatatttttatttagttcagtaatcattcattgagcacttatagtaagctaaactatgggaataaacagttgcataattacgaatgattcaatgactttgatcttgaatttgttgcatacctgcagctgttctacattgtttattgggttgtattttgtcttattcccgaaatgattttaggaaacttatggaagatacattcaaaaatgtaaataaatataaattataaaataggaactaaataaaaataaaaacataataatatgggaagttaagaattagaagagaaaatcaacactaggggaagagctaaaatatatattagtgaccgtaaaggcttaaacacttggtaaagatttgttgcatatttgattctgagcttcttatcagccataccggaaagaaaaatgcagtccgttacatgattcttattgttcacaagggggaaaaaaggtcactcaagggaaaaaatacttgcactggcatctatatagttttttacatgagttttcctatagggcatacccaatgtgaatggtgaaaagtattgatagccaatgtaataatgcaacttacaaagttacttcttgaagcatcaggaccctgatattattttggtgatcaagaaaaagatcagaattagagatgaaaattgtgtgtgcatgtgtatgttttgttttttaaaaccaaaagattgaactttggaagtaaaagagacaggccatggtagaattacctaaggacttggggtaaaatcttggagatggcctgcattaagggtaacagaagagaagaatctcataaaggttgctgaaatgaaacaaagaaatgttagaggaggaacaaaattctgtagtatcacaaaaggcaaaggtaccaatgagtgtattaaaaaagaatcatctaaggatatgaaatgcgaagagaccacttcactgttggtattaccaagtagagtttaattaatgactttttgagagtagtttcaatagaacaagaaagggcaactttcttcacagaattggaaaaaaccactttaaagttcatatggaaccaaaaaagagcctgcattgccaagtcaatcctaagccaaaagaacaaagctggaggcatcacgctacctgacttcaaactatactacaaggctacagtaaccaaaacagcatggtactggtaccaaaacagagatatagatcaacggaacagaacagtgccctcagaaataataccacacatctacaaccatctgatctttgacaaacctgatgaaagcaagaaatggggaaaggattccctgtttaacaaatggtgctgggaaaactggctagccatatgtagaaagctgaaactggatcccttccttacatcttatacaaaaattaattcaagatggattaaagacttacatgttagacctaaaaccataaaaaccctagaagaaaacctaggcaatacctttcaggacataggcatgggcaaggacttcatgtctaaaacaccaaaagcaatggcaacaaaagccaaaattgacaaatgggatctaattaaactaaagagcttctgcacagcaaaagaaactaccatcagagtgaacagcaacctacagaatgggagaaaatttttgcaatctattcatctgacaaagggctaatatccagaatctacaatgaactccaacaaatttacaagaaaaaaacaaacaaccccatcaacaagtgggcaaaggatatgaacagacacttctcaaaagaagacatttatgcagctaaaaaacacatgaagaaatgctcatcatcactggccatcagagaaatgcaaatcaaaaccacagtgagatatcatctcacaccagttagaatggcaatcattaaaaagtcaggaaacaacaggtgctggagaggatgtggagaaataggaacacttttacactgttggtgggaccgtaaactagttcaaccattgtggaagacagtgtggcgattcctcaaggatctagaactagaaataccatttgacccagcaatcccattactgggtatatacccaaaggattataaatcatgctactataaagacacatgcacacctatgtttattgtggcactactcacaatagcaaagacttggaaccaacccaaatgtccatcaatgatagactggattaagaaaatgtggcacatatacaccattgaatactatgcagccataaaaaaggatgagttcatgtcctttgtagggacatggatgaagctggaaaccatcattctcagcaaactatcgcaaggacaaaaaaaccaaacaccacgtgttctcactcatagatgggaattgaacaatgagaacacttggacataagaaggggaacatcacacaccggggcctgttgtggggtgggggaaggagggagggaaagcattaggagatatacctaatgtaaatgacgagttaatgggtgcagcacaccaacatggcacatgtatacatatgtaacaaacctgcacgttgtgcacatgtaccctagaacttaaattataatgtagatatatatatatatatatatatatatatatatatatatatatatataccaaaaaaaaacaacaaaaataaaaaagaaagggcaggcttagagagtaaagtgtcagtaatgggaaagtgtgtatagacctcttctttcaaggaatgtagaagtgacggaattgtaggttggtagacttgggatagagggattgattggcaggcaaggaaggggaataatagtgtacaagatcccagaggaggagggagacctgacatgttcaacatagatggggttcagagaggaaagagtcaccatttttgctgagctacaaggaaaaaacaaacagaaataccgagaatctttgtgttggaagggaggtgatatgtttggctgtgtctctacccaaacctcatcttgaattgtagttcccataatccccatgcatcttgggagggacctgatgggaggtaattgaatcatggaggcagttacctccatgttgttctcgtgatagtcagtgagttttcatgagatctgatggtttaataaggggctctcccgccgcaccaccccacaccacccttcactctgcatatctccttgctgccaccatgttaagaaggacatgtttgctttcccttctgccatgattgtaagtttcctgaggcctcccaaaccatgctgaatggtgaatccattaaacctctttcctttagaaattacccaatctcgggtatgtctttattagcaatatgagaatagactaatacaggagggaagctataggaatttgtatcagatggcttctgaagtggttcaagatttttgaggtaatttgcaaagtgaggtgaaattatgtgtggatagggaatctatttaagtcatgacttcaggtcaaaatacaatgcttagaacatacctttttgaggttatgtagataccattttctgtctttaaatatgtcagttctttgctttcttagaaataatttagcttgccttgctacctttacaccatccaactcccacaggtgtatttctttctcttctccttccctcctttcattaaaaggccaaatggatatatatgacaatgaagtaaatgagctttataccaataggctaagtaatttatgaatagtactttttagaaaagtgctaggaaaatggttcttcactattttcctaaaacatttatagaaacttgatgaataatgaatgggaataatttataatagccacatacttcactcaaatagaacacttgtttatactcctacacagcagttacgtcatggctgtattttacataaggagtcatatatttttaatgtaaatgttgctagaatagtttcattcagtagagttatagaatcttggtgtcttaagagatctcagaggacagggtatccctgagaggcactcagctagacattgcttcacttctgcctaaattgtgcattccagtgatcatgagccatgctaaaatacagcataaataagtcatcaataagttgaatagcaaggctaggattgtgtctacatctttgctaatgaatataatgctagactttttatatatgcataacagatttaatcaatgaaaatatgtagaaacaagttttattttacagttgagttttgcagtacagtgggaagattgcatttttaaaagacaaaataagacttagcattcagaaaaagtagctggatcaaagcaatttctaagtagaaactcaaatttcagtcagtattttaaatagacacatcctgactcccttcacagattgccactgaccatatggtaactgcagacatgcctcaaaataaaacagccatatgtagattttcaaatactgacctcatccctagagagccatatttatctagaagagcatctcaagccatatcaagtagaattatgatttgtgtcatgttcaaagattagaagaatcagcctaatgaaaaacaatcacaagttaaaagcaaaatgccaaggaaaataaggttagatacccacagacatttaaaaagcaaaggcatctggagacgtatctttcgaattctccttgcccagtccttatacacagtaggaaagcacataaaagtagcattaaaatctatcctgtgctatggccatcagaatggatttaggggaatgcttaagggatgatcaataggagtgcttggcatgcgtatttcttctcagactagcagtcactggatgcaaatattttctgtctgctgaatgtgctaatggaataccaatattatttttttctaatttctattgttaaaatttctagagcagaacatgtggaactcacttctatggtttcctgctgttaatcattctctactgaaattctgccagttttccagaacatttagctttgtgggcatgtgtctgtgaattaaaaacatggaagaaggaacagaattgttgcaggaatttggaacaaatctatttatatattcagtggtacctcacttcccttatcaaaatcggggtggagaagggccagaaaaggggattcaggaagtaaaggtctacaagtaataagaagattctgtaatgatgatcattgtaactacaaaacctctctctctcacgctgtatttatgtatttatacatatacatacttctctctctctctacacacacataccccacctctctctctctctatatatatatatacacacacacatctctacatacatatgcatacatattttatatttatatatgtgtgtgtatcatatatatatgtatatatatatgaaaaaaagattttaatgacctccttatggacagtcaagccccgcatcccataggtgtagtattatgctagcagatttctcatgtccaagttttgtttaaatctgagcactcagggatatgccagttgcctaaaattaataatgttaatcattcctaaatgttctttaagagctttagtttttcctttgcattccttttaatgtagcagtatttcattggatttggttcagtgattgtgtttcagacatagtgatatatcataggtttgccttcaaatcaaatacagttatgatcctgaaggaaattacccttataggccaaactctgaaaattgtactctatcctaaaaggtcactgaaatttctgaactaatctttataatacatgaataaacctaaacattgttttttacaaagcaaggcccctcactagtgtatgtcactggatatataagtagacatctgtgaaatttatttttgaagtattattttggtttcttggtacgtaaattggattactttattctaagccaggtttgtaagtagtttttaaaagtcatttgaacccattcagattactcaggctctttcactgtgttatctcattttgtactcttcagttttgctaaatgtaacaagaggagactttaacagaaaaccttaaaatgttttctgcaataaaaagatcagttcttcatagaaatccaatagcattgtaaaattaaaactaatgttccagcataataatgtccataaacttgcttttcaatattaattcatttttggtattgatctcataagggagtgtttagttaccaactgctttaggccatgaaatgttttggggcaaagaaaattgaagggattgttttggtattatgttgctcttaacagatttttcaggaatacatagaactgtgttagttagctgacatcttttctgttatttaagttgtatttaattgggaaatattatatcttgtcatttgtatctgattgttttattggagaggtttttttcctgaaaatttgtaaaataagacaagaagactaaatggcttatctaataatttttttccctatagaaatctagattttgattcatacttaatgtgtagatcagcctttccactaaggttctcaaaggtggctggccttctttactaactgaaagcaggttcagcagcctcttatagctttcatggaaagagtttaattgaccaagatagactgtgtgttcgtcagccttaagaagagagatttgttttatttatatgctatgacataggatatgatgggattgtctttatgagaaaaatagatcctaagatccagcattcaccttgtgacctccaggaccctgtgcaccaaccctcttgcatatggtgaccaaattcatgtatgcatcttccttgtaggctctgtcagttatgttcccgacatggtaaagatagttttaaatctcaagtgtcctagcatagctaaacaaatggaagatatggttatatgtcctcctccttttcccatagcatttacattcttccataaccatttatgcttcttatctattttaggaatggcacctttataagtaagtgaaagatgagagactggaaagtccatactttgaattaactcttctcttccatgaacgtaatgctttacttcctaccacattttggagaacttagcactacccttttttatagaacatctttactctctctttatttaatgactaccactggtattttttaatatgtaaattcaatagtttttctttttccttttttagtggtacaggtaatagaagaatagaaaaagagagttgagggagggacaagaactactttgaaattagagaatacatttacagcctcatatgttcagttcatttttatatatatagttctgggatatttttggaataattatgattttctgagaatcatgctgacagaaaacatcgtctctttcttttaagatgttacatttcaaggtacccccttatgtttgcagtagtcatacttccggaatctgggggacaatttcaatttttttaaaagatactctgccccaacataagatcatgggccattgaattcaggctgagttttattttttgatagctttattcatgattactgttatatataaagccaaatatagcatgaatcatacatggttagcttttcactctaattctcattagtacttatttgttgaatgtctgaatctaaaaagggaatgtgctaatagaatattactcaatatccatataaaacttaaatatctatacaaatacagtttctttaaccaagcaaatgattaatgtttaggagcatagttcatctcaaaatgctctgctctgatagagattcaagaatacttgatttcttgggagcctacatgtgatctaaaatgaaggcaggggaatggaataattctgatttaaatgtagttgtaagaatagtttggcagtacatatcttgattgaacttgatagaactgtcatttattatgggagcctgttgtctaggtcttactcatttatgcctagtgtattgttagtaatctgtgtaggagtgttaaatataaaggaaagaaattataagtatagaatgcatttattctttatgttaatgaatctatttgaaatattttgtggaatcttaaatgtgaagggtaattgtttatttgattacagagaaggaaaacctatacaatttattggctatttttttttttttttttttgagacggagtctcgctctgtcgcccaggctggagtgcagtgccgtgatctcggctcactgcaagctccacctcctggattcacgccattctcctgcctcagcctcccaagtagctgggactacaggcgcccgccaccatgcccggctaatttttttgtatttttagtagagacgggttttcaccgtgttagccaggatggtctcgatctcctgacctcgtgatccgcctgcctcagcctcccaaagtgctgggattacaggcgtgagctattggctatttttaatgtaaaactttgaaattgtattcagctatggagaaattctactagagagcttatggatgaaatcatagcatcagtagttgaattaatgtgggatatatttctcatgcatttccacctttaattatgaaaacacctggagctcagggaaggtaaggaacctgcacaacatcacacagcttctaaatggccaagatagagtcaaacctgagtttccctgatttggagaaattgtactattcaacactgattatggttgtatagtctttagcagatgcaagtcatatatattctttttttccttgcatataatatctattgaaaaaccgggtaggtgagaaaactttattatatcactaagaatgacagcatattgtgaaaatactgtcagaataccatcagtcaagtgtgtctgtcctttcatttaaaagtggctttgtctaatggcaggcagcatggcacaataagtagccatgaggagttcaggcagagatgcataaatgggtgactgtgagtattctaagaaatctactggacatgatttttttgtctctatatgggatctggaaattctgccagagaggcatttgagtgatgccttcaagagtaacccatggctgggcatggtggctcacgcctgtaatcccagcacactgggaggccaaggtgggcgtatcacctgaggttaggagtttgaagccagcctggccaacatggtgaaaccctgtctctactaaaaatacaaaaattagctgggcatggtggtgtgcgcctgtaatcccagctactcaggaggctgaggcaagagaatcacttgaaccgggaggcagaggccatagtgagctgaaatcatgccactgcactccagcctgggtaatccatagggcttttctcaggaatgcgaaggtggtttgatgttacaaagctattattgtgacttactgtgtaacgctcatctccatagagggagaaaaggcatttgataaaattcattgcttttttaattaagtaaacaccccatatttatggggtatatgtgatattttggtacatgtattaaagttcattgttttttctccttgggaggttgaggtgggaggattgcttgagcccaggagttttgaagttacagtgagctgtgattgtgccgcagctttccagcttaggtgacagagtgagactctgtctcataaaaagaaaagaaaggccgagtgtggcggctcacacctgtaatcacagcgctttgggagggtgaggcaggaggattgcttgagcccaggagtttgagaccagcctgggcaacatgaaaccttgcctctaaaaaaaaaatttttttttaattagccagatgtgatggcatgtgcctgtggtctcaactactcgggaggttgaggcgagaggattgctcgagtccagaagtttaaggctgtggtgaaccatgatcataccagtgcactctagtctggggcacagagtgagaccctgtcataaacaaaaaaattattgcttattgataaaaggttagtaaaccaggaataaaagggaacttcctaaatctgtttaaggatacgtatcagaagctttcatcaaggatattactgatgaaactttggaagcattctctttagtccaggcgtggtggctcatgcctgtaatcccagcactttgggaggctgaggcaggtagatcacttgaggtcaggaattcaagaccagcctggcaaacatggtgaaaccccatctctaccaaaattataaaaaataagctgggcgtggtggcgtgcacctgtagttccagctagttgggaggctgaggcaggagaattgcttgaacccaagaggcagaggttgcagtgagccaagatcatgccactgcactccagcctgatgacagagcgagactccgtctcaaagtaaaaaaaaaaaaaagaaaaaaacattctctttaaaatcatgcaagggccaggcacaatggctcacgcctgtaatcccagcattttggaaggccaagacgagtggatcactgaaggtcgggagttcgagaccagcatggccaacgtggtgaaaccccatctctaccaaaatacaaaattttgccagctgtggtggcgagcgcctgtaatctcagccactcgagaggtcgagaaaggagaatcggttgcacctgggagactgaggttgcagtgagccaaaatcacgccactgcactccagcctgggtgacacagtaagactctgtcttgaaaaaaaaaaaaaaaaaaaagaatgagacaggaaaccatttttcaccatttaataaacgttgtactgaaaatactagccaatattaggccgggcgcggtggctcacgcctgtaatcccaacactttggaggttgaggtgggtggattacttgaggtcaggagttcgagaccagcctggccaacatggtgaaaccctgtctctactagaaataaaaaaattagccaggcatggtcatgcgtgcctgtaatcccagctactcaggaggccgaggcaggagaattgctggaacctgaaggcagaggttgcagtgagctgagatcacgctgctgcactgcagcttagacaatagaacgagtcttcatctccaagaaaatactagccaacattataaaggaataaataaagctgtcattgtttgcggaagtctatgtagaaaactcaagagaatgtgcagaaaatcttttagaattaatagagttcaccaaaattggtggatataaaattaacatacaagtgcagcatcaaagaggaaatgtaatgttaaaaaagataccaatgataatagaaaccaaaatgtcaggtactgcggaatcaatattatgaaatatgcatataactttagagaaaagtaactgatattttagcagaccccaataaagatatatttacatataggaaaaaaaagtggccctgtctatagacaatgctaacaatatagctatttaagaaaatcatatggacacggggaggggaacaacacacactggggcctgtctgggggccaggtgaagggagagcatcaggataaatagctaatgcatctgggacttaatgcctaggtgatgggttggttggtagatgcagcaaaccaccatggcatgcatttacctgtgtaacaaacctgcacatactgcatgtgtatcctggaacttaaagtaaaataaaatttttttaaaaagaaaattatttatttagaaaggatacttcctctttttaaataaaagttttctagaacagtaattcttcgtaattttttcctcagcaacataccacactcccatgactgttaagaagtttgaaattcgttcagttgagaattgctgaggaatgcattttatgtctgcttcatttatgtagatacttttgacaaagaaaatattttagaatttagaaagaattcttgatagtaacagaaattggtttttgaaaacagtattttagtggtattaagacctataatcatctcctcttctaagttgataaaaacctttacattagcaacctggaataataatgaccagattaacacagtcattgcataccggccctaatgtaccatgatcagcttacaagcacgcatctatagacaactggcccatcacaacatcttggcaaattgattgccttggaggattttggaatgtattggcataaatgccagactgtgaaagaatgattgaaccacatggggttgaattcatcaatagcagcagtccattctttcaagcagaacatgtgccaagcaccagcttgtaatcacaaacatcatctgctgcatattgaagaggaaaacagcgtgggtgtgctcaggatcttggtggtagtttctaattaatcacaacattgtttagcaacttggagtatactcaaattgcttcatccatgagttctcaatccccatacttgctctggtgtttctctttttttctcttctttccttcttttattccttatattcatcaaggaaatatttactgaatgtcctctatttacatgatcctgaactaagcacaatgggaagtaaaatgataaaatgagcaaagcctgaactacacacccgacataatccagcacagagatcataattcactatggaacagagatcagggacctagtccccaaaacaaattagccaggagtgagagcctggtccagtccttcagaattgcaaggatgggatcccaagcagaaggaacattgtaagagacaaaattgtaacaatatgggacttctttgagtaaaacagattacccaaaaattgctgaagcattgcctattagaggagaagtagtatgaaacaaatcttctcaggtgggctggggcaggagtgtccccttcatgaaacaggccctgatggttctgttatcaatggttttgaacaagtaagtggaggattcagtggggtgctttagccaacaggtggcagcaatgtggaggcgggatggattggattcggtagagactggggatgttgagaccacatattaggcttcttattgaacacatgaatagtatgtgccaggaaccttattatctctaatcctcaaatggatagtactactcttaaatccattttactgaaggggcgatggagacttacagaatctcacagtggctacattgtaggactggtatgttaacactggtctgtgtgaacactttccacagccgtgcactgtcccactgggagatggatgccagccagacaggcagtagaaaggtggggaggcagagaggtacaggtgcagaacagaagaaatctttccaatgttttgtggaaagaagttaggcatacatacattaattctgattaaaacttggcaatgtattagattcaggatatatgaagagagaaggagcactcaaaagccatgaatcttgatttactttgaaattagataacatggggtaaaaaacaagtttggggtgagaaatgaggacttctgttttgtatgtacctgagtggcatacctcttgtgggtccttccttatgccttaatctcataatactgtatatgtacctctgttagagcacttacaccattgtggcatagcttgttttgttttggtggatgaccccatcctggtattatgagctcctcaggggctgggcctcctcacgtttctgtccctagcatggagtaggctcatgggaagcgcttcaggtatgataaggaactaggggattcttggccagagagacaggagaaatcaatggaagtccaaggaggaggaatgcttaaagtgaatgttgtgagaacatgattgggagccagttagagatgagtgaaaggctcccctgatagcacgcaggacctgacatgctgaatttgtcccaaaatgagtgtggctcgtttttgtaattattctcaaacaatgctcaactccctggatgtgggaatggagaactccctggatgtgggaatgaaatgagtggcttgaagtagataaatctggaactgaggctggatagagtggcaggtgggaccatgaaaatgatgaagaaaatgaaatggaggaattgcagtcgtaaggagcacagagtatgtttgttactatagcttggaagtgtttcagttttgttttgtgttacttctactgttcataagttgttgattttttatgctaagaaaaataagcttatttaagtgggcatacaaaatatcttggcatttgtggcatgaacaagatgtcggcccaagttctctctctaaacacttactagtttgtgaccttggaagagttatctaatccttctgtgtttagtttcctcttttctaagatgggggtagcaacacttggtctctctgacttcacaggactctgatgatgataggaaattgttcataaggcaggaagggttattgaagtattagataatccattgagatttgagcaaatgcttaatactcttggtgattgtgtgagaatggccgcctctggttgcattcaggaaaggatcgtggtgttgggggatcttgctgtgcttgattgtagcccaattatagggccctaaattgaggagtggggagaataatatttgaagctgagcagtgattatcttgctcccagtgaggcccctgctttctccacaggggcatctttactttatcagcagtggggaagcctcctacagtttgcatcttgtaatccattagtcacaaagtgttccactttttcctccttaactttaatattaatacaaggtaaaactcataaataaataaaacaaaaagaaagggaagaataagagcaagaaaaaccttgaagaggtgttaagggggcttcatcattggcagttctctttcagcagtctcacagcagacttcattacttcagtttgatcaaacattgttgtttctaataacccccttgtgttcttacttaagggaatatcatgctctttgaatattgaattttttttcttatccagttcaccatgtcagccttcctgacatctaaagtctctagattattggtgaagctttttcttacttttgttgttgatttttagcagctctattgaggaataatttacatacaataaaaagcatgtatttaaagcatataatttgagacgctggcatatgtgaacaccatgaaaccattaccacaaccatgcaagtgaacatattgctgcctccccagaacttcccttggtgcccctttgtaattcctccctccacaggcaaccattgatctgctttctgtcaagttatttggacttagagttttctttgggggaacgtttttaacaaattcagtatttttaatagcttatagggctggctactcaggctatttcttcttgagtgagtttggaagattgtatcttttagggaatttgtctgttgcattgaagatgctgaatttaatggcataaagttgttcatgatactcttattattttaatatctgtcctgagttcacctcatttactcctgatattggtcatttgtgtttctggctttttcctggatagtctgtgcatttgttttctgtggttactataatagattactacaaatttggtagcttaacgcagtagacatttattttctcacagttgtggtggccaggtgtccactcctgtcccacaccccctccagagtccgtagaggacaacctcttccttcctttttccagcttctgggggcacctgtcattccttggcttttggctgcgtaggtccaatctctgcatttgtcttctctgcttttgtctcgaatcttcctcagcctcctcctgataaggatacatgtgattgcatttagggaaaacctggatgatctaggattgtcttccgatcgcaaaatttttaacttaattatacctacaaagtttatttttgacatctaagataatacaggtttcagggattaggatgtgaatatgttttgaggggcccttatttagcctaccatagcttggcatgaagcttatcaattttattggtcttaaaaaaacaattttggttttatggatttttctcaactctcttcttttctacttcatggatttccattttgatctttagtaatacttttagcgtgtgcatactttgggtttcactcgtctgtctttttctggtttcttaaggttgaaggtttcctaagagatttcttgcagtaattttacctgttacactttagctccattccacaaatttttataggctatgtgtttagattctttcagctttatattcttactaattttcatagaaatgtgttatttagtttccaatttgggggatgttttccagttgtctttcagttactgatttctatgttaatttcattatggtcaggatattcttaatatgacttgaatccttttaaatgagttgagactagtttagagctcagaatataatctacctcaggtaaatattctaagacattgaccatacaatttaagaatgcatatcctgctcttatttggtggaatgtggtttaaatgtcacttattaggtcaagtttgttgatagtgttcttggagtcttctatatccttggtgaatttcaggatacttgttctgtcggttactgagagtgatgaaatatgagagtacaattgtaggtttttcaatttcccttttctgttgtgtcagtttttctttcaagtattaatattttgaagctctcagtaagtgcatacacgtttaggattgttatattctcttgatgaattggtcccgttatctttacaaattgtattttcctgcctttgtgcattcttagttattttttattttatgtccacattataaaattttatctcattgagttttgttctcggataccattaagctgcttagaagcagttgagtcttgcttttatgctgttttagatggcattcaagtaatgtttaatctaggactaaacttacaccattattaaggtatatcccttctaaatactcttttgtatgcttcagatttttcactctggttcgtaggaacaggcactatccccagccctgtttgagctcctggaattgatttctctaaccctttccagtagctctttcccctgtcttgggttgtttcctcacacacctacactgatcagtactcaactgaatactcaagggaaattctgaagatctccagattctcctcctccctctctgaatctatcctccctgggtcctctgccatctgaattctagcccccttggcatctctgtattctgagctgcatcttttcaactcaaggaaacaccaatgtctgcctggtttacctgccctgtgctgcagcctggaaacttttttgagatattgagctggggacagttacagggttcgcctcatttgtttcccaaatctcaggtatcactttgcttcattgcctgttatccgctagcatgagaactgttgtttcatgcatttttgcatggctttctagttgattcatgtagaaagggaaagctgatagccattattctgtcttagctggaaatgaaagtcaagagctggaattttatacaaactggcttttagtgcatttttaatcatacttagaaaaccttctgtaggctaggttcacagacaacctatcatccacaaaagtggctgcccttgtgggactctttttcatccctgctgctggagcctctgccacctggacaaccttatgcaagttacttagcaacttggtagtatgaggtgttcagagtgaaggaagagggatgagctcattttgggatcttgaatctactgctttactatgggttatattttaggtcttttatttctaatctagttggttaaaggttttagtttttataatgtgagaatttctgtgtttgaaagataaacatttaaaataaaattaaatgtgaaatgtttgtatgcacaaaacatttttaattacaaaagcaaaagaaatgttttaagtagagcatgacattttaaatgttcacttatgaacattcagccaattaatgtacttgatttttttcttctgcctcatagattctgtgatataaagattaatgatggttttcatttgtaaaggaagttttactgcctaataaagctaggttcataattttaatgaaaggaaattctttaattttgtttatgcataatcagatgtgcagctgctgggaccaaaatttatccattaaaaaatgcagtctaataaaggaactaccatcatttatttttaacaggaaatccaaatcaagagaaaatataaaatccagattttaaaaaactaggaaatatgtgatgtttatgcaatagcttatctcttgtttttatggcaagtcaaactttggtcctaatttgtcataatgttctgtatttctgttctccaaaatcattattacctagcctgaccatcaaatcatgatacagtttaatagtgaaagtagatgcatctttccaaagattataatagacttcttgcattaggaaaaactaatttctcatctgagaaagggcttttgtttgtttttgttttgttgtctttttttaaaaaaaaaatcatgatatacaaggtaaatgttattatttttatttgaaagttttgattaaaggaaaggtagtgccttgcttattttgtgggtcacttgcaggtatctgtatttgcagatgagcctgcctatctttcaggttgctgatccagatatatttcagcattgttacaatcaaactctcaaaattcacctgtttcacacagtctttctgatatattaggctttaatactgctttgctcgaatctaaggcaatttgacatttataataccctcagtctgctttctaaatggatcgtcactacatttagctttgaatgaccatcaacgcttctctaaattaatctattccctctcttgccatttagaaacaaaatcatttgcaataactcaagttttatgattatacttatatccatgtaggaatagaatattctcacccctataatatttcattctaattaatgccctggcttgacgtcccatactaacttttattgctgagacaacatacatattgtattccatttttgtgaatttgaatattagattttcaaaagatcctgaaatagttagacttctttggattttaatttaccggacttggtttagagttcattaacaaaacttggactctaattaagcagttagcattgcagtgatcccaggccatctcttctaacagcgggaataccataggtcctgggagttgactctagctccattaaggacaccatatagaatgcctcttaaagctaaggtgacattgtaactgaaacacttatgaggctggaagggccacatttagtaattatgccctgacaacaggcatcaataaggttagtcaacctacttaaggactcagtggttcagatttacagctttccagaactgatccagagttcagataaagaccaaagtatctctgccattttgaaagttcatttgtattttaaaataatcattgattgcctcttaagggactattcaaaatttagaaatacacacacacacacacgtacacacacatacacacatctatagataataggtattaattgtttttctttattaactttttggtaacttttattaataatctccattgtagctataaccaaggctgacatcatgcccaaattctgtaactttagtaaaataacatgaattttgttctttaattcttcttaatgaatgcttttcttacggttgattaaagcaattttgccagtgacttttaagtagtcccacatggatggattttaaataatacttaattgacaagaaagttgaagaacaaaggaagtggttaatctctagagcttgtagggatttaaggaagactaatttgacagttttagttatataggtcttctagtacccataaattgcttaaacttaaattatctcttgtcgcttttacagttcaaactaaaaacaaaaacaaaaacactatctgtttgcaaaataaaatattgtacccagatttctgtaaaaatagagttgttctgatttaaaatgcccagtcatgttgatttcatgaagatttaggaaaatttgtcctattgggaataattactatgagagctaaaaataatagttgtattttttttttctttctttcttaaaaaagctggacctgtgatctgcagaatgctgagttatcccccaactcgccgagctttaattgtgggttgtggcctacaaatgttccagcagctctcaggcattaacaccatcatgtatgtatttctttctggctttttactgaaaagattgtgaaaggattattttatgtgaaatagtgaaaagtatttcatgtaaatactagactcagtgatttgttctgattaaatgtatgaattctccttttgggagatactgactttacaattttttaattccagtaatttgttactagataaaggtgatttattttgtttgttatatgattggctttatttgattccataaaatttctcttttacgccatccaatacctccttgtattctgagcttaaatgtgtcattttttctaagccatttcttgatgctggttggaaagcaaaatagaaggaaatcacctggcattgccagagattatgggcacacagataactaattcatttctttttggtgcagtctactacagtgcaatgtgataaggacattagtagaagtacgtttattataaccagagtatggtagaggggagattgagtgggaaggagagtgaggaatacagaaaaattccctgttctctaattttaagagtaattcccaaagctgtatgtgtgctgagggtgggaaggactaaatattaagggctctactaggtttccctcattcagtattaaacccatttttgagggcctctgttgcactagacctacagcagtaactaaaatagacctgggtcttgtcctcatggatgtacaggctggtagaggaagcacacattaaataaactcacagttaaatataagatttcaaactatgataagggccatacaggactctctcaattctctacagagtagacttttaagatcctaaatcataaaatacagtttagagaaggttatgtgctttcccagggcacatattgttagattaaaagctgccacatcttagaagtcctccccactccctgcctattgattgaatttttttcattaagaaaatacaaattatgtaaaattaaattttctttggtaaaccatttgtatttgagactcttgattttttttaattacttgagatatgatgagttatttagtgactgtttgagaagagtgaattgattaaaatatttttaaaaaagaaggattaggacccaatgagccagtatattaaatcaagatttgttgagaaactccattttctatacattcacacactttgtggatttgactttaatcataatccctgttgaacttcaactttcgagactacatgttcaatattttgttctctcctgcttctctctgacattaactttcattttttctcacctttaccagctctattaaggcccatctgttggtctagtgccaggcacgtttgattgcttgttctctgaatttggcacatcatgacttgttctgagatgtgtccaccttctgcagtctggtggaagtatagaattgcagctaggctaggaccaagcatcaaataattaaatccattaataatcctatgtgaattcgttagttgaccaacctaatatttgttctggttttgaaaatatgttttgtttgttatgctttttttcctaagcatttaaacttgacaagtataaaagcatagaaagtgaaggatttttcttgtactttttttgttttcacttaaaactggtatcacaaacagagccaactctagtttatgggtagtgactggggccagtgtattcctagtttgaaatgactgtcataatccattagcagtagctagtgtaaattgagctgattgatgctgtcaaattttaataaaacattcatttctccaaagcctcacttttttcctgaagatcaagtgatataaggatcctgatattctctaatatttatgatagatgcactttgcttatcataaactgcacatgatataggtagtgttgtcatagagcttttgtttgcatttgattatcaatcctggaaaacaggaagaataaaataaagtaaatgatggctgaacttagactgtgtctacatgatgtaaaacagctaatcaacttcctgcataaattaatatgttcatgtctagaggttaaaggattagacattaaaataatacaatacctatgctgagtaactgttgtttattcacagtacataatttcagacattcatattataagcccataaaatttagtgtaagtcagtgtcattatgatacactgtaatactgtttactgtctgcataaaaaacaactaatctgggactctcatgtaatgtgttttctcctgctctctctagtctttatttgtgtgtgtatatgtatgtatctttttccattattctcaagattaaggaaatactatcataaactttgtttctgatttaaaataatctattagagtctagtaatttactttttttatttttagtagaaattttaattatgccttttattttgtgttactttgttaattcagaatatcttttctatggatattttattacatataacacatatgtttatgtatataaaattttactctttttttccagcttcttcccttttaagtgggaaataaagcagttaatgcttttctttattttaattcaaccctaataatgtgtagaagttgaaatacgtttttgaaaattctgtcgtttacctcaaaatctgagtgaatggaaatataaggtattttgaattctatttctcaccaaggtgagtttatagaaagattatacggaaagataatattaaacaaatacattaaaagataaatcatcctcacagttgtgttatataatcttactgtgtttagttttttatcttctccctcaaagaatcctttattcctattcccttgacctatttactattctgtcacatttgacaaaatagattttcttcttgaaatacttgattttcttttcctttaccatatttatctatagacagtatatcatatatatagatatatatcttttatttgtatgataacttatgtttctttatatcccaacccatacattctcatcctctaccctaccgaatggaggacttgtaagttcttaaaacttacatatttcagacattacatttcacttttagatgaggcaatttttttttataatatgactctcatcctaataatttcaacatgcaactgaattgattattttcctttattcataggagagaaagagtagagaaaatggagtactaactttcctaatataagggtgttagtatcattgcactgtatctcatagaccaataaaatatttctgcatgtgtcaaaataaagaagaggagtgatagatgaagatgatgatggttaaagtaaattcaagaaattctcggccaggcgcggtggctcatgcctgtaattccagcactttgggaggccgaggtgggcagatcatgaagtcaggagatcgagaccatcctggctaacacagtgaaaccctgtttctactaaaaatacacaaaattagctgggcatagtggcgggcgcctgtagtcccagctactcgggaggctgaggcaggagaatggcgtgaacccgtgaggcagagcttgaagtgagccgagatcatgccattgcactccagcctgggcgactgagcgacactccgtctcaaaaaaaaaaaaaaaaaaaagaaattctcactgtgatctattctaaactctagttataatatcaaagatgttccatgttcaatctaagaaatatttatctgatgactattaataaatagacacttcccacattatcattaccacaacctaaatacatgtgttcatgtttggaggaggaaaggtgtacgtaggtagtgagaaagaaaacactaagttctatgtgggtttgataacatctttcttttttggggaacttgaagtaaactatattttggtatattctgataagcagataatcagtctgtcttggatgaatgaaaggtatcagatttttacctaagaagaccaagtggttaaatgactctcttttaaggttacacagaaaaacagtagtaaagggggaaagaaaatccagagtttaagcttttgagtttgcttcggataaagagaactgtgggggaatcttctctggggcatttggtcttttactttttagccactctccttgcagagtaatattgccagctttatttcctcttcttacttttctgtcttctattaactcagagtaatagaagctgagtcaagttagagagctgagtcaagttagacaggcaagtgaaataagcgggtagaggaagcagcagaaaggccctgggagcttgctggatcccaagcagcccattcctgcctggcaccacagtgatccatcaggagagtggccagaggagcagggggtaaaagtccacagggagaagaaattctgtagctgaacttggtaacaatttgaatggggcaagaagcctcctggccataagggaggacgcaaatggggcgttcatacttcacaggccgggggaaaaactaaagcccttttctttcacaactgggaggcggacagccttgggcaaattttcaagcccatctcgccctccgcctggaaacagacttggggctgttgcgggaacatggtgggagtgagaccggctcttccgtttgcgtgagagttgggtgaggcctgtgactgccagctttcacccacttccctgacaatctgcatgactcagcagagggagccataatcctcctaggtacacaactccaatgacctgggaatctcaccctcaacccccacagcagccacagcaagacccgcccaaggagagtttgagctcagacatgcctagtctcgcccctacttcatggtcctttcctatccatcctggtagtggaagacaaaggacatataatcttgggagttctagggctctgcccactgccagtccctctccacactactacagctgatgctttctggaaagttccacctaatggcaggaagccaaccagcacaaaaatagagcgttaaaccaccaaaattaagaaccctcatggggtccattgcaacctgctccccacaacctccactggaacaggcgctggtatccactgctgagagacccataggcggttcacatcacaggactctgtgtagacaacctgcaataccagcctggagccaggtagactcgctgcgtggctagacccagaagagagacaacaaacactgcagttcagctcataggaagccacatccataggaaaagggggagagtattacatcaagggaacaccctgtgggacaaaagaatctgaacgacagccttcagccctagaccttccctctgactgatcctacccaaataagaaggaaccagaaggccaaccatggctatatgacaaaacaaggctcttcaacacccccccacaaaaaatcacgctaattcaccagcagtggatgcaaaccaagaagaaatccctgatttacctgaaaaataattcaggaggttagttattaagctaatcagggagggaccagagaagagcaaagcccactgcaaggaaatccaaaaaatgatacaagaagtgaagggagaaatattcatgggaatagatagcttaaagaaaaacaataaaaaattcaggaaactttggacacacttttagaaatgcaaaatgctctgggaagtgtcagaaacagaattgaacaagtagaagaaagaaattcagagctcaatgacatggtctttgaattaatccaatccaacaaagacaaagaaaaaaaataagaaaatatgaacaaagcctataagaagtctgggattatgttaaatgaccaaacctaagaataatcggcatagctgagaagagaattctaaaagcctggaaaacatatttgggggaataatcgaggaaaacttccccagccttgctagagacctagacatccaaatacaagaggcacaaagaacacctggaaaattcatcacaaaaagaccttcacctaggcacattatcaggttacccaaagttaagatgaaggaaagaatcttaagagctgtgagacagaaacaccaggtaacctataaaagaaaacctatcagatgaacagcagatttctcagcagaaaccctaccagctagaaaggattgaggacccatcttcagcctcctcaaataaaattatcagccaagaattttgtttccagagaaactaagcatcatatatgaaggaaggatacagtcattttcagacaaacaaatgctgagagaatttgtcattaccaaaccaccactacaagaactgctaaacggagctctaaatcttgaaacaaatcctggaaacacctcaaaacagaaactctttaaagcaaaaatcacacagcacctataaaacaaaaatgcacattaaaaagaaaaaacagaaaacaaaaaccaaagtacccaggcaagaaagagcatgatgaaagcaacagtacctcacatttcaatacaaacattgaatgtaaatgacctaaatgctccacttaaaagatacagaactgcagaatgcataagaactcacagaccaactatctgccgctttcaggagactcacctaacacataaggacccacataaacttaaaggggtagaaaatggcatttcatgcaaatggacaccaaaagcaagcagggggtagctattcttatatcagacaaaacaaactttaaagcaatagcagttcaaagaaacaaagagggacagtatataatggtaaaaggccttgtccaacagtaaaatatcacaatcctaaacatgtgcacctaacactggagctccgaatttataaaacaattactaatagacctaagaaatgagatagacagcaacacaataatagtgggagacttcagtactccactgacagcactagacaggtcatcaagacaaaaagtcaacaaagaaacagtggatttaaactataccttggaacaaatggacttaacagatacatatagaacatttcatccaacaagtgcagaatgcacattctattcagcagcacatggaactgtctccaagatagagcatatgataggccataaaatgagcctcaataagtttaagaaaattaaaattatattaagcactctttcaaatcacagtggaataaaactggaaatcaactccaaaaggaactttcaaaaccatgcaaatacatggaaattaaataacctgctcctgaatgagcgttgggccaaaaatgacatcaacatggaaatttaaaaattcttcgaactgaatgataatgacacaacctatcaaaacctctgggttacagcaaaggtgatgctaagaggaaagttcatagccctaaatgcctacatcaaagtctgtcttgctggtgttacaggtgccactggggtgtgaaaaaaaactcctgcagctagctcagtgtctgcccaaacgtccacccagttttgtacttgaaacctagggtgctgatggtgtaggctcccaagggaatctcctggtctgcggtttgcaaagaccgtgggaaaagcatagtattggggccagaatgcactgtccttcatggcacagtccctcatggcttccctgctagggagccaagtggtctagctcagtggatcccaccccacggagcccagcaagctaagatccactggcttgaaattctcactgccagcacagcagtctgaaatcgacctgggatacttgagcttgctgggcggaggggcgtccaccattactgaggcttgaataggctgtttttccctcacagtgtaaacaaagctgcagggaagttccaactgggcagatcccaccacagctcagcaaagccactgtagccagactgcctctctagattccttctctctgggcagggcctctctgaaagaaaggcagcagccccagtcagggccttatagatcaaactcccgtcttcctggaacagagcccctgggagaaggggtggctgtgggcacagcttcagcagacttaaatattgctgcctgctggctctgaagagagcagctaatctcccagcacagcactcaaactctgctaagagacagactccttcctcaagtgggtccctgatccccatgcctcctgactgggagacacctcccagcaggggtcgacagacacctcatacaggagagctctggctggcatctggcaggtgcccctctgggacgaagcttccagaggaaggaacaggcagcagtctttgctgttccacagtctccgctggtgatacaggcagatggcctggagtggacctccagcaaactccggcagatctgcaggagaggggcctgactgttacaaggaaaactaacaaacagaaaggaatagcatcaacatcaacaaaaaggacatccacagagaaactccagctgaaggtcaccaacatcaaagaccagaggtagataaatccatgaagatgaggaaaaaccagcacaaaaaggctgaaaattccaaaaaccagaaaacctcatcttcaaaggatcacaactcctcaccagcaagggaacaaaactggactgagaatgagtttgatgaattgacagaagtagttttcagaaggtggataataacaaactcctccgagctaaaggagcatgttctcacccgatgcaaggaagctatgaaccttgaaaaaacgttagaggaaataattgctaacgagaataaccagaggaataattttcctctagaaagctctgagaactgataaaataattcagcaaagtttcctggtacaagattaatatacacaaatcagtagctcttctatacaccaacagcaaccaagcagagaatcaaatcaagaactcaaccccttctacaatagctgcaaaaaaatataaaatacttagaaatatacctaacaaaggggttgaaagacctctacagggaaaactacaaaacactactgaaagaagtcacagatgacacaaacaaatggaaacacatcccatgctcatggatgggtagaatcaatattgtgaacatgaccatactgccaaaagcagtctacagatttaatacaatccccatcagactaccaccatcattcttcacagaattagaaaaaaacagttctaaaattcatatggaaccaaaaaagagcccacatagccaaagcaagactaagcaaaaagaacaaatctggaggcatcacactacctgatttcaaactatactgtaaggccatagtcaccaaaacagcatggtactggtataaaaataggcacataaccaatggaacagaatagagaacccagaaataaacccaaatccttaaggccaactgatcttcgacaatgcaaacaaaaacataaagtggagaaaggacatccttttcaacagatggtgttgggatgattggctagccacatgtaggagaatgaaactggatcctcatctctcaccttatgaaaaatcaactcaaaatggattaaggacttaaacccaagacctgaaactataaaaattctagaagataacattggaagaaacccttcaagacactggcttaggcaaggatttcatgaccaagaacacaaaagcaaatgcaataaaaacaaagataaataattgggacctcccacagagtgggagaaaatcttcacaatctatacatctgacaaaggactaatatccagaatccacaatgaactcaaacaaatcagtaagaaaaaaacaatcccatcaaaaagtaggctcaggacatgaatagacaattctcaacaggatatatagaaatggccaacaaacatgaaaaaatgctcaacatcactaatgatcagggaagtgcaaatcaaaaccacaatgcaataccaccttactcctgtaggaatggccatgatcaaaaaatcaaaaaacagtggatgttggcatggatgtggtcaacagggagcacttctacactgctggtgggaatgtaaactagtacagctactatggaaaacagcgtggagattccttaaagaactagaagtagaactaccatttgatccagcaatcccactactaggtatctacccagaggaaaataagtcattattcgaaaaagatacttgcacacgcatgtttatagcagcacaattcacaattgcaaagtcatgggaccaacccaaatgcccatcaatcaacaagtggataaagaaactgattcatatatatatatatatatatatatgatggaatactatgcagctataaaaaggaatgaatcatatatatatgatggaatactatgcagctataaaaaggaattaattaacagcatttgcactgacctagatgagattggagactattattctaagtgatgtaacagcaatggaaaaccaaacatcatatgttctcactgatatgggggagctaagctatgaggacgcaaaggtgtaagaatgatacagtggactttggggacttgagggggaagagtgggatgggggtgagggataagagactacaaatatggtgcagtatatactgcttgggtgatgggtgcaccaaaatctcacaaatcaccactaaagaagttactcatgtagccaaataccacctgtaccccaataatgtatagaaaaacgaataaataaaatattataagtttatatattttaaataaacaacctaaaatggctttttgtgtgctaaaaaaaaatcacagccatctcaagaaccattaacctcatcaggttcttaagttttctggtacctagctaagttctttgatttatatcctgatctagagttcctggacaagctaggctgatggttgaatgagtcattcatacttgttaatcatatttaatttaattttctaagtgcagtatttctggatctgttccattctcatattctatcctcaacaagcacagctggtattaaaaaaaaaaattaccacgcaatcaggaaacatagcacaagcacacatggtcagatggtgataaatgtagagaagaataaaggtggcaggaaataagaaataaaacaataagggtttgtacactttcaggttgtaaatctgaaccaggaatggggttttactctctgaggtcttccacaatgcaggatgaatgtattagagcagcatctctctaaagtgtcttcccctctctgcctccctagtccaaaaagctgttgaaagataaaatgtttactcatcgaagtatttccagattagtgaattgtactcattcgtgttcattggctggaagttagtgaattaatgggaaaatgttaggatttatggctcactcttttgaaaaatgagtgtcatgtgaggggaagaatattaacccaggaatcaggaaaattagattcaaggtctgtctccaccatgggactctgggcatgccagttaattgctttcagtctaattacctataaagtgaagtagatggacttttaatgtgcatttgaatgaggacaaatggagtttcatggagtttcaagtagaatggaagctaaaacgtttgaaatagtaatactttaagcctttcttggatgaaaagttatcagactgtagaaaaatagttttggcctaaaaagaaaattgtactttgttcaacaaaatttttggaatatttattaaatgcttaccacatgctgatcattgtcttagaggcctagcttcttatatgttaagaccatatttttatttcccaatcatgtctttgaagaaagacaatctaggttatggctgataatgcctctttatcccaagattgtgtagcagacttatcacctgatgtgatagactttccttggctcccataatgtaggagtaggctcaagccctatgaactccactggcttctcagctcatgtgcacacggtttataagggaaagggtgtactttctccctctggagtctaaaaccctttttgatggcaggtaggtaactcactatcctagcaaacaaaacaaagcattctcatcagaggaggcttggagcagaatgcctttatagcgagctatcagaatgtttctaatcattttccatttccctgtgtatatattgcatacctgtctctgtttaggttgccccaaaaccaggccctaagacaaggacttgggtgcagatgatattttggggacgatatcaagaggatgagaaaaggagtaagggaagtggaatagagaaggaagaagaggcagtaaagagagcattggtaagcaggctatgtcagtaggcaactggagcacagtcctgctgagtactctccaaggaacagtgtagattgtcctcagaattagtccaggggtatttatccacaatccccattccctcaacttgagtgttgaccctgcggatgttaaatgcacttcctccaggctttcctgagaaatcacttatggtgccagagctgtcatgtagacaagtagagagacaaagaaagttgagctagaaactgtcagattctatagtgagtttccatgatggctgcagggtaattcagagggtgatctagagcatatggggcaaggcatgaaaagcacctctgaaaaatcctgtctccaaatatgtgtaaaaataagttagcacaatatggatgtgaactttcttagtactgttcatggatacagcaaatccatttttagtaaaaaaaaaaaaaaagtcaatgatccctggctaaccatgtggaaaataaccaataaaaattggagattcatgctaacaaatgatgaaaatatattttcttgaatattattatccttttttctttgtatgattcacaaataattttgtcctgttacaggaatctgaaaaatacatcattaatgtatgtatgtatttatgccttcaaccaatatttactgtatcattgctgtacattcaaatccctacctagggattgaaggggacacaaacaaatgatttttgttgtgtttttttttttaaagtttctttaaatggagttattttgtgtgcggaaacatggtacatcaaatattaatacaacctttggtgttagatctggatttgaatccaaacccaacacacctactctctgtgtaaactccacaagctacataataacttctcaggtcctcagtgatttggaaatcaggaattataatacctcccaaatgtgattacatgagaaagcatgtatgattgaggcccatgggagcaactacatctgtgttcactttccttctgctccctgtgtactgcagtttataaagtcccaggcgtttgtggaaagcagaaacatcccaccgttaatccaccttctttaccctctacccgtcgatacaggatttgaggcatcctctggagacacaaaattgctataatacccttcttttatgcatgtctctattttcaaaattcaggaaagaatcatgatggtgttcttctagcttgtacatgttatagtagtgcccttcacttcaatattagatatgttcttttcatcttagatttatgtcaaggagaaaagacctcgatgaccttaggatgataagatctaataaagcctccttagatggtgggggatctgtagctaaatatgcccaatgtggcgtgacttgtagtttacatcaaaagattgtcaaatccttttgtcatgcttcctgaatcagatgtgaatttaaggttctgtggtaattagtggaaattcatctccatggtttgtaaagtatcagcaactaaggtttcaggtgcctcaggacatctttagaaatatgaaaacatatttccttgccttcctttttctgaattatatatttcactgaaaggtaaggagaagaaatggaggtgctgttaatgagttgaaatagcatgaagtccagggatgtgtcccagaaaatagactttctgtgccaataaagcagaaccttgtccccaatatatctgagtttgaaggtaacaccagtctggctgattccgggtagactattgtaacattgtagaagtgcccaggtcttaattcactctttacacacacaggtagcaggcactctgccagggaccagagatacacaatatgacttacaccattttcagggaacttatggtctcttttgcttatctttaaaagcatatgctgtgacctgtcttgaaaggttgcttgaagatgaaataagacagcaaagtgccagccacaaaagatgtgaggaagttctattttcctcttcccagatttacatttattcttctctatgagttcactatccaggctctcatcacttggccatggttcttctgaaaaaattttccctcaccacagcatttcaacttaaatctccttcatggcttttcctactcaatttgaaccgtaatggtggtgctgtccaagtcttggcttgcaactctactcagagacctattccagtcccattaggccaatgaccatctacatgttaaagaagacctaatctgtagttgcaggtcagaactcctctgccatacacactcatatattcaactgctggacatttctacttttgaatattccactctcaccagtctcagtatgcctaaaactgaatccctatcactttctgccaattctgcccctccccttataatcctcttctcaatgatgcatgtggccagttggctgcccgagcctttagcttgagagtgaacacatccaaatccaatcagctgtaatttccttcaattttatatccctaatatctcttgtatccttcctatgatcttcattccattttctgtcaggccttgctttagtcagagctcatattatttgcaacagaatcccacttaaacctaactttaaaaagataagttggtgtacaataaggaaatagggcctaaaggcaggaaatatagctgggcctggcagagggttgaaatcagaaactagagagtcacttgctcagcttctgtgtgcccaaggttttttgctgttatttctgtagggtatatgcacccttcttctttctcttagagaacatcctcttctcttgcttgtatctggtcaatctctaccaccataactttggaggtacttctagttcaagcatccacaatagattggaattgtcacaattcttaattcccaaagagaaaaagatcaaagtgaacctaccctagcctgagcatttgagggcagggggcttgacaacactgtagagggatgcacagaggattttcctgccttaaatctcaacttcctcaattgagccttggttatctctgcctctaaactttctgcaacaaaatcaattatgtctcatcttgacataaatgatttaatgtgtcccacagctttcagcgaagttcaaagtccagggccctttgtggcttttgcccatctttgcactgcttcatgtccaaccactgccctacgcaagggtatataaagaagggtgtgtaaagctacaagtttcataacttctcagggcatcagtgatctggaaatcaggaattataattaggcacaaagatgagatgtataaggtataaaaaggtacatgtacctcctgctacatggaacctcctgtacttctggcaatgattaaagctaatccaagcttcagtgccttcatgtgtgccattctccctagctgaaatagctagcttaccctaaaagacttccaaacttaggtcacatgtcatctccctgaaccaaggggccaatgtaaatgttccccttctggcctcctttagcactctgagtggatatctatgaatagttatttattatattataactgcagatgtgtctatttcctccaaaagaccgtacacatactaaaaatgcccccttgcaatattccccagggagaaccagctagattttagttactactgactgttttgtttttattctgttcatatccagagtcatagcatgatgtataaggggaatgagtcactctctgatagtgtgagtcttccttaactagtctgcagacatgaccttaggaaaataaaagccacaacattcaagctttgagaagaggatctttcaaaaatgttgccaagttagtcctgacctttagaattagaattagtgacaggctataatgacatatctaatgatttataatattggataggttttcataattttatttatttatttatttttcccttcttgaggagaatggggtcttgctatgttgcccaggcaggtcttaaactcctgggctcaagctatcttcccacctctgccttcctaagtgttgggattgcaggcatgagccaccggtcccagccataaatttaatttggatttcaacactgaagatttccataaagtattcttcaagtcatatctctttctcttggttccttctttctgagggcaggtgaaaatctaagttagtcagttctgttcaaatttgtgattatgcttcctgtggctgatagaattgcaggatttcaaatgctattaagccgctccatgcagagacaaatagtctgatgacctgccattcatggcaggaagagaaatgaacagtgtttcttgctagaacttcttcatttatttcgataagatcatttcttactggacagattaaaccttagagaactacatataaggttctcctatttctatttttgaaaaaacactcagtaccagaaaatatagaaaatgtataaagtagatttaactgtgaaatttcaactttagtttccagcatagaattaacagcctcctcctggattcttccaatgatccctctgtaatgtccctaagtctctttcctcagctgcttatccaaaagtgtaatcatttatctaagactgtttgcaaggaccaaatttagtcctcaggcatgccttctttagaaagtgcagtttttacatttgttaaattacacattaaagtccacatttccagagatggcattgcctcttggagatgatgtaggtcctctcccgttccctgcattccctgctgctccacataacctggcctcatctatgcctttgaggttgtgccacctgtcctaaggaatcaacattcgattagcattctacttagaactttcaccatatatgtcctgttctgggctgggttgaaaagaaagctgacaattagagtggctctggttttaggaattgctagttgttatgtcaacagctatggacattcatagaatcttcagtttcattttttatccccaagaccttcatttcacattaaaagaattctttttgaggctgtgtgcacaaggctgctatttgccaccccttacaatccctttttatcaactaacagggagttaggtcatagctaacttaagattcagaatcagacagactatctaacaatattgctagaattaactgaaatatcatagttaatctactctaatgtgactaagtcatagaagcttattttttattattttatctggcattagacagacctggaatcaaatttcttgtttcctgaccacttgtgctaccttgagtaatttatacagacactctaagtctcaactttcttatttgtagatggcatgatacttttcagggttgtgttttttccccattcttacccatctcagtgagtgatactactatccctctagttgctcaggcctcaaatccaggattttggccaggaatctttgattctccttttatctgtactcctcatatctatttcttttgcaagtcttagcactaaagctatggttcctgaacggcctggagccacagggcacccttcacaggagaccacaggatattttaaattttcagacgaaataatgacatagatgtactactactgttaagtagtatgtaccttataaagtggaactgctaggtaatttagacctatgtgtgctatgaaaaaaattactgagacaccaagggcaccatgaagcaagaaagtatgggaacctctgctctattatttagcatgcatccttcctatatttatcttcatttcactgctgccatctgcccaagtcactgttgcctctcatcacttactgcaatagctggccttccaactggtcttcctgcatccatgctcatccttcataagccatgttccacagagcaactagaatgaactttgagaaatgtagataaggtcatagctttccttcacagtttattcttatttatttattgttaggcagggtcttgctctgtcgcccaggctggggtgcagtggtgccatctcagctgactgtaacctctgcctcccaggttcaactgattctcctgcctcagcctcctgaatagctgagattacaggcacatgcccccacgactggctaatttttgtattttttttggtagagacagggttccaccatgttggccaggctggtcttgaactcctgacctcaagtatccacccacctcagcctcccaaagtgctgggattacaggctccattacactttaaatcaacctggcttttcacatggtccacagactgtgcctgcttgtcccccatcttctccatcatcccacccccacctttatcccctggttcattaagacttaactgccccagcttttttctttcatgtttctcaaaatctccagatttgttctcaacttagaggcttttcagttgctttcccttctgctagaaagatcttcctctgtatctcattgtggctgcttccttgtcacttgcgtctgaatttaaacagcacacctcagataggccttgaccttgtttggaacagccacctttttccatcaatatcacatcaatccattttttcccgtcatgtttatcattgtctaaaattctgcttatttatttgtttattaagctccatgggtagagcccccatctgtactgttaacctttgaactgtctccagcacacagtaggcactcaaaaaatactggttgcatgagaaacgcagacaactgcttcatctatttcccttttttgtaaccagatgttgacgttgatgattgtgcttctgttgctccttttttatagtcaagtcttgctgaacttttaaaagatgaggaactaggtgtttaggggtcattttaagcattggatcatttattcatattgctttagtggtcaaaaaaagaagtgtactactattgtactgtactttatttgaagtgcctgattccccccaatccttagtaaactgattaaataactggaaaaaaatatccattttctatttcctactttactggagcaatatatagtaaaatcaaaatcaccctgtatactacttattccattaaaacaccaaactgaaagcagcatggaagaaaatgtgttgcaagagccttaaggtttattttttcaccttttctaggaaatgaataaactagattgccaagttatattgtgcaaggtctgttttcagtttggggagatgaaagaaaagaacagctacaagagtaacaaaataaaggtcttgaatgggcctcaataaaactatgatattaggataatatactattatataaaatgaattaaaattataatactattttagtaattagtataaaatcaaaacaactaaatttggatatttatttacaattttggatatttacattctgaccatttgttttgtgggagggtatttttttctttcattaggctttgcagagtccattcctaacgtactagttggcttaaatttaaaagttaaattggaatttacaagctcagttgaaattgggaatcattttccaatagtgtgtggcactttaagctggtaaacaaaatcctcttttgccttaccatatctgaaatataaaatcaatctgtcattactatcatagaacctcccaagttacaactctaagatttacagtgtattttctcccgaccccagcattcctatagcatcagctccagatgagagtagaataaaggaacacagatactcaggaggcccacgtgtctctgggtgcaggtgcaggtaggtgccagccactgctggcaggcgaatagggctgttggaaagggagtggcaacagcagaggcattggtaagggcagctagttgtggtaatgagagctctggtctcatttagtagcaggcattagtagtagtactcatttaatagcagggcatttgttttgcccttgataagggaagaaagaagtagacgatccttatagtggttctgacagcaactgttagggagggagggggcgcaagattgtttctctgtatcagtggttagtaagctgtatgtttggacatagtattatctctaatatgaatattttagttgacaattcaaatgatttctaaagtcagaaaaactgaaatgactggggcttctcagaatgaatcatacagaaattcagtatttattaacatatttattagaaggccaatttgtgaattaatttggttattaaaattatattgctcacttagtttgcatgtatataatgtgtaaaggaccagataaaaaatgttggtaagctatttattttaattgtagggtatgaatcaaattgcttgactgctttggagattgatctattaaagcacagtgaaatgagtttgcctaatttgctgattttaaggttttttcattaaacaataaatgatgttctgaagtcagaatatttatgtggcagtcacagtcttgttttaagggtattcatgtttttattttgaatttaatttttatcacagtattacatacacaaaagtcaagatactataaatcttactgtgaaaggcagttgtccctggccctccctttcccatctcaaattctgctttccagaggcaattacttgcacttcttttagatttttctttcagtattaacaactgtatttttaagtgaaaaatatgtataatttttgaaattctgcactgacttttcattatggaagatgaaatgcttcttccaacactgctcccccacaatacacacattcacattcacacattcttcctgcccctgatataattatatctcatttttggattaattaatatataccattttcattacgatgatgatggaaatattgttccccactgagcagctctgtgcactgtgattaaatttactctgatgtgtgctgtgagtcttctgtttgctcctctgcagcacttccccctcctccaccttgctgcctacaacccatgatcctggcctgctgaaatggctcatacagttataccaggatttttttctctctctcctatagtagtaagtaggtgccacattctttttcgttttttggtttttttttttttttgagacgaagtctcactctgtcacccaggctggagtgcagttgtgcaatctccacacactgcaacctctgcctcccgggttcaagcgattctcctgcctcagcctcctgagtacctgggattacaggcatgcaccaccatgcctggctaatttttgtatttttagtagagacagggtttcaccctgttggccaggctggtctcgaactcctgacctcaggtgatccgtcctcctcagcatcccaaagtgctgggattacaggcgtgagccaccacacccagcccaagtgccgcattctttaacttgctcagtgttcagtgtacccctcactaattctttctgcatacttttcagtggagctgtaaagcctcttcctttacagttaaacctaatgagaaacacccataatccatcctgtgattctgctcttcttacagaactttctcctgcagcctccagtatcctgcctgcctctcccatctggttgccccctgagggacagctgtagaaatgctctttacccctctctcttgtggctgagttctgtttcctatattacatgtcttttgctttttttttttgagatggactctcactctgtcgcccaggctggagtgcaatggctcgatctcggctcactgcaacctctgcctcccgggttcaagcgattctcctgcctcagcctcctgagtagctgggattacaggttcccaccaccacacctggctaatttttgtagttttagtagagacagggtttcaccatcttggccaggctagtctcgaactcctgacgtcgtgatccacccacctcagcctcccaaagtgctgggattatgggtgttagccactgcgcccagcctcccatgtcttctttttaggctgacttcatctttatcatgattcttactctgtactagtttcctgtgaaaagttcaatgagaagtaaacagttttgagaccatgaaactctttattcagtccccagacttgggttgtttttctccctcagaatttttaatgccataaattttcattttcttgccactccttgctgctggccttcaccatgtctgccatcctcctgtctgcaatcctggacattcattttctctggacaggacacctctgtctcctccccatgtgtggggagggcaaaggatcttggcagtggagttgggggaggcatcttgttgattgttacaaggattgtcaaccagtcctttttataatctactgtctgagatatttggtacctccaattcttaagactttccagagtctgtcatacaaatcatcctgcttcttgctggctttactttgttgtgattaggttttagttctgctgtgttaagccagtcaccacttgtctatcctctttccactgtccaaagcttccagtctgatgttctttatccttgcatacaaactttaattactttatagtcattttagtggagagtgtgaggaaataaagctgctgggtttaactgaacatctttcataagccatttaaaaatcttgagacaagaaacaggcaagtttgtaactgaaatgcttttctgaaataaaaatgttgcttattttttaaccagttacgcatttaatatccttaattttttaagattttaatgttttaactctgtgcagtagagcatctagcattttagctctattttctttattcctcatgttctaaaagaagcactcttgattccaccactcacacaaaaagtgcaatcagagcctgattggagggttggcaggctctcaaattgagtaagtacatttgcatattagaaggaacaggatttactttatagaattctctaatatgagtaagattaagatttttttcacccaatccagtaagcaacaattgggccaaagcataacttatattagtgctgtttgaagttaagatgttttgtttttttcaagagtatgggatgtgtagcgttttttgactattgaagtacaagatattattcaagtaaaacatttttcccttttcaaaataatgttgctataggaaagatttcgatgaagtaatgtaagtaacaactcttaaatatatatcaggactttaatatcggaaatgtaattcgtttcctgcaacatgaatacttcataccaagcttatagttatatagataatttaatttatactttaatgttttgggttccagtttatttgaagttaattcatttaattatttgtgttttgggtacttcatgggcatgtaccatttatcttaaatgctttccttccacaggagctcaataagtgttgatataaaaacaatcatgttgtgtatctctggcgtagtattttgaacattgtaaagcttaataaacttgtcaaattaattaaagcatatcctgtagcttttgtaaatgcctcttaaaataaaaatttctgaatatgaaataaaccagatttagccaagttactatatcattgcataaaaacttcttggttttgaaaagctgttttgacagtaacagtagcaaataaaatattttttctcgtttgatatgttattgtttaaaaaagataaattctaacctaatgtagaccacatataatgaacacgcaatttggagtattaaacattttattaattgtaatagattatgaaatcctgaactacttgtattgttacatatttagtattttatattttaaatgacatttgggggaaaaaaactcaagagtatgctttgactaatatgtttatattctttccaggaaacttcatatgactcaccaattttcagtttagtttttgatctctattctatacctagaaaattttaaattccttaagtattttggtgtcaggaatcaaaggtagaagcaaacttgcagaggttgattctcccaggttctataaaatgtacaaaatgtagtggatcatttcataaaaggaatgggtgtggactcaaaagcaccaggccatttgattatgatacatgaactgtagacatatggctgacaagaatcttatctgtttaaaatacttagtgcaaagtgtattactgttccatttatatatgatcaaactaaatgctttagttctggaggtactataaattatatgatacattgatggattgctttatcaattgtccagcttttctcaatcagatagcatcaggatatttttctctataaatgaaacctctaaaaattttcacatttaaagttagaactagctggatgcaggtggctcacgtccgttttcccaacactttgggaggccgaggcaggagaatcccttgagcccaggagttcaagaccagcctgggcaacaaagggagaccctgtctctacaaaaattaaaaagctcgcctagcatggtggctcatgcctgtaatctcagctactcaggaggctgaggtaggaggatctcttgagcctgggagatcagggcttcattgagctatgattgggccacagcacttcagcctgagtgacagactgagaccctgcctggaaaaaagaaaaataaaaaaggttagaactgtatttggtttgtaagacagtaaagatgattttattacctattgagatgatgacctggaagttgaaataccagtgggcgatacagcacatactaaagagcagcttacaatacgctgtcacatatctcatttatttacaattgatatctgtgcttgcattttgtaaatgtcagagccatataaatatgtctgagtttttaaaattataataaaagtctgggtagcattcttgaaggcacatatgataacatgccttggatctttctgaggctgtaaacctgagatttgtatgtaagatgttcttaaaaatggactaaagagatatttatcactttctaagtcttaatattagtcacccttttataagatattataattatttaaatacaaagggttatttatttatatttttctataattgaggaataattattgtgctttgagggacattttcattctctttgctttaatgttctaaacatgatttaaggttctcttcaacagatttccaataatctttgcttcagtgttatgagtacttaaccaaatataaaagcttaccaaattcgtgcccaaatgagaacatatgcttcatttttattttactatctgtcatattcatgaagatctagataggatatcctaacaattgggttaaggctatttaaaaaattaatttggataacttagacaaagaaggaaaattgtttattttatattaagctctgtattactggggaaagactggtaaatattgagtgggaatgattaattggatttgctgaaaattattttcttttaaagcatcagtatatagacagatatagaggaaaataccaaatgaaaataaagtggcagtgatctcaaaatgggtgagaagtgatgtagagggctagcattactagtagtggctcttttagtagtaaaaactaaaataattgacatgaaaaagatttagccattaaaaaatatagtttctgaaccatagcttcctagcttttaagtatttctttacttaaaggaaaaaaagttaattatttgatatatttttaaagtatgcaggtggaagatgttaatatattattgttatatatgcacaactgaataactgaagtcattgagaagtgttactatgactaccttttttggtaaataatgattttagtggtgaaagataaatggcagaaattgaaagatttaattaaaatacatttagttcatcttactactttctaactagttttaggtagatattaaaaatgtgaataataaggccaggcctgatggctcacacctgtaatcccaacactttgggaggtagaggcaggaggatccctgagcctaggagtttgagactagcctgacgatatggtgaaaccccgtctctacagaaaaaaagtacaaaattagccgggcatgatggtgtaccccatagtcccagctactcaggaagctgaggtgggagcatagatttagctcaggagatcgagtgagcgatccatgatcatgcctttgcactctagcctgggtggcagagtgagactcttcctcaaaaaaaaaaaaaaaaaaaaaaattatctgtatgtataggacacttaacctatttattcatctggtatgttttatgtcatgctccctaatgtgtatgatgatataaataaatgttgaagaaaaattttaaacggatagtctttggcagattttttacaatgtattacatagacaaagaaacttattcttcatacttcttttattttggcggggtggggggtctttttctcaagttagctttctgtcatgcaaaacacaaaaggtcaagcctattgcattttacattgccaaacttttttctctagtattttcaccaaatactgcctctgttttaaataagctagtcttatcactgtcctcaaaaattgaaagaaaaaaaatgaagaataattgaaaacagtgattcaagcaaatacttctatactaacgatacaatgatcctaataattgcagaattatttatagtagataaatagtagatacttagtatctatgttgtgtcagaaaaaggtgaagtctattttagataagctagtcttatcactgtcctcaaaaattgaaagaaaaaaaatgaaggaagaagaattgaaaacagtgattgaagcaaatacttctatactaatgatacaatgatcctaataattgcagaatcatttacagcagataaatagtagatacttagtatctatgttgtgtcagaaaaaggtgaagtcctcctagcttgctaaatgactaattcagcttcccacatatcttcctgacattaaaaaaagacaacaacctgtgtatctcttcagcttaaatttagtaaaggtattcattttagctagcaactttagtcattttgttttcaagactgttttgggctttctggaaggccaaaagtataggatattttataaaaacatcattcatattttaagagtgtacattattaacattcaaaagataaatgaaagaaaattattttaacataacattttttattttatttcgttttaactgtttatcttgataagctgtattcaatacaagtaattttggagttttaagtataaaagccttcaagaaacatagaactattattttagtgaaaagaatgaaaatcagtagcatgtttgttttaattcttttttccatatttgtataatattcatatgcttcatagttttataaacatatgcagatgtgcatattttaccacataatgtgctccgagggaggcagaataggtgttgaggtgcgatgaggtttggtaagcttttgttactagtcagttctccattttggctttcttttctgaaaaattttttatcgtgttaaaatatatgtgtgtgtgtgtgtgtgtgtgtgtgtgcgcgtgcgcatatatatatatatatatacatataatcacataacatttgtgattttaccattcttgagcgtacaattcagtgtcattcagtatatttacaatgttgtgcaatcatcaccactctccatttctggaactttttcattgccccaaacagaaactctgtacacattaaacaatatctccccatttcccctttacctagcctttggtgacttgtagtctgttttctgatttatgaatttgcctattctagatactttatgtaagtggaatcatacaatatttgtcctttttgtctggtttatttgagttagcataatatttacaaggatcatccttattgtagcatgtatcagaactttgttccttttcataggtgaatagtattacattgcatggattaccacattttgtttattcattcatttgttggacacttgtgttgtttccacttttatttactgtaaataattctgcaatgatcattaggatacaagtatttgcttgaatcactgttttcaattcttcttccttcatttttttcttccaatttttgaggacagtgataagactagcttatctaaaatagacttcacctttttctgacacaacatagatactaagtatctgctatttatctactgtaaataattctgcaattattaggatcattgtatcattagtatagaagtatttgcttgaatcactgttttcaattattcttcattttttctttcaatttttgaggacagtgataagactagcttatttaaaatagaggcagtatttggtgaaaatactagagaaaaaagtttggcaatgtaaaatgcaataggcttgaccctttgtgttttgcaagacaagcttttgcaagttttgcaaagttttgcaagctagttttgtaagactagcttatctaaaatagaggcagtatttagtgaaaatactagagaaaaaagtttggcaatgtaaaatgcaataggcttgaccctttgtgttttgcaagacagaaagctaacttaaggaaaaacccccatacacacacaaaaagtcattgtattgtataagtaaaaagtctaggaatatcttgattccccagggcttaaatgatgtcatcaggactttgtttctccccaacctcttttcccatttttcagctgtttatccttcatgtcacttcagaaagaaccccttaaaaagatagataatagttagaggacagagtcttagttcttaaactggtgccttattgatctgacttgggacacagaccaacatgaaatactaatctcttttttgttttaggcagatgtggatctcctgattggttaggcttgggccatatgctcaccctaggagacaaggtgcagggtgggggttatcttctggaaccacagggacaagagtagaaaacaatagatgttacatcagaaaagattatattggacaatgaaaaattctcctgtcaaaatcaatggaataaaaagattctctttagtatggttttctgagattctttgtgcgtttcattttttcagtggatacagagaataatggttttttgggtttttttaagtgtttgtacacctctagcagtgtaggctctacgaacactaagacatacataatataaatcgcataaatttgaaacatttgagaaatgtctgtcaccctacaaatgtaggtacatcacataagcactagagctgaaactaattgttaatgtaccttgcataccttgatgcttctgggttgatcttttaatttattagcacttttgttggatttatatgcaatatttatttccatatttacattaagtgggtttaccatactgaaaagttgatttcaacattaggttgactattattcaaattagtcatgttggcacattacattctaaactataatgtagtaatttaattttcctttgccctagaaatgtttaaaatacacatccaagtattactggcatatctgatatactcagttagggttacttgaacttaagttttcgcttaaatgctgcctcatggctaaatcagaattgtgagttgccaacttaaaatagaacataaaaatatggtatgacttataccttgcactgacaccttttggaggacgttttgttcttcaccaatcatggactgtctaaacagtgatatctatggcttgaaaacagtttactcacatacaggcagttagaggtgctggacgctcccatgacgtttccatttaagcatggccgggccaccctgctatcctcttaaacacactgaaggtacctgaacagggtaaaatgtgacagccagggcaggagagagctccctttctttgtcactggattctttgaattaaggggaactgactgctttagaaagactcgccaacctagtattggtaactgaagatcatcattttctagcaacagaaggaagaccatgcatgcgcttcaaagccaacaaatctcccaaagcaaacaccagggatcatgcacacaatgtaattcttaccctcagaaattgcccccttgcagctctatatagataatcctagtgctagataacgcaattagaaaccctatgtataaaaccataatcaatcaattatattttcaattttgtttgtacattttagaattacccccagtattctcttgggcttgtggttttctgtatttgaactactctttgtctgtttgccaaattttttacacacagcgctgatgtgcatagtgctgaagttgtggaggtctgcttattagttacactgtctaatgagggcaggaatggggttcctttgatgatgtgtcgctagcttttggcataggtcctggcatttagcaggcattctgtggctagctaaggtctagtcaggtgtgtgtgggtatgtgcatgcatcggaatgctatgcacagatggacgtatttaatcctcacaatacctttatgtggttgatatgatttctctgctggttttatagatacagaagctggaacttggtaaagtgcagtattttgcctgagatcttagagctagtgattgatataattgggattcagcatcggacttcaccccagatcttgtaactactccgctacagagtctctataaatgttcactgaccagatgctttgctacatgaaggaaagaaccaggatatgctctactatactattcggtttccatctttgcacccagttctgatcaggatagagagtgaaaagtacaatggtacctctgctgcagttctctctgccaccagccaacccttcagtctgaatttgctctgttccatattataagccaataattaacctgagtaactcagttttttccagcatttggttgggcatctacgttgttcagaacaatgtgctaggttttcttggagataattaatatttggaaattcgcagtctcttattacatacacacatatatttagggtatggctgattctgtaagtatagaaaaaaggttaaaaaatacatgcacacatacacatatacatacatactctgaatattggaaaagcttaattttaattgtggtggggtggaagcatcttagaatgtgtcttgaatgatgaggcatgtaagaaggtaaattcccttggtgagcacaggccaggcaggattacttctacccaggatgtttgctaataatttacagctggactcctaagtaacagagctgattaaaatattactcagagataataagtgtatcaaggtgtgccaagagttgtttacaaaaaaaaatcatttaagaatttactataatagctttggggaatgtgaaagaatgcggaggtaagcactgtcagcctattcctagctacctaatcatccagtcacaaaatatctggacttggatgaggaattatctttaaataaataaaatcttattaaaacaatgataaccttctttaatatacaactattagaaaagatgaaattataggtattttatgaatgttataaaatattgtcagtaccccttggggtgggtttggggggtgtttccatccaagccctttgaaccttttatacactggtctaaaacatcattatattaactatacagtattctcagaacatgtttactataactatacctcaaaacccatgggatgacagattttttaaattactatgttagatattatagagaaatcttaaatgtatgagtaaccttttctgaaaaacaaaagtgggatgaaatatattggtaaaagtatccacttatcttgattattttcattttacaacatacctctgtgtacctttgtgttttattttgcaatctataaagaacttgtccataatcacacagttatcttttcaatattgagatactgtgttttttaaaaatcagtagaggtattttacttaagcattggccaagaagaatgtttaccacatatacagtttatattctttcatgctacaatatttataatcggccgagcacagtggctcacaccaggaatcccagcattttgggagaccgaggcccaggagttcaagtgtatacatatatgtatgcaggtgtggtggcacacaagcgtgtagtcccagtgacttgggagactgaggtgggaggatcacttgagcccagtagacggaggtggcagggagctatgattgaaccactgcactccatccagcctggacaacagagcaagaccttgtctcttaaaaaaaaaatgtatagatatatgtatacacacacgtgtgtgtgtgtgtgtgtgcgcgtgtataacctgaaatgatctagaaactggaaacttcaagtctggttataacaaaaaggtttttaaccctttttttttttttttgagacagagtctcactctgtcaccaggctggagtgcagtggcatgatctcctgcctcagcctcccaagtagctggaactataggcgtgcgccaccacgcccagctaattttgtatttaaccctttcttaaactgtgaatacatgtgcactcaccatcctattttgtatacatagaaagcatggtaaaaatattgaatatttcttttacacaagtgatttgctgtatgttgagcagctctctgggaggtcagattatttacccacaggaagtggattgagtaggaataagtttacttcacagatatactaactactctttttcaccctataacatgttttgttttcttctcaacctatcaagcagatcttttcatgcttttccatggaagagccagtaatggtagtgaagaatcacaaatttccctggatctcttgcctgaagcagttcttcataaagactcttgtttcgtaccgaaaaaaaaaaaaaaaggaaacttctgttctgttatacattcatgcttattttagttcaccaccccccaaaaaaaatttagttacatcaaagctccagtaagatgtgccatattaactcttggggtttatacttgctaggaaaaggttgtaaccctctgggtgtgaataccaacaattacagactgtgtgaacatccctatgccctggatatgtggatgtcataatttgggaagaatgccttataaggttggtcagtattatctagatgtacaaggatagcaaccatgtttcttaatcctaatgactttgcacatagtaggtactcagtgagtgtttaaattaattgtttgtatgcacatttcctcattgtcaatcaagttttgttttgtttcatttttgttaattaccttttttttaaatctttggaataattgagaaacgggaagctgagattagggaagaaggaaaataataaactgaataatagaaataaactgagtaacagagaataagaagagaaaaggagaagaggaagaggttatattcatgagggttgttcagagaaacagaaccaataagattgacatgtgggaaatggctcacacaattatagagactgagaagtcccactgtctgccatctgaaagcaggaaacccaggagtcagcagtgtaattcactgagtccgaaaacctgcaaacaaggccacggatgtaaatcccagtcccagggcaggaggagataagatgttcagctccagcaatgaggcaggaaaaaaagaggggcaaaattttgcttcattcaccttttgttctgttaaggccctcagtgtattgatgatgcccaccatggagggcaatcaaccttactgagcccacaaattcagatgctaacttcacccagaaacaccctgacagacacacacagaaacaatgtttaatatgggtacactttgtcccatccaagtcagcacatcacactgaactacctacagagactcctttgcttttcagccacactggcttttgtcttggttctaaataccctctttcctaccgcatgcttttgcacatgccatttcttctgaataaatgttgttcctttccctgtttcctgagctaacttgtaagaacactatttcatcatctcttcctcagggaagactcttctgaacaccccattagttcatgtgctcaaagctccaaatgcttctctgcagtccttatcaaatttgaattttagatttgtttgcacatatttgattgatgggtgtctcctgcctttggagaaaagggaccgtgtttggttttgctgccagcatagtgaatgatatatagcaggtgttcaataaatttgtcaattgaatttgtgacttgtttaataggggctggtataattacaggagagcattctcatagtctcaggagatcacctaaggtagagaaggactgaagctctgttttccccaccgtatatgtttgggaagatggtgaaattgttagtacctgtgcacacccagtgagaagaacaaattgtcttatgtttatactttatttaaatgataatccttccacaagacaatgactaccgacttggaaggcaagagatactaagtttactaattacttaaacacaaggacttctaaattttgtagaagtcaggttattactgtgcttttgataaatgtttttaatatataatgatgttgcgagccaaagcctactcagctgcctggtgagctatacaactctgtgttcccagggaatatttatcaaaaatgagattaattttaaaagtgtttttctcgtaacacgaaaaagaaaataattaaccttcactgtttatattatttaccttagaatgccagtgtatgtggtattgggatacatgtctatataattaaactagcagctaaggcttccatattcagaattaaggttttagcagtagaaggaaattagttttgactcttcacttttactttccttagcagtgaacagggagatctacatgttttttatgtttttaaagggaagcaatactggttttaatttctcagaaaatttcctcctgacaactgagagcaaaggaaaaattcaatacattttagcacctgattatgttcagtctttttctaattatgtcctgttctgcttggagtgtatctgtgacatcatggaacttaaaaaccatactgtaatttaaacatctaaaattattaataatattgcccctttataatcaccttagcaatttgggaacattctgaagatgctggttattaaaatttttaatctgcttttcaactcctaaggctagttcttttgaatattctcaatggtggcagatatttgtcctattagaatgattaaattcttggaaataggagtaaaaggcatttggaggtattctttgtcttttgaataaatgtaagtggtcgagccttcttgatttctttaagttttttgtagaaattatgctgtaaatcagagatttgtcgtgatgatgtcaggcattgagctctttatgtgacataaagactccttagtttccaaatttttttatgatgcctatgattaatgtttggacttgtgaaatttggcactactcagttatttttaaatcagcgatggcctcagtcatcactttgatgaaccagcttggtcttgatatttttaaccctaaacttttgtgctttctttctatgttaactaaaaaaaaaaatcctgtgtcatcactggctatttttaagtttccagtgaacaatgacaataaatgtcaagtcttttactcattgaaaatcgatgggctaatttttcaaaacaagattcctttccaaagggttctatatacttctaactcctcagccatgaattgtcttgtgactgaatcagatatctgatcttgccccataaggattttacctcctgctgagggtgtttctatggctgttttatgcaccatcattattgtctacccagttaaaccgtgctcttgacattgcttcgtttaatcttttcctgccactgttaactcacttgtcaatatgattaacattactgaaaatttgatattagctatgtaattatgaaaatttgatattagcaatgtaattacagtgttacaatgtaatgtatttaatatatatcttcttctaaatgcttattttcataaattttgttttataatatcatcctagaaatcttgtcccactgacttttctccttactattaggttgctatatgcacttttaattcttttaactgctgcattttatccatatgctttggtcatttctctgttggttttcctgaccttttcttgataaattgaaaatgtgtcttatgtattatatttataaatcttttgtagtcttttgttcctgaaactaagtctataacctgttaactttgtgatgacctttgttgatgtagtcaacaattttcccattataattcgtgcattttagatctttaataaattctgcttttcactgaagtcgtaaagatacttttgtacatttccttctattagtttatagttttatcttatatattcaggtattaaatttttccgatgtttttctgacttaggtagagaatcaagttctacacagcgagtccgtttttccatcactccttaataaatagtctatcattttccactggtttgatataccaaatgtatcatatcatgagtatgtatatatattaggttggtgcaaaagtaattgcagtttttgccattacttttagtggcaaaaaccacagttacctttgcaccaacctaatatatgggtttgattataacttgtagctttattcttctgcaccctttaacaggttaggcttttaattttctctccagtactctgagttccctctccttgtgtatgatacaatccggaaatttgctatggcacttgcagagctcacctcatttttacgttctttcagagttctctgtccttattgtccaaagtctgaaaacctttgtctcatgttttactgggttttctgattgtttaaggtaagagggtaaatttcatacctgttattccaccactgttgtaagcagacattcattttttaatttctcagtagaatccttagcttgcttattttcattctttcattagacgtgaaaaaatctatttaaatctctatatcatgccctactgcttttagatgcagctcacacagcctcggacatgcagaactctcactgtcattcagctcttcagtgttttgtcatttttcttgctagttcttgcttgttccactttatttagctgtgagttcatttaactatttttttcctgacatgcttttagattcctttttattactaatttaaaattgtattgaattttacttagaggttgcataggttgattctttggagacttttttgagacgtcctttgtggtctaatacataaaatattcatatattcttgaaaggaatgagtaagatttattggataaagtttttactgtatatacatatattttagattgttactggtgtcattcacattcttttcatattggcttagttttttctacttgatacgtttctaaaagatgtattacaatttctaatgaaagattatatgtttctccccacatttctgtcagttagtagttacatatcacatgtatgtatacttactagtattatatcttattaatatattattcttatgaacaaattatgtatcttttctcctgaaattgcttactgtactatttaaattgctacttaatatttcatttggttaatacttatgtattttttgtccatctcttccatcaacctttctttgtcttttgtggacaatttaatgctagattttttttttttgtaaatcaaatctaaatcagtcttttgatgactaaatttgaaaaatatatgcttattgtatttattattgtatggaggcttatttctcccatcttattttagtttttattcatcgtactttattgtttattttttcgatcttttctatgttctgtcatgttgacaactcagattttaaactttttgtttttaagttacaaggtctattgttctcttatctctaacttaagattcattgcatttgtttttttcttccaatgtgtaaaagttaatctgtcttcccctgcaataagaaacctcagtagtctttcaactcactcctctactatgatctctttttctttcatgttggcatcatctggagttttcattctatatgttttttgcttactcaggtaacaataaatttactaaggtatttactctccattggttaccttatctcttggctttctctggaatgcacttctcttcttgttggaacacatctttcaagatatctttcaaagaggactcatcattatgtgatatactttataagacaaagaagccactagtacttcttcctacgccataaatctgtggtcacatataaaactattctgtttctttactcatttgttcaacggctatgttgtatgtaggccacgtacttgtcctagacctgagaaaagaaagtcaacaaaaatctttgcctactaacgtttacacaagacacagcagggaggggcagaggatactcgaggccagatcagcagttcctggcaatggccccacactatggcagggctccagagctgccaggatattgccatgtagtttctggatggcactgaacaggttctgctgctttctcattataataactgggcaagtgatatttttactaggcaactcagagaaaaacaggccaactagagagctcttcccaatccatccctaatctgtggctactgaatcttcctcgattataacttttctatccatattaggatattaggataacttcttcctgcttccccaaggtttcttggctgtagttgtagtgtttgttttatttgctaagtttggttctgaaaactgccaagatcccatattgtttgtagtatctctgggatttggctgggaaagtaatccgactacccatggtagttttccttcttgtccagaattgatagtcctcacagaatatattattattattatttactattattatgggatgtgaatgccaatggcagtcaatgctgagagagttttcacagatgattatcaagcacatccttaattttaaagagaacatctaggaagctcaattatatatgtggtctgttagcctataaatgatcagaacctttggaaaattatatctattgaattcctaggaaggttgatcattgtggggaaaaaggaactgagtggaggagctgaggatcagggtggtcctgggccatttctacctggttccaaatctggttcagcacctacttccagccctcatgggagtcagaagagactgctgtgtggtaagtgtcagaatcagccctgaatttctgaagaagcaagctcagggagctctcataatgattactacataaacaaaccatactgtccatctgaaagcatcctggcaatgtgtcttgctcaccttctttgattctaattcctttcctaccctgtctgttctctcctaatttttagacatacccccaccgtctttggctcattgaatttccagctaaaggaacctaattttatatttcctattagtttggtggtcagtaatttctttgatactcagaaacttctcagagcctatgtctgggaagggcaccaacactgcaaaagatagtggaaacagactttgtcctgatgcattcagaaaaataaggggaaaaatgtgaatttggggtactgtacttacattgaaagcaatgtcagttgcaggctgaaacaaaagccaaggaagggtaaagcctgtattaaatccccttttatgattccccgacactttttttcttttgttctctaacttgtattaaatctgtttatcatagagatagacaacaggatgagattacagtatcctaaaacaacaaaataagatacatgactgtgacaaaaacaatcgttacatttagtgaccaaacaacaaaatagttgaacttaaaatagtcttaagtgaaaaagacattggtggtattccaaagccagctcacttaagcaaagcgtgggtattaatttttaaaaactcattttttttaagataaatatagtcgtgttcttgccaaggccaacattttcatgttcactctgttaaatgctgtgtctagcaggaacacatattagagtgcaaagtaacttaagctcttgagagattgatgagataacatttctgacctaatttttgtttgtttgttttgttttgagaggaagtttcactcttgttgcccaggctagaatgcagtggcacgatcttggctcactgcaacctacacctcccaggttccagcgattctcttgcctcagcctcctgaatagctgggattacaagcacctgccactacacctggctaatttttggtatttttagtagagacggggtttcaccatattggtcaggctggtcttgaactcctgacttcgtggtccacctgcctcaccctcccaaagtgctgggatcacaggcatgagctaccacacctggcctacatttctgactaaaatttaaaattttagccatgttatcctccctttgcctaaccaattaattaaaccacacatatagtcatacatagcccctctggttgtagtagggaatgcttttcctatcagaaagtcttagtgaatcataacttcttgaaattagaacctgagtcctgcagctgtccactttttctgtgggttcccaaggctgttgatttcctctgccataacagatggaatgcaagagaacagaagagaatatccatctaacaggaggcaagcccattagtattccaaatgtattcatatattaaagccaggcaatggttacatctgaaaaaaattccttagacttatcaaagcttcacctataacacataggcagcttgacaatggttatatcctcaaaaaaaaccttgacttttctccaagtattaactttaccacataggtggttagagcatcaatgcatagtttatcatctgtaagtatagaagaaaagaccttttgcttcagagaaatggttaagttataaagatacagatatatttattaaaatacagccattattaaagatggacatgcatgtcataataaatagtagcactttctagggttgctagggtgtttgtgcttcatttgattattcaagatggaaatgtgtttgtacatgacacagtagatagtcctgcacgaggaagcaggggacagggttctagttcttcttctaagggctgttgagagagtcaaataacactaatgtatctaaggacccttcttaaaaaggtaaaaattgtagtacttttttaaaaaagatatctatgatttatttattactttcacctgggaacacggaactaggagttgaatgggaacatttatggattacctgtgtatccagggaggcacactctatgttatttactctcttaaaaaaaaaaaaaaacaaactgtaagaagagtaatgaaaagaaaacggataactcattgagttcccacactgcaaattacctactgtttctcgtttaattctcagtaaaatcctatatgtctcactagcaccatttaaacaacttagattaaataaattattctgtgcagaacacttagtgggggctgaaattaaaaatcagatccccttgactaccatgacttcacagcttaggctgtttcacattcaccttatttcagaatcttcatttctacataaagacttgcatttattcataaagccaacattgtgttttgataactctggacatgtttataacaggtctgtatgtatttaatgagtgttctgaaatactatggcaataaattaaagatgaacatattcttctgaaatattcatggtaggcaaaacaaagagcaccaaatccagaaaaattgaatggcgatttttttttccaccttattgacaaatgcaagctgttcatattttgttatttggtgaatttgctagtcccattgtaaatgtcatcctcctcaccctgtaaaactgattcagagaagaaagcctatttaagatagaatttagaaataagaaatgacttataaaagaattatatgattaggaagtattgtacatttagacctcacaacagtgtataatagaaaaattgtagtgtaattatttaatttttatttggaaattgaatgcaaaatattcattttttcaactgttattaatctctatcctggaggtttccaaacatgaaaaatacatatatgtcactgtattccttgtgagcacaacttgcctctgctcccatgaaattatacccttttaaatataatcaagtaaaaaaaaactctttctttatgcttattaattttttaaatcctgatatagcccatctctgatatgtctgtattcttcacgtatcaataactgttcaggccatattaccagctaagtgcccgttctgaattgccccatagagttgccttccatcttcctcatgcttttcatacaaggtctgttttcctggtcctcccaaataccaaaccctgctttttaccttacctctatgctcaagacctgacagtaattgtggtgtaaggaagagtgtgggtctggatataagggtgagagtgaaaacccagcttaccaccatcaaactcttaacaccaggatcctggtacttttgcatccctagtttcttccttatgactttcatctcacctctgcccctcctcatcctcctcagccacatcctggctttcttcccctcccctccccgccttgcctttcttctcctttctctccttctctactaacacaatctattgcttcagctccaggtatttctttttcctcgggttctgaggaacaaaatgcagccacacagtttcctctgtactcataacaccagagcaagctcctaactctgtagttgtctggggggttttattattaaaaacattaggaaataatggaataattaacaggaagaaaacagtctctgtactcataaccccagagcaagctcctaactctttgtagttgtttggggggttttattattaaaaacattaggaaataatggaataattaacaggaagataatagtctcatttcaaggattaaagttgttacctgagatggctctttgtgtatccagagatacaccattagactctacatcactatcatgcagctttttctgtctcctcattgtcagaataaattaagagaaaaagtgaaatctaggaagaaaggggcccgctctctccgatcctggtaatagataagtctatgtggttcttctggccagggaattgtggttcatgaattttgcatccctgagaagttcctatgtggctcccaccatagctgcaatagactgaaacttttggaggcgtagttgtaaaggtggaaagtgccgggaaaaagaatgggtgggttgggagcattgattctaaggctccattctctttccagtacccaggggaggcaagaacgctcagaatgaagcagagaaagtggagaatcaggcaggttcattccagtggcgtgtaagataatttaatccaagacatgtgtccaatccacatactttccagacatttacagcttcctgtttcacaggtcagagggctttctgcaggaggatggttggtgagatgcacctcattctatttccaaagtaatgggtaggtgaattgtaatctatgggtagaggaattgtaatcttaacactcaaaattagatcatcgtttaacatacttttccattaaaacatcactctacattatgggcagattctatattagtagtatatatcaggtacattatggttttgatagagttttgtaggaatcctagggcactgaggtccatttttctgtagaaaactcttcttgagtgctacacaaaaagatttttggagtcttataaattatggattggcttgtaaactcaaaaaatattttctctttcttcattgagaaaattaggaaaatcagcatgaacaatttaaatttgctcactacatctatgaataatacatatatgttctctttcatcattttgcatgtgggtggattatcatggaagtgaaaatatttgaaagactaaatacaaatctctacttgtaagagctaataagtggctttcttatttagaagatttgtgtgttattttgaaatacaaagaaaattacaaaggattactaaaatgtagtaactacaactaattaagcatgaatatgatagcatgtaaatacagtcaaacttctacttatataaattgatttatgggttaatttgcattgtatcttctaataaataactcactatatacactggaaaaaatctaagagacaaaaattggagcaactgatttttctatttataaaaagaatcaaataaaaatatattttgcttcctaatggaccttgcaaaacaaagtttttttactttatcttccctcataattgttttgcctgttttcatacttcaagggatattgggcaaaaatgttactgtcaccatctccactttatcaacgttcaatttaaaataatcgtagaagacctatgaatcccccacatttaagtagctctcactttaataagaattttagtaattgatttaatatttacatggcctgaataatgcaactgagattttctgcctccaccccatcctcatccttttggttgcctggaaacatacaaccaagtatagacccagcaggacagaaaactaggtttaactttcacagaaactgatgaaataaaatggtttctttcaagttaaaactgtttctttcaagttgaaactgtttttttcaagtttcatatttcagtggacaagtgtgttaaatgctgtaactttcccctggataacactggggaaagttatctagtgactttcatatctattgtgtgtaggtatgcatgtgtacatataaatgtgcatatcaaggcaatccccataaacagcaggaggactgacaatgactgacttctgatgaaatttagtttacaagcttgtctagttattcacacagtgatttggtaataattcaggtagtaatttgcccatagcctcaatttctttcctaataaatgatagttggaattactgacttcaagaattgaaaattgggattattaaacctataggaagctgtgctaagatgaactcagttgaaaacaaagttcaaagttctgtatctgcaagaattagattttgtccaacataggtgaattttattacaaacaagtttgtctatcgtgataaagttgtcatgtttttagcatttatggtgttttacagattatgagagtcctcttaatcagctgttatatttcaatagggaaacaaaattaggaatatactttttataccaaatatagtgtaacctgacagaaatttttagtcacagctaaagaggtgttaaaattttcaaaggacatctcatctgtgagagacagtagaataagttatccatagaagtgtagtttttttttttttctgggcattttaataaaggcctagtaccttttgaaggcctgtttcaatttgtggcagacttttttctttaggttaaaaagatatacatgattgcttcctgagatttctctagctgtgtgattctgtagcatgttttaaaatattaatgtttatagacataagatgtcttaaaggatagcatcctatattaaaatcagcagcatttgcaagactaataatgaggaaaattcactcatacacatttactgtactttgattcaaaatgccttatttacttaaaggtagtattcttagaccatatttgtaaatgagaaagagaaaaatgccacaaaatgaagcaactcttctagaaacttaattaaaatcatgatgatacattcagcctggagtttagttttattttcagctagtcatctgcagccatgcttcccacagaggaaggttgccaggcccacagcgcactgtgcagcttggatgagcagtattacaggctgtttatgagcagattacatctgggatctgtggagagcagccagagcagcaagacagagatgatgaatgcagggtgtgttctaggtagattttctagccaccaaaatgctcatcacttttctttagtacagtgttcagagtattataaaaacaaagcatttttcttagttgttcacagtaggaccagcaagttactctggtttttaaattctgattttaaaattgttcatatgaacagaagtctcattctgtgggcatatttgtgcattcttcaagttaatttggtggcttgtcactaaagcagtaaactagttttagctctagcaactgaagcagccattctacagttgagattgggatagtttgcctgcacgtctgtatcaaaaagtggcatgccttatgtgtgtgtgcatgtaccatgttcaagggagcagctacacaatgacgaggcaatgcagaagacctgttcatccaggggcagggcacatttccatcttgggatataggtattcattcaacaaatatgcactaaagaagtagcatgcacttagaagtccagatattaaaataaatagaacattttctagttcccctgtggcttgtagtctagtttacttggttgcagcaaagcagggcatataaggacaggctggaacctgaaatgagctctgtcttccatgagaagaaggcacgtgataggacattaaactcatctgcaacatctgtgtggatatccagtccagtaaacaagagctttctccatggaaggtggcaagtggcagttggcatatgaaagagagagtgtcctaagttaaggtcttgaagtataccataagaaaggcaatatgcagaaaacagttaacatggcaggcctgggactactgtccttagaaagacctgctcacaaggtttgcttttgcctggagtttgagaactgaataatcaacagtttcctacactgatataaaacttttcctaaatggcaagagtggttcactgtgtctaaactacaatgtggtttctgctgaacatctgccttccatttggctacatgctgggcagaaggtgcttctacgactagcccccagtaaaaaccctgggcactgaatctttaatgaacttccctggtaaacaacatttcttgccacaaattattgctaaagaaagaagtgcatcctgtgtaacccaatggtagaaacccttggaagcttgggcttggcttcctcaacttcaccacctgaacctgtgacctttgctctgtgttcttttcctgtgtataatcagtaagactgagggtggtcttgggcacctccgacacagacagaatctagattgcaagctgttaggtagctgcaggaaatctgataaatagcagtatcctgtctgttgttctttagtccaaatatgagactccaagggatatcagtccagtttgataggctgcttcatcacgtccccagtaaatataagaggccactcaatcttccttcttttcctacccattagttttgagtgatagaaaacttaagctaaatgggaattatttgattctcataactgaacaatctaggaatagagcttgcttcagttggatgcacagctcaaatgatgtctccatttctggggcctgctgcttctttgctggttatatatatccttgttatcagaagatgcctgtagaagccctaggctcacattttccctccaagagggaaaagccagagttgaaaactagaactcatgagtttggtttttgccacgtacctacctctgtaccacatacggagggaccccagaatcttgtcatgagcttccctcactcttcccaaaaacacagggcctagaatggcatttttcagaagttgagtaaagagatactggggggccagaatcacagcagatgtttactactcccattacccctatcaagtaagaatcactagtttacctgataaattttatgaatatgtcttcaatgtttgtacaccttttggaaaaatgcttcctgaaatagctaatctgtcagatatagcattttgattaaagtaccccatacatagattagtgcccatttctgaaatcctctttttgtattccagtgaagtcctgtatctaaattcataggatagatgtaatattcaggttcataatgctattcagattttctgtatgattaggcctatgcctatcagaccaatttagatttcagccttgttttcctatctagactcactaattggactcattattacgatgttcctatggccttttaattctgagtcatactcatattactcatctcctgagcacagtaatttaactttccatcaccttgaagaaaggagattagctttttatgaacaaacatttcctggaacgtagtcaacagtttgtgtgcaactcaacagggaataagatgcaactcaataaggaataaggtaatgacttcttaagagaatttatttcctggttgcttatttctttgagtttgaatgtgagactgctatgccactcacctcattcatagtagataactaaaactatataaactatgtaaatataaaattatttaaatcccattatatctttttttaatcttagtgtctaaaggtaaatgaaggtgacgcatttgggatattttagttataaggcagtgcaaaaagaaaaagttagcctttaccactgaaatgttcaaactactttagacacatctttttctagatttcacttttgtgaggacaagataatttcttctcatttgtgattttatttttagtacacctggtagtgcttaaaaacatgagatcttccatggtgtatatcagagatatgccactgtttaatttattacaagaagtatgaactgagtattgaaataacattgcacactgatagggagagaagacacatttcaagtttaaaaatagttctcttcatgtgtatgtacatatcttttcactcttcttttttttaatttttattttattattattatactttaatttttagggtacatttgcacaatgtgcaggttagttacatatgtatacatgtgccatgctggtgtgctgcacccattaattcgtcatttagcattaggtatatctcctaatgctatccctccccccaccccaccccacaacagtccccagagtgtgatgttctcattcctgtgtccatgtgttctcattgttcaattcccacctatgagtgagaacatgcggtgtttggttttttgtccttgcgatactttgctgagaatgatggtttccaatttcatccatgtccctacaaaggacatgaactcatccttttttctggctgcatagtattccatggtgtatatgtgccacattttcttaatccagtctatcattgatggacattttggttggttccaagtctttgctattgggaataatgccgcaataaacatacgtgtgcatgtgtctttatagcagcatgatttatagtcctttgggtatatacccagtaatgggatggctgggtcaaatggtatttctagttctagatccctgaggaatcgccacactgacttccacaatggttgaactagtttacagtcccaccaacagtgtcaaagtgttcctatttctccacatcctctccagcacctgttgtttcctgactttttaatgattgccattctaactggtgtgagatggtatctcattgtggttttgatttgcatttctctgatggccagtgatgatgagcattttttcatgtgttttttggctgcataaatgtcttcttttgagaagtgtctgttcatgtcctttgcccactttttgatggggttgtttgtttttttcttgtaaatttgtttgagttcattgtagattctggatattagccctttgtcagatgagtaggttgcgaaaattttctcccatgttgtaggttgtctgttcactctgatggtagtttcttttgctgtgcagaagctctttagtttaattagatcccatttgtcaattttggcttttgttgccattacttttggtgttttagacatgaggtccttgcccatgcctatgtcctgaatggtattgcctaggttttcttctagggtttttatggtttcaggtctaacgtttaagtctttaatccatcttgaattaatttctttgtataaggtgtaaggaagggatccagtttcagctttctacatatggctagccagttttccccacaccatttattaaatagggaatcctttccccattgcttgtttttctcaggtttgtcaaagatcagatggttgtagatatgcagtgttatttctgagggctctgttcagttccattgatctatatctctgttttggtaccggtaccatgctgttttggttactgttgccttgtggtatagtttgaagtcaggtagcgtgatgcctccagctttgttcttttggcttaggattgacttggcgatgcgggatcttttttggttgcatatgaactttaaagtagttttttccaattctgtgaagaaagtcattggtagcctgatggggatggcattgaatctataaattaccttgggcagtatggccattttcacaatattgattcttcctacccatgagcatggaatgttcttccatttgtttgtatcctcttttatttcattgagcagtggtttgtggttctccttgaagaggtccttcacgtcccttgtaagttggattcctaggtattttattctctttgaagcaattgtgaataggagttcactcatgatttggctctctgtttgtctgttattggtgtataagaatgcttgtgatttttgcacattgattttgtatcctgagactttgctgaagttgcttatcagcttaaggagattttgggctgagacgatggggttttctagatatacgatcatgtcatctgcaaacagggacaatttgacttcctcttttcctaatataatcccctttatttctttctgcctaatcgccctggccagaacttccaacactatgttgaataggagtggtgagagagggcatccctgtcttgtgccagttttcaaagggaatgcttccagtttttgcccattcagtatgatattggctgtggggttgtcatagatagctcttattattttgagatacgtcccatcaatacctaatttactgagagtttttagcctgaagggttgttgaatttggtcaaaggccttttctgcctctattgagataatcatgtggtttttgtctttggttctgtttatatgctggattacatttattgatttgcatataatgaaccagccttgcatcccagggatgaagcccacttgatcatggtggataagctttttgatgtgctgctggattcggtttgccagtatttttttcagcaccaccccacacctattccaaaattgaccacatagttggaaggaaagctctcctcagcaaatgtaaaagaacagaaattataacaaactgtctctcagaccacagtgcaatcaaactagagctcaggattaagaaactcactcaaaactgctcaactacatggaaactgaacaacctgctcctgaatgactactgggtacataaataaatgaaggcagaaataaagatgttctttgaaaccaacgagaacaaagacacaacataccagaatctctgggacacattcaaagcagtgtgtagagggaaatttatagcactaaaagcccacaagagaaagcaggaaagatccaaaattgacaccctaacatcacaattgaaagaactagaaaagcaagagcaaacacattcaaaagctagcagagggcaagaaataactaaaatcagagcagaactgaaggaaatagagacacaaaaaaccctttaaaaagttaatgaatccaggagctggttttttgaaaggatcagcaaaattgatagaccgctagcaagactaataaagaagaaaagagaggagaatcaaatagatgcaataaaaatgataaaggggatatcaccaccaatcccacagaaatacaaactaccatcagagaatactgcaaacacctctacgcaaataaactagaaaatctagaagaaatggataaattcctcgacacatacaccctcccaagactaaaccaggaagaagttcaatctctgaatagaccaataacaggctctgaaattgtggcaataatcaatagcttaccaaccaaaaagagtccaggaccagatggattcacagccgaattctaccagaggtacaaggaggaactggtaccattccttctgaaactattccaatcaatagaaaaagagggaatcctccctaactcattttatgaggccagcatcatcctgataccaaagccaggcagagacacaacgaaaaaagagaattttagatcactcttcttttccttctctcctttcctttttcttccattttccattttatatacaagggtgaagaacatgctaaatatcctatttaaacatccaaaatgtgtgaagttaccccatttgcacatttaatttgttcatgctgtgagagaataattgagagagatgtaagtagtgtgggtgactctggttccattccatgaacacatgccccagattgagcagtcaaatgggagattgcaatctgcagttttctcataaggtctcaatgccttgtatgtctctcatagtgtgagtatcaggctaacttgagtctgattcttcaatttgaagacacagatgttacaataaaaatgtccctaaagacaagccagctattttgcctggtgtttagctgaaggaatagtaatctgttcaatgatagaggggggaaaagcgtggctactatagaactactgagtggcagaatatggtatgtcattctccaaatggacacacaaacactggttattttactttacaggtaaatcaaggattttctagcatgagatttgtagaacctaaacattcccattgtatcatattcatcaccatccatgcttcaccctaatgttttgggcatgtgggtgtataaggcttgtcttatattttcgaaagagtttcttcttttcattggttcttttctgtgcagtaatttgataataggtatctatagtcttaaaaagagacattaaacccatcatatttacttctagaaatttatcctaagggaatacttctacaaatggaaagctgtacatgtatgttcaccagaaggctttaaataagaacaaaaattatattcccaacaacggattgtttgctaaagcctcctcaatataatgatgtactattcagtcattaaaaataattgttatgattaataataactgataacatctcttaagtgtttattatgtgccaagcatataataaacttacatgtattattgtagaagaattcaaaattcttatatttcatagatctacataaaaatgtcttatatattgtatttttatgtattcagtttaaatatgcacatatacattttgtgatttatgaaaatattatagaaaaaagtcttcaaacaaatgtaagtaatgattaaaagtaaatgaaggaaaatgattttttaaaatattttttgttttctaagtttctctacagtgaagatattactccattaggccaattaattgcaaatttaaatgaaaattcactgaaattaaataaaataaaaaattcaccttctcagtatgctagccatatttctagtgctcaagagctgcatgtggttggttcctgccatattggacattggacagagcagataaaaaacatttccatccccacacagggatcgattacacagtggtgcctaacctttgaattagaagttgtagtccaataacaattccctgtagaaacattgaaacatctgcatcctacttatagcagtggaatagctgcatcttttttctgcatgcttggggtaggcagttgggaattgttatgacagctgtctgttaaagaaggggtagtgagatttcaaaatatggagctctgcttgagcttatctttcagatagtctgtgcaggcttgcaacagcataaccacgttcttttaaactgtttgacctaatgtgttttaacatgtgctagtcatgtaggtttcaactcaaaatcctcttttttcatggatggaaagattgagtcctagaaaaattaaccagaaggcagaataaatctcttattctagaagtttcttaattcacaggaacaatgataaagaaagaactatcaactagaaataaccatcaactagtttgttctcaggaaaataagcattgaactaagggttagaacttgttggtctcttcctcagtgttttttcttttactaaacccctcacctccctggttaaaagttagagaagtgaagccatattattacatttctacttcattctctgggaagttcaaattccactaaatgggaaaaggacacgtgttttcactatacatgtaacttgattctagctataaaaattgtacatattttgtcacactattgacagaatgattagtttctcacttaaatatatgcaacttttataaccttttgattatgtgaaaaatataatagaaactgcaagatgttttattagggtatactataaaatacttgaagtcttaaattgcagataacgagggatattaatatttaaacttcattgagcagtgttgttttcttccagaagttatatgtaatttacatataaacacatatacatacatatatgtatacatatatacacacatacatacatatatgtatacatgtatacacacatacatacatacatgtatacatgtatacacacatgtacatacatatatgtgtacatatatacacatatacatatatgtatacatatatacacacatatacatatatgtatacatatatacacatatacatacatatatgtatacatatatacacatatacatacatatatgtatacatatatacacatatacatacatatatgtatacatatatacacatatacatacatatatgtatacatatatacacacatatacatacatgtatacatatatacacacatatacatacatgtatacatatatacacatatgcatatatgtatacgtatatacatgtatacatacacatatatacatatatacatattcatatatgtatacacgtgtatacatatataggtacacgtgtatacatatatgtatgcattcatatatgtatacacgtgtatacatatatgtacacgtgtatacatatatgtatgcatatatacatgcgtatataaacatatgcatgtatgtatacatatacacatgtatatatacacatatatgaatgtatgtatacatatacacatgtatatatacacatatacgcatgtatatatacacatatacacatatatgcatacatatacatatgtgtgtgcatatacacgcatatacatatgtgtgtgcatatacacgcatatacatatgtgtgtgcatatacacgcatatacatgtgtgtacgtatacacgcatatacatgtgtgtacgtatacacgcatatacatgtgtgtacgtatacacgcatatacatgtgtgtacgtatacacgcatatacatatgtgtgtacgtatacacgcatatacatatgtgtgtacgtatacacgcatatacatatgtgtgtacgtatacacgcatatacatatgtgtgtacgtatatatgtgtatatacgtatatacacatatatatacacatatacatatacacgtgtgtgtgtgtgtgtatatatatatatatatatatatatatatatatatataattttttttttttttttttttttttgagacagagtctcgctctgtcgcccaggctggagtgcagtggcacgatctcggctcactgcaagctccacctcccaggttcaggccattctcctgcctcagcctgccaagtagctgggactacaggtgcctgccaccaagcccggctaattttttgtatttttagtagagacgggatttccccgtattagccaggatggtctcaatctcctgtcctcatgatccgcccgcctcggcctttttttaaatgacttattcagtttagttacatcctgaggtacatttaggagtaacagacccactacttgttactcagggttctggctgggcacagtgatatgcacctgtagtcccaggtacttgggaggctgaggtgggacaatcactggggccaagaagttcaagaccagcctggacaacatagtgagaccccatctcaaaaacaaaaagttccactgccgttggttatgattctatctcttcccttgcaggatgatttggtcatggtccatgatgcttcttaagcacagatgagggttctcctagccagttttccttgtagcattaattaaagacaattcttgtaagcatccgatggtttcatatccatttcttctttttttcttttctcccttttttctttgactttttgctttctttccctctctttatctttcttgcatctccctgctttattccctaatctttacatctgttatattcttgtgctgccagccaaagccggtatttaccaatgaacctagccttttggattgactttgaacttaatgattgatcatatctgctttagctgttggccctgacctaaaaaagatatacattagcccaaatagatcagtttaattttattttcccttgtaatcatttcagtgttagaaattttagtctgtcttgtattttagtctgggtttaaccacttcagtatgcaagctaaatcaattcagcaggaggacaaattatttcagacttgaaggctaattttatccctgtttgttattctctttatattgagtaagtccttttattaaaggtattaggggttcacttatctgaatgttcattatgggtgaaataataagtttaagaaaaatattgttgtgatattctacttttaatcatcatattcacaaatgttctactaatcagattcaatatgtggataaccagtgctcagtgaattagaattaagcaacataaagccaaataaaactttaactcaaaagctaagatagtcatgttacttactaaggacaacttgaagacacttgaaagtttgcagagtccattttcaatttagttcattgagctgttactttttgcaaagccctagtgacgtggcactataggagaatgctggtatggccatgtttactaaatgtttgcaaaaacatttattaaaatgtattgaacattaatgtactaactgcctatcaaatgtactacacatttaaaggtatattgtctagctttttgacatattgtacatctcaccattttttcagcatctgtgttacttcctactaacacgttaattgtgaaagttaatttattgttcaataaaaataatggatttactttttcaatttcatatggattgtgaattcaaaaattgaaagcttacattttcacttattaacagaatctgaggatattattttgtgggcttaaagtaaattgcagaaaatgtatttcttttcaatttagttaatgaataacttgaaaatgaagaaactaagaccaggacacacacactccagaaaaagcacataatctttattgcataaaagatcagtttttctagttagaatttaacttttatcttacttttaaattaaccatggattttactcttattagaaaagagcggtaggcctggcgtggtggctccatgcctgtaattccagcactttgggagaccaaggcgggcagatcacctgaggtcaggagtttgagaccagcctggccaacatggtgaaacctcgtctctactaagaatacaaaaattagctgggtgtggtggcacgcacctgtagtcccagccagtcgggaggctgaggcaggagaattgcttgaacctgggaggcggaggttgcagccagctgagattgcaccactgtgctccagcctgggcgacagagtgagactccatctcaaaagaaaagaaaagagctataaaactataaaggaatgttttgttttctataaaatagacatagataaaattattgaaaaatcccaagtattcatttagaatgttgctaagcatttttctagaaaattggccaatctaatttaaatgactgaatatgttgttgctttcttatttttgataactctcattgggttttttcatttaatacttgtggattagttttctcaataggaaatatgcaaatactaaattatcatggtttccttcttaataatgtgaaaatatcttaattgaatttagagtagcttaaagcaaattgtaacatcaaaaaattttttaaattttatttctgattatatggtttgataaattaatataaacatcaggatttgctttttttctttgctaacatgacagtgttaaagctctacaattttgctttattgagaaaaagatggaaaatataatatgactttggttgtttttccttatttacttttcatcttctgtcaatatcctcattctaggagaaattttttttacctgtgttgcagagggcttttctgtcactactttggaacaaatttgatattgtttatttttaaagaaaattgactagtactgtattaattgtccaggctactatttatatttattaattgctattttctgtagttgtgtggcagattcataagaatctgtttgaagaaataagtttattgtttaatgcacccaatttattggtcaaaaccaagaaagcagtgaaattaaaaattaagattacagtagtttaaaaaaaaatcttttgactaaagttcggttaagcgtcagtagttgcacagatcaagtcacaatgataaaatcataagcagtctatcactcatccagtgagatctgttgtagtaccatgccaacagtaggtcctgtggccgggccagacagttccaagaatctccctggggagaaataaagaaacacacacacacacaagtcagctcagctgttcctgtgacccaaacaagctgaaagggtgaggaaaggtggccttgccagcttgctgcaagacaggcagattaatgagatagacaagggtaagaggcagccttattaattacagaaatatagctatggctgcttctctgctcaagctctttttattacttacaatgtaagtagcatgctatgtggagcagaagtgggaatgtaaactgcagtagaatgaatgctttttggtaatttgcaaacttttaaggccagaaattacctaatagatcttctcttctttataggagagtagaattaatgtatgaattaatagacttgattaaacctagtaaaaaaatcgttcagataaccatatttcccaaaataggattattctcctcctatggtatcaataatttttttagaaaaaccatagacaactaataataatgatcaaaccactttaaaaaattgttatttcacagtaaagatagatgttctcagctgaatgcctggaaaagactgtagataaatgttgagcctgtttagattttagcagcaatgtgatttaggggactgagccctgatctgagcctattcctgtcactaacctaaggcatgttcataacttctctgagccaccaggtttctaatatgtaaaattgcaatagtaatacataccttaaggattgtcagcagtaataggctgcagaaaatgatactcattatttccaagttcctgccttaatcttcactgtcgaactcaggaagcaatgcatttcacgactcctagaatttatttactaaagaaacaatagagttgagtaaatatattacagattttcatatgctttcttaagataaatcacaagcctccaatcttttttggcttaaagtattcatgatatttactgaggagacaagaatgtaagataatgttttctcctctgtgaaaggataggaataggcaatgaggagtgaaacagtgcgggtccctcctccagttgctgagagttcagtggaggagtcaggaaagtaaagaagcagttatcacacagtgcagagatgctatagaatggtagtcacagggcagaggcagagctcagcagaaggttggaaataatgatggagagactggggcagagctggtgaaggtttcccagaggacaagcatcctagatgcatcctcaaaattaaatgttaaaaaaaaaaaggtatatttgaaactttgagagattcttagtgatttaggtgtccagaatttttctattgccacttgctgtttttaaactatatataagattcattgtttaaatatgaaagagtatgaagaaataaaattattcataatcttaccccagagatgacatttcactttgcatcatgtatgtatactttgacttaacagaattaaaattatgtaatatgtaccactttgtaaggtttttacttaatatcagagtagttctattttctcatattattttaaaacatttttcatagctgtatagaatttattgtatgggtcagccataatttgtttaatcagtcccataacatagggtctcagtatatgtattggttttctacagctgctgcaaattacctcaaatttaattgatatgtaataactgtacatatttatggagtacaacgtgatgtttcaatacatatatacagttatgtatcaattaaaaataaaagaaaaccttaaaaatgaaaaaaatcccacaaattatcttacagtctagtatgtcagaaatctgacagaggtcagatagatttacttctgcctccgtcttctactattaagactctcatgcttatattaggcccacctgaacaatccagaataatctccctgtctcaaggtcaattgatgagcaacatttaattctatctgcaaccttactttccctttgccaggtaaagtaacatatcacatatttagggaagtaggacaccgatagctttgaggatagatattctgctgccacaatgtattttttttcagttttataaataatactgtttaataataatgatgctctaatgaacttccttttacataaatctttagtcatatctctatttctttaaggtaaacaaatggccaggttttctctgtaaggagaataatattctttttatttcttcattacatataactcaatattttatattaatatatacctagtaattgcttgatttaggacttaaagagtaatatagactggtattacttaaaattggtgactggcttattttacagattatcgggtttctacccaatgtagtaattttcttgctacttctggcaagtatagacttaagactactatgtagaagtgtaaaatattattggccagagattagttgaaagtagaagctgatgaagatacaaagaattatatttattttcagtaaaaatgattatagagagttttgtaaatattggataataaaaacaacaaatgagatttggcctttaaaaggttgtttatggccaggcctggtggctcacacctgtaatcccaacactttgggaggccaaggcgggcagatcacgaggtcaagaaatcaagaccatcctggccaacatggtgaaaccccgtctctctaaaaatacaaaaattagccgggcgtggtggtgggcacctgtagtcccagctactcaggagactgaggcaggagaatggcttgaacccaggaggcagaggttgtggtgtgccaagatggtgctactgcagtctagcctagtgacagagtgagacttggtctcaaaaaaaaaaaaaaaaaaaaaaggttgtttaccactgaagcgtaaagtcggcctctactcactttctctgtataatagtatatgactaccttgcaaatattcatatagtttacagcagttgtaaaatatagggtaatttgttagagtataaggctatatttatactaatatatcttaaagtttctcattgcaagattctgccaatactttaaatatatagatatataaatcctgaaagaataaagtaataattaaaaatacattttaaaaactatcaacaaatgttatattgataacaaatttggggttttaactgatggtgatatataaatagaaaataagtaaattgtcagatatatatgatctgcagaaagatctaataagcctaataaactttaaaatgaaataatatgatatgagccaacatttggtttgcttttgcaaaaataagagcaattcttttatctagtttatgtttgtaaatatatctaaaaccacatcacagtcaacatttaagttatattgctcaatttggagtttttattttaattattgaatcccgacttgtatttttataaagtaaacactttgaactgttcacaagaaaaatggtttactattatatatttatttgaaatctgaaataattttagttatttttattgaaatataaacagatcatagctatgtgggtcaaatcatagtagtatgtgtcacaatatagagttaagttgcatcagttattaatataatattataaaattttggttacttgtgagaatttcagatagaggaaaacactatattcaaaagattgtctgtgttgacaaacttctttgatgttatgccattgtaaacatcacattattagcaaacaatgttcacaaaaagtgaaattagtactgtgctctcttgcaattctgtcctgtcaggtaaagaataaacattcaaaagtaggataggtttttgtcctgtcactaattacaggtaccctgctaagttgcatgttaagtaaaaacttagaatgggctggacacagtggctcaagcctgtaatcccaacactttgggaggccgaggacggtggattacctgaggtcagcagttcgagttcagcctgaccaatatggtgaaaccttgtctctgctaaaaatacaaaaattagctgggtgtggtgccatgcacctgtagtcccagctgctcgggaagctgagacaggagaattgcttgaacctgggaagcggaggttgcagtgagctgagatcacaccactgcactccagcctgggtgacagagtgagactccttctcaaaataaataaataaataaatataaataaaaacttagaatggttatatccataagcattttctcccatgaactgggcaggcagcagaatgtgggcatttgaagcagcctgcccagatggcactgttacttctccagaagcacatggatcctccatggcttattgctaagtcagtgcaatcaatctgtcagttgatatctgccagatcagtctaatagagtttccaagcattccatcaacacaaggctgagagtggggtggtgatgtgggatacgaagcaggggcaaactgactctggaggttcctgaaattagaaggaaaaggattattgatcactggtctgttcaaaccatctctctcccactcctgccttattgaatcagtaagaaggagaaccatgagacagacctcattcaatgacaagaataaacatatactacatcagtgatactgtcacttctattccttccttgccaaggagaaagaaaatctggaatttttttaaaggatttggacaaattataaaatggtcttcacaacagaatgataggctatttcctcatggaattagaataactaacctaagcgatggtcactggaatagaagaagctgtaagaagaaggacgtctaccctctggtgcttaaaaaaactcctgctcaaaatctaataatttcttgccccaccatcaccgtgatacacacaaggagtgagggcctctacttcccttttttatccccttttttctatccctgttgtgaaaagtcccttttttacattccactgtaagcctgctctgggtgtattttcattgattctagagccctcagtggagaagagagtttattggctttgaggctgtaggactggctgtgctccttatcccccttaaggggcagggtacttttgggatataacttgtaacagactggctgcccatccatctgcccatctctggaggtgtctaactaaatatttgtatgacttttgtattttatgaatttcactactagtgacaacttatttagcagcaaaagtgctaaactagacaaaagactttatcaaaaatgaaaatacttttttttgcaaaaaaatttaaagtgttaaatatgaataagggtttacattttgttctgtgtgtagcgtgcataaactgagtaagaatttccataacagtctctttttttactctaaatctgcatgagaatggactgtagagctattctgttgagttaattataccctaaaatgtttagtattgcctcttatcaatcaagtttgcattttcataaggtatttttgatgactgaatgatttaacatacgcaaaacacatctggacactacttggcatttagttaagtgctcaaaaatattacttcttttcctcttttatcaggaaattatttctgccctcagttccaactctgcaagtgagtctcttagattcatagaaaatactcaatgaccattagccgttattctttttgtttctctattctgtattttcttatgaagtagctttaaattttcataataaagaacaggaaatgaaaagggcatttctaaaaccaattctacacacttaaagaaaagtagagagttaagacaatatagtcaattcaaacacaccaaaacatttaactcagaaatatctccctaattctttctatttttcagaattagccagatggttcaatacttctcggtgggatctgagaattaaaatgaatgtcatgtagtaccccctaaataaatgtatgctgactgatagataattgcatttcttcttcagatcacacttcatatatacatatagattttttttgctgtcagctgtgaaaggtcctaccggtctgctaataattgagcaagcatgttttagtgctgcatgtatgcattgaaatgaaccaagtgtaattataggcctctccctttgaacatcaaagggcacagcgctgtcaatatgcccgcatcaagccagcagcctaatttactatttaataatacatttgtgtgtcagacctctctttgcccagggctgttacagttcaactagttcctctgctgttaaaaaattgatcatctttctttcctgatatttggaaaaggaacaataaaatttatctctgtcaattgaaaggtctgttcactttaaccttgacctgtttatttcagaagtgtaagagggcttaaacacatgaagaagcagtaaagtaaaagaaaccttaaaattagtgatttaggaaatagctgaaagtagaagatggtttctatacaaaacatttgctctggagtgatatctatacaaactgggtcacaaaacctgacttttttaaagtgttgttgaaccaaatacgttagaatctcttgaaatgaatcagaatcctgggtaggaggaggctggagctggacaaagaggaaagacaactgggaattttgcattgggaacgatcttcagatgattctaattcaaactaaagtttgagaaccatgttgctctaaatgttttagcagctagtacaaaagggaagacatgttttattccatgattcacgaggtagaagagaattaattcctcagaggaggacaagaattcctatgtactaaggccagagataatttttctctgggtgcttcggtggtaatataatattcattaatatttatcttttcagagaaagttttttgtaataattggaactcatagttattggttttgatgtctagaacaggtaagccatgccatagaagtgcttcatccacattgtagaagcggggatcaaggaaaaaatataccaaatatgcaatatttggtacagagattctctctgtacttcttacatgttagatgactgaataaagcccattactttagcaccttgtttgcagtgttgttttctgtttcacctactctctgtttttctacaagcccactcttttcatcgggagatgaaagcattcatttgagagagtagggaatttcaagtgaggttagtctgtgttttcctcaatctttgggtactggcagtcctgttggccttcctagctcctgttcctccagtgatccttcttccccactcagttcttttgcctcatgagctgcagtgcacagagctccttttccatttcatcatcagccccctgcctgaaaggcaactcttaaatgtagtcacaattcatatcactgtcatctagaaagtcaaaatcaagaaattccttcctggctataatacctgtctctgccactatggtttttctagtcaggcacctgaatagatgtttatcatcctaattatgactaacagtctttgtggttctttccagttctccccatgtatgatccttggctgattttaaatgctttctctagctaaaccctgtgataacttgcatcttgaattccttgcccctttgtattgttttcaatcttgggacatgagaaacagtactgtggctaattggcatcactgattaactatttggactgtaaggtggagctcatcgctgccttcatgttccagcagctctttacctttactgctgtcatagaactcagcccaccagtgtgtccttgttatatgtatggcggtcaccctcagtgttatgggctcccaccctccctgaacagtccccagatattgcctttgtatcttctgctacatctggcacatagtacgtcctgaataagtgtatcttaattgcatcttattgagacatttggccatgatgtacttattttctatgaaaatgtctaaatatttgtttaattgaatagttaggcttgtaatttattactgtgacttatttgtagtgttttaggcaaccagaggtaaaggacatagattaatttaagaaaatacgaagtttggcgaaggaaaaaattaaagggtcttttattttctgaagacatgtgtaagttccttgtgattataatttcacgtctgtttaacttaaaatagtgttagatttagtttggctgggtccagtggctcatgcctgtaatctcagaaatttgggaggttgaggcagaagggtggcttgaggccaggagtttgagaccagcctgagcaacatagtgagaccccatctctacatacatacatacactaaaaatacagatttagtttacagaattggaggcttatggtgcctgaatacaatgtatgacattttccaatctacaaaatgttaacacttcaaacaaaacttttaaataatacatgcttattataggaaattggaaatgtgtaaagaagaaaaggcatcaaaatctcaccaccaggagatagtctgtctaaacgttttgatggatttgccttatttttctgtgattatttttaatagatgagattctacgtgaatatacttccgtgttttgctgttttcacttcatcctgcatgttcctgacctcttttcccagtttgtgattccgtagagattcagagttataaataatgtgcataaaactacatatatttgcataatcacatttttgtgaccaagctctaaaatgttgcttttatatagaatgaaagttcttgcaaagttttacttacaagtgaacctttaaggccattacagcttaaaataaaacagtcttaataccgttttgagagtcagtgccaagagcagtgtttttcaggaagtaaatgccatgacctgcccttttttcacactcaggctcttaagcctcctgagaaaaattttaaataaactgtcacctttttccgtcctgtttggtttaatgaggtgttagatggacacaacttggaactttggagacaatcaatgatggaagaaaagactagtttgtatcattgtttggatcaaaagctcccaagtcatatgtagtcattttctgatgtactcttctccagccatgagggcacctgggaacacaaactggcagtgaggtagaaaggagtgcagctgaatcaggagagtgatggtggtgaggcgtattcagaaaaactaagacacactctacctttcctttacatcctactccagggacttttttaaaaaaaatttctttaatcctttggattgtttgaatgctttcttatgagcgttacttattataattattaaagagattaaaatttaatgatatatacttaacactgaattatatactttaaaagtgtaaagttttatggtatgtgaattatatctgagtaaaaataaataagggaaaaaagaggtggaaagccatatgaacccattcattcatgtaaataaacactaagcgcctaaaaaatattcataaacctgctttggtagttgcaagagtgaaacacacatagactattcttttgggagtttatagaaatatgatagaaatagaaatatgatgtatatctaagtaattctagtaccagaaacaaagtggtgtgtgttactaaaagaggtatagataaatttctggggaaaagtagaaggaaagagtaataattctagcagcaaatgtagaaggaatttagaagacaggtgtttgagtgctgattgagatttgtgaatcaatgtagactggtcgggtatgtgggtagatttggtggtgatgaggcaggggagcacccatctgattgctcacgctttcttggtgaattataggcaagacttcacctgaggctgcatagactgggatagtggaaagaagggaaatgctatgaaagcatcctttggagagttggaaagtgtgcatcttcggaaatttcaagtgaggataatttgtttttctcgagaccctttcagctgctagatgtaaatgcagagtagaagaataactggatataggtagagttggaatttatgacataagtataacaaaggattaacaggctaggggatttgagaatgatgaacgtgatggtagcaatggtttggggaagtaattttcaaagcaggatcagcatcacctgaaaatttgttggaaaggcaaattcttggtcctagacctactgaatcagaaattctggggacagggcctaatagtcttgtgtttttgaacaagtcttccaggagatcctgtagcacaccaatatctgagaccctctggtttgggaaatatagagtactcacatagtaagtattattgtgggtaaggggcaggaatgagtgatgatggataataaaaaagaagcagtgtctggaataaagtctacatgagagtgacatattatgtcagtggggaattcaagtaagtgagccttgagagtaggctgtgctggccagagaggaagatacttaaaggattttggtggtagagcagttaaaagagactcagatgttgtgtggatggtccatgttgatgccactgtcaccgagaatcatgatacaggggtaagaatggagaagaaacttgtgaggccagtactgaaatctttattgaatgaacagtgaccaaaaagtagacagacaactaagtgagaattagaggatagtacagtcatttcttgcccctcttttcatcctctcccactcctcaggcccagaggtatctaaaatatgagagaaaacagcctagcctctggatccaaggtgtaagaaggttatgcctcacgtctagacttagttcacagggcacagaaaaagagtatgggacggctgagatgagaggaagattgagtcaaattagtgaatgttaccaggttagtgtggaggtaaatggccaggtataaataggtgatctgaaaatcttagactccttcttgttgctgaaataagcagataattgagacatgatgaggcgaggtgaaaagtgttgtctgacaagattagaatcagcacttttttagtaaactgaaaaagacagtcgtgaggaaatgatgcatacataccttaaacattttatttctagttgtacaataattcatcatatccactgtttgagtttccagattgttttttttttaacataaaccacactcatattgtcatctatgaattccaggctttcaagtaaaccagaactgaaagacacatatgaagaaacccaagggcaaaatctttctagacttttacttctctcttatccctaattttttatggttgtgttacccacacaacttttaaaataactcaacctttattggctttttccaaagcatgaagttttgtttttaatgcaacaactctcttttagtattttatgttttgttgctttatgtaacatttgattgaattatataattacaatgacaggcataaacaggtttgggaacaatcacatgtaacctgttatacatacaattcaacaaatgggaaatgtgagcctatgtgaagtcccatatgttcaatgtccagtgggcatgtattttatagaacgaattaataggtcaatgtggcaaattggtgaattagagttcagatgagagagcttacttcattgttctccatgatgcttaaaggaaagtcagtgatgtggctgagcgaggtgagacaagtaattggtctttcctgaggccgccagaggtatgaagccagagtgagggaactcacttctgaggcagagggtaggtcacattggcaacattggcatatgtagaaatcccttataagttccattggcacattttcttctttgttcttccaaaaagactaataaagttatttaaattatgaaaattattttctaatatattaaatgtgattaataagtaaactttctgcaggtttctatgatttttgtatcattgcttgatttaatggtagtatgatacaattgactagtatgttagctcaaatccctcgtatgaaatatgtgcaattgtgatttctacttttctaacttttaattttggctttatgtcttgcatgttataatgtacaaagaggatttctcagtgtaccaaatacatgaaaatatgtttgaaaatttcattaattttttaaaaatagttcttaagatgtttgtatcttgagtaaaacatttttctattaaagctattgatgtattttccatgtgatgatgattaggccattcttgcattgctacaaataaatacttaagactgagtaatttacaaagaaaagagatttacttggcttatggttctacaaactttacaggaagcatggtgctggcatctgcccagcttctggggaggccttgggaatcttacaatcatggaagaaggcaaagggggagcagtcacgtcacatggcaaaagcaagagcaagcgcgagagagagagagtgcagggtgaggtgccacacagttttaaatgactgtgtcttgtatgaactcactatcattaagacaggaccaaaccatgaaggatccaccccatgacccaaacacacccaccaggcctcacatccagccttgggattacaattcaacatgagatttgcatggggacaaatatccaaactacatcattccacctctggccccttccaaatctcatgtccttctcacgttgcaaaatacaatcttgccttcccaatggtccctcaaagtcttaactcattccagcttaactcaaaagttcaagatctcatctgagacaaggaaaatcccttccacttttgagcctgtaaaataaaaatcaagttagttacttccaagatacactgggggtataggcattgggtaaacaaatattctcattccaaaagggagaaatcagccaaaagaaaggaagaaagggggtacaggccccatgcaagtttgaaacccagcagggctgtaattaaatattaaagcttcaaaataatctcctctgactgcatgttccacatccagggaacactgatgcaagggctgggctcccaaggccttgggcacctttacccttgtggctttgcagggttcagtccccagggctgatcccatgagttgaagttgaatgcctatggcttttccagacgcagggtgcaagctgccagtagatctaccattctggggtctagaggatggtggcccatttctcacagctccactaggcaataggggactctgtctgagggctcaaccccacatttccccttggtacttccctagtaggggttctctgtgagggctctgcccctgcagcaggcttctgccagggcacccaggctttctcacgcatcctccaaaatcttggcagaggctgccaagcattcttcacttttgcattctgcatatctataggcttaacaccatgtagaagacagcaaggcttatgccttgcaccttctggagctgtggcctgagctatacctaggcaggcccctttgagtcacagctggagctggagaggccagtatgtggggagcagtgtctcaaggctgcacagggcagtaggctctgggctggcctacaaaaccattctatactcctaggcctctgggcctgtgatgggaagacctgttgtgaagttctctgaaattccttcaagactttttcccatagtcttggctattagcacctggcttccttttagttatgcaaatttctctagcaaatggttgctccacagcatgcttgaattcctctcccaaaaaagcttttttctttttctgccacatggccaggctgcaaattttccaaatttttatgctctgcctaccttataaatataagcagcaactttaagtaattccttttctccctcatctgaggataagctgttagaagcagacaggcgacttcttgaatgctttgttgcttagaagtttcttctactagatactgtagtaatcaatctcaagctcaagctttcacagacccctgacacatgaacagacagcagccaagttctttgctaaggcataatacacatgacctttgctacagttcccaataagttcctcatttctacctgagacctcagcagtctagacttcaccgtccatatcactatcagcattttggtcacaaccatttagtcggtctcttaaaagttccaaatttttcttgatcttcctgtcttctgagccctccaaattcttccaacctctgcccattacacagtgccaacgtcacttccacattttcaggtatttttatagcaatgcttcacccctggtatcaactttctgtattaggctgttcttgcattgctataaataaatacctgagagttggtaatttatgaagaaaagaggtataattggtttactcctatgtaggcttttgaggaagagtggtgctggcatctgcttagcttcttgggaggccttaggaagcctgcaattatggcagaaggcaaaggagaagcagacacatcacatggcaaaagcaggagcaagcagtaggagagtgggtcaggggaggtacctcacacttttagatgaccaaatctcatgatttagcaccaaaccttgagggatccacctccatgatccaaacgtctcccaccatgccctacctcagcactggggactacatttcaacataagatttgggcagggatgaatatccaaattatatcagatggaaaatatgatgtattttttgagaagaaattcaaactactgcataaaggtttagaagattgtaaatatagtggtaacccatcacttaaatggttggctgatattatttctgtaaacattggaattcacatgtttttaaatgtaagttcagtgtatctttccacaagtccatgacctgacttttaaaaattaggtttgtggattattctgatctaaatatgtcatcttctgccctatgaaagagaatatagttattgcctaaatttttctggaactaacatttaagtggatgcccttgtgatagttattgatacggtttggctgtgtccccacccaaatcacctcttgaattgtagctcctgtaatacccacatttcatgggaaggactcaatgggaggtaattgaatcatggagggggggttccaattctgttcttgtgataaggagtaagtcttttgagatctgatggttttgtaaagggtagttcccctgcatattctttcttgcctgccaccgtgtaagacatacctttgctctcctttgccttccaccatgattgtgaggcctccctagccatgtggaactctgagtccattcaacctctttttatttataaattacccagtcttagatgtgtctttatagcagcataagagcagactaatagagttatccttgtttttgagtatacaaacagtctcccaataggaaaatataattatttttagttaaaagaacctcttttaatgtaatggcattctaaattctctgtagtcaatgtactttggcatatggtaccaaaaaatatatatatttatagcactaggaactaaaagagctaaagaacataacttagataatggaaatctttaaggtcttacagtcaataaactactccatactttctcatgtaacttgtcctatatcacaatatgaatatggcctataagactgttgagtaagtcagcagttaatttgtcctacttagactggctcttgtcaggaagagtatgttccatatcccttttatttatgaaattaacgtctttatagtcccatgccagaaaaaaattgtctgtattatgagctgatacattttattttgtcaaacagttaaaattttctaaaatatttactattttgccttggctgccaggaattttagagctaactcatagtgtctatgtcactaaggttttcatataattatcttcatgttctacctctctattatcagtctttaatttttaatttagtaagtctatcaggtgttttttaatataattattcttaatttcttctcaaaaatttacggtagataaattcaataaaccagcagacaattattttactgttaattctataatgcaagtaatagtgaaaaagatagctttttcagaaattcctaggaaatgctttgttcaaataggaacttagtagatgtattttgttaagcatatgaagtattcatgtttagtcttttattgctagttaaaagtcagcattaggatagactgtcatttccaaagcctatatgtttctgttttgtgtgagtcagatttaaaattcaggactggaagctgagtgtcacataatctctaagatagcaatgcacgtagatttccggccttggctgttcttaaatgtctacagagagttgcaaacctttcaacttcactctggggaagagatggtatgtgtgagatgaccaaagttggcccagggaatctttgaagaagatgatagtttgtctgatagatattataaaatgactttgaaaggagaaggtatgcctgctttgagtctaaaaaggaaagaaagcctttttcagttgttcatattgttcttttatgcataagagggttcccttatgcctttgtgcaacttttgaatgaatacagtcccttgaaaatgcaaactactgcataaaggtttagaagattgtaaactcagtggtaggtagcccattacttaaatggttggctgacatcattatttatgaaaacattggaatgtactttgtaattgtaagttaaatgtatctccccataagaccatgacctgacttttaaaattaagtttgtgaatagttctgacctaaatatatcatgtcctgccctgtgaaagagaatgtagttatgcctgatttttctagaactgattaccttttaaatagatgtccttgtctttcattccttccttctcattataactgttggcttttgcttattttactgcttattagtacgtttactgtgatagccagaataatggtccccccaaggacatacaaacatcctagttcccagagcctgtgaatatgttgcattacatggcaaaaggaaattaaggtgcagactgaattaaatgtgctaatcagtttaccttaattagggagattattctggattttctgagtggagccaatatagtcacaagggaggcaaagcaaaggtcatagtgaagtagcatgagagggacttgacaaatcattgttggctttgaagactgaggaagggggccaccagccagggaattaggagacctctaaaagctgcaaaagacaaggaaatgatttttccctggagcttccaggaagggacagagctctactgacacctgtgatttttgacccccaagtgagacacttgtcagattcgtgacctacagagctgtgagataataaatgtgttttgttttaaagtcactaaccttgtggtaatttgtcatggcagcaacacaaactaatatatttaccagggttagagaaaggaagatgaaaatcaaggcagtctgtacaggacaaaatttagtgtgggctgaagtcgcagctcttgctcagagggagatacaaggctgtcagtgaatttcagctcctccccttactgttttccattaatccagataatctgcaattgcctgttgccagtataatgatttgaaataggcttcagaacaatatacctttagttcagtcagcctccagttcacccacttggctctcaccagagtaatgtcttcatagaacagatttaatcctgttatttctctttaaacttcgctttgtgatttcccattgcctacaatacaaagtccaaacatagagcattacattcaagtcccctccataacagaagcttctgctatagccttacatcatacttctcatttgtatgcattctttttttttttttttttttgagatggagttttgcttttgttgcccaggctggagtgcaatggtgtgatcttggctcactgcaatcttcgcctcccaggttcaagcaattctcctgccttagcctcctgagtagctaggattacaggtgcccgctaccatgcccagctaattttttgtatttttaatagagatggggtttcaccatgttggccaggctggttttgaactcctgtcctcaggtgatccacccgccttggcctcccaaagtgctgggattacaggtgtgagccaccgtgcccggcccctcatttgtatgcattctgtgttcaatcaaggtgaagtacttatgtctgtgaacccagcataccattttgcactttagtccttcagatgtgtcatttcagtgacctccagtgccctcccagatcgtcagacctgctggcaaacctctatgacaaggcacaaccctaacattaattccctggaaaatcaagaaatattctacagcaaataaattatttgctctgtcctttgtgcctcactgttgcttttatgtgtcgtgatattaaaatattgtctttccatttcattcttttaaattaaactatgagcttcttgagggcagcaacaggatttaataacatatctgtgggatcttagtaattcacatagcttatacactaggtacttaataaataaatattcagtgtacaagtgattatgttacctaacctggacagaagacacggaggtgctattagaatgcaggtttctgaatcccaggtcagtttttggttacattctgactctataacttaagtacctaaaatactttgtatagctatggaactttttttcattttaaataaaatttagacaacttattctgttttatactactctcctttctatcccttcatttaacacttgtgatttcattgttttattttattgaaaatgaaagcatcaaaatagcttctgttttaattttcccctgcctctatatggaagaattattttgcacaatataactattcttattcttaaattattgtgaagattctgaaacttagtagcatgacacatgtcaaattcttttggctttaaatatttgaattttctttcaatatttctgttttctgcctttttagatttggtatttatgttaatttcttagtgattacatgtaaggtttgacattgccatacaggtctttatgaaaatgtatatggtagaacttggaaactataaaacactgcacaaatggaatgaattgttttcataattgttatcatcactttacactctgactgcaaaacattcgcagttttcatgatgatgggagtaattccactgggaatttctctttttgcaacagctgtcagaattcagtcttaaaatggttggcagctttttagtgtgatcagtaaaacacatccttcatgctacatagttaatttataggtttggtttattaatttaaaaaaggaaaacactttttttcaagatgaatgagtccatgttggtattaaaattttagataagaaccatcatcattagtttaaaaaatagtagacagaagccattgatgaatcaatgagacttaaacgtattcaaaacagatttgatttttgaaatattatgaaggtattgataaatattcacaaactgtagatttttaactatggaaatattcagcctgatttaacatattgcttggatgaccactgtctgatgtgagtaaagctaacttgttttagaatggcttgaaaagctgggcaaagccatggttcagaatgtgtatttaagatttgaattctatcacatttcatcagtgactcaccagcagtattttgttttctttgttttcaggttaactttaaaataatcagctggtttagctattaatgtttccaccagaaaagaaatgtcttgtgataaacttgtcatccttaaatgtgccagacatatcttccattgtgcatcaacaaactggcattatggtcttttaaaagccagtctccagtgagttcacttagcacgaaatgagtctacagagcttaatcatgctagagacttagctcaccagagtaccctttttcgggaaacataaatgattctcatgggtcccatgtcagtttctcatctttttacacaatgctagatacattctgacactgtcttactcattgtgtcttttttgaggcgttccttcacttgtcccagatttttaccactatattacattctcttatggcagtcttttaaggacattaattcacagtgaatgatgacttctgattcattccatggacttgcagcttaatataacataaccttattatgtggccaattaaagtgatacagttttagtgaaactaccagctgccactgtccctagttgtgggatgtgcatcactttggaagctttcaaccttatctacttgctcaggtgccttttcttgattatacaaactccaaaataaatttatttgaacatagtctttatattgtgatcttttcaacagcttgcatgaattcccacgttaatttgatgttattactgtagttctccttatatttttttcaaattgaatacatctttttctatcaaaataaccctgtttctttgggtaactatcaatagcaattgttttattcattgctttgcaggtactacagtgcaaccattctgcagatgtctggtgttgaagatgatagacttgcaatatggctggcttcagttacagccttcacaaatttcattttcacacttgtgggagtctggcttgttgagaaggtgggccgcagaaagcttacctttggtagtttagcaggtaggtggctggataaagaattcaattataaactttatttcctaataacttcaagtttaaccttcaaaaatacaatacttacaccacttctaatattggtttctcagccaaacaacaaaaaaattagagttcttctagaccaaaaaagaaaaaaaaaagagcttttaacaactgttacgctacgtgactagaaactagaatgagtagaaacaaactgcaagaataatttggatctactgagggtaacatttttctgttacttgagttccactcaaaggtacaaaagtgaaaaaaaataattgttttttttttctatccttttttgaaaaactaaaaactttggattcagaaactcactttttaacatatatttttaaatttgacatacaatggaattaaatttggagcattttttcaaagctctttcagcagtggaatattagaaccatgtaatttcttcacaaagcagggacaaactcttttgtgtttgaaacaggcctaaattccagggtaaattctggttggttaaatgtattttctatgatagcaaaataaagcaaaaccttttttttaattcccaagtatcttttgtgtttaaattctgcccattttatttattatttcactgtacacaaggactgtttcattgatagaatgagacccacatatttaacattgattttacatggctgcatggtataattttctaatttttttcaaatatgcaagtacattcctatgtatcaattagctatactctaataactcctttataagtttatttggagtgagaatgcatttttccattaaaagatagtttccagggcagcattaactaaattctattttaaccaaattgtatcgaaaacattgatctaatagaactgtttcagtcactcatcccatatttgatgagaaaatacattctaagttccaaacccagttatcagaaatacataccctctcctgaccctcattccagaatgaagagtagaacgctttcacctcctgttcttgcctaagcagtgggagcccttgaatccaataatgtgtgctgaactgcagtatcagtgctggagggaaaggtgagagattgtctgattaaggggcaaacatgattgccaacagccaggatatatactgaactaagacagtaggtaaatgaataaaagtgagggacaagtaaaggtttcaaaaccatgtttataaacctgttgaagaaaccagaggtatatagcctggagaacagactaaaggcagaagcctaccaggtattttattttagcagatagtagatgttatgaggacacagatttttacttaatataagaaaaatatccccaataatcagagctatccagcaatgaaatggactgaatcattaggatagtaaactctcaacgaaaggatagattactatcaggcagtgatgtgttaaaaataaatttccacagtgggctggaaattggatttgctgacccttgattttcagatgaatgctaagaagagataatagctgcttttaaatatttttaatggatgacacccttctttttaaatagaactccagtatattgctacctcaagaagtctattttttaaatagaacttaattgcttcttcaatttgggatttggcctttgagatctggggaaaactgactaaacattatttctagcaacctgtgttcgttccttcatttggtattccagtaaaacactttcttatcagttctgtaggatttttgagcccttattgatacagagctccagactgtttggatttgaatagtgtgactttgggcaaggttctattttctcatttgtgaatggggattaattatcatccctacttcacagagatgtaatgaggatttaacacatttacagatgtataggatttcaaatactacctgacacagagagtaaagggctctgagcattttagctgtcacagcattattgttaccaaagagtgagcctttgttgcttgaacaaacttagtgcaaaagcagcctccatcgtcataatctaggaatcttcctgaactcttctggcctatgtcatgtttccctctcagtgtaggtcttctgcccaaggatttccagagccatccctgactgttaaggggaagtattaagacaattcctcgggaaacaccaggggatttcagggtctgcttctcatgagcaacctataggcacttttctttcctgccttgttctctttgcagctgaaacccaccaaggcctcagttctgcccactacaaacactgtacagtgattccttagcttgagagacacagtctatttgatttccttattatgtggccaattcaagtgatacagtggatataacaatggtttgagaggtggaagtcctggtttcttgtcacaagcctcacaggtctcctcttttacctgtacacatagtaaatggtgccattcatgtggttctgctgtttcagtgattaaataggtcctactagaagataatgaccaatggacctttacaccttcagaataagaagtaccattcaacaaccttgttaacacattagtattactccagtgtgaccctcactcacaattgatttttctttcacattcctatactgattctgtgttagttgtatttttatttcagtgtgtttttgttttattcatttatatgtagatatatacttgacattttaatagtactaacatacggttctatgttaaatttcttaaattggctatagcctcgaatttttaacctttgattcagtatcgttccctattttgtgttcttactatgatttattttattatattggactaaaaatagtgaaaaatgttatatcaagatgattttttgttagatattcattcttttaaaatgattacaaataaaaaatatgtaagcctggacaaaggaactctttatacaaagaagtacaaaatatgtagtccatgaataatcttaaatgtaggacatttttggtgtttgactttttgtattttcaaagcttgttcagagaactggacttttctggtaaatattacaaatttaatgacaaattcttgattctttaatattggaagatttggatctatgtagctttattggtaatgaatcagaaagccagaaagattgtgtttttcccccctcatgtattttggtagtgtaatatttctgaaaacttcactcacagacggtcttcatcacagttgccaaggatacttattttaaaacatggattattgggccttaacccagatctactaaactagaatttctgaaaatgagacttgaaatatgtgcactttagacacattccctaggtgatacttatgcacacaaagtgtgagaactactgctctggtagagtcatgggaagggaaattattttgtttttttgagtatttactaataagccaaacactgtacctggtactgattattacaatagatatttttaataatgctatttattcagcacttttcacttcctgtggagaatatttttatttgccaaattatatcaaaattccaaaatctaatactgtatttggttaagagagactcttctcttgaaacataaagaacatgccaaaactacacagtacaccagataaaattctttcatccaaagccttcttgtattagactcaaatccaggttgtaataatgaataacttgacaataaccagattgattttaaatactaacaagggactgataaaacatctgtaactaactaaatataagtaaaaaggtaattcaagttgttttatgctttaatagtgtatatgagtagatgataggactaagtgattacttaaaaatttattttataaataaagtcgtttaagataccatttccttcttgtaaggagcttatcatgtcataggggttttagccctgtcttggcatcataaccacttgtggaaagctttaaaactcagatattttgtactgatcttctggagactctgattcagaggttggggtacatccaggcatttgcttccaacaggaagccaggattgagaaacatcactatatataataacaaaagagtataatgctggcttttaaaatattttcctccaaaatgggccaaaataaaataaatttggcttaagaagagttaacttttacctatttaggaattttctatatacagaatagtttatttctcataatttttaggttggttggaccttaagagatagatgtagagtcatattatccatattgcagagctctcatttaggatagttgtaccatactaacctcatgactgtaattggatggacttaacagttttttttttgtttttgtttttgtttttttcaaaaatagccaacattgcgaaaatgtatagtatggtggcccatccattcaaccaatatttatttgaatctttatatgccaggcactagaattggaccttactggatatgtgctaggcataccatcttagagtttatcattttcatggagacaggttatttaatgagtgttatgaaagaagagactcatctttccttcacatcttaatatatcaaagtttcctgatttaaaaaatcttacctgttgcatggcaataagatatggatgtaatttgggaaaatagggactcagattttttgatggacagactaacagtaaatctcatggttcgttttgttttgttttaggagagaggtatgatcttcataacagacctattatatctcttttctgttttccaatttggggcttgatagtcttttgagaaaagtaatggctcaaactattcctagttctggtttgaattttaagccaacagtagttaaacaaactgtgattttagttttatcgcattattggcctggttttgcaaaatagacttctgacctttctttaatcctccccatccttcaactttgttctgttattttgaaggcttgctgtggctgctgctgctgctgcttgtaataataatcatagcataataactaacatgttatagcattaaaacatctttcggccgggcgctgtggctcacgcctgtaatcccagcactttgggaggccgaggctggcggatcacgaggtcaggagatcgagaccatcctggctaacacggtgaaaccccgtctctactaaaaatacaaaaaattagccgggcgaggtggcgggcgcctgtagtcccagctactccagaggctgaggcaggagaatggcgtgaaccccggggggcggagcctgcagtgagccgagatcgcgccactgcactccaaccagggcgacagcgagactccgtctcaaaaaaaaaaaatctttcaaatacattatgacatttaaaattcactgtaagcccgtaaggtgagtattttcactaagccctattttacaaaagacaacattgaattatggaaaggttgtgtcctttatccaagatcacagagtcaggaaacagcaaagctagctaaaaactacagtcatctgatcccaaggtcacctctgtacccataatgcctggcttcacacacctactatgtcttaaacaaaaacatctcaactattatataaccgtgttgtacttccacgatgcttctcaatgttctttttaaaatctattttgaatatttttgttcataatttaaattccctccaagcttaactaataaaaccttaactactactaaactgccctcctaaattccatgttttaaacttattttgtctcattcaaataagttgtacaaactaacacagccatattctcttttttaacttttaatttcaggggtacatgtgcaggctcgttatataagttaacacatatctcagaggtctggtgtacagattattttgtcacccagataataagcacactactcaataagtagttttttcatcttctcctttctcccaccctctacccccaagtaatccctggtgtctgttgttcccttcattgtatccgtgtgtttttatcatgcagctccaacttttaaatgagaacatgcagcattaggttttctatttctgtgttagtttgctaaagatcatggcctccagctccatccatgttgctgcaaaggacatgatctcattcttttttacagctgcatagtattccatcatattttctttctccattcttcccatgacccttttcgtttaccctcacaatgtctgtggctcaaacaatagtcagaaacttgaaaaatgtcttatttgccattaggatgtctataagggacacaaaaattattcttttaagtgatatacttaatcaccattcctatatgttaacaccaaaacaaatatttcactttcaaataccaacaggaaagaaaaaagaatatatgtgatatattatttctggtactttaaagtcttcaaaaaatgctactccattttaataaaacatgctctttcaactgctttagaaataactcatttgttaaactaaaaaggtttaccaatttaagtcttacatgattgaatgtcattagaagaattttcttggcaccaaaaggaacacttgatggaaatctattgtctttcgtgcttcttgatatgttaggcactcaataatgttgtcacattaattgattttgagattttcagcaatactaggtgtgcgtggtttcttttaaaaaatcattaccaatttactgtttggctagcaaatgtatttgctttgaatttcactctcatcatgtctcacaatgaacgtgctagtgaatagttctgataatttgtttatacattgggagtactttttaaaaatccagtgaagatagagcacggtatttttttttcaggagtttttgtttgtttctttgttttttggtttgtttttaccaaacccagtctgccttaaaacaatattgtcaactcttctctaatataaaactttttttttttaaggtaccaccgtagcactcattattcttgccttgggatttgtgctatcagcccaagtttccccacgcatcacttttaagccaatagctccgtcaggtcagaacgccacttgcacaagatacaggtgagattccattatgttcttcttcctttacatgactctggtaacttttttgcttgcttttaacttttttaaagttgtagagatgagtaggagcttgctgggcatccaggcttatgtaagaagggaagaaaatgggaaaggtggtagagaggggcccctaggaagaggaatagcttgtgcagatgtgtgagtgtaaggaattaaggagagagtgggttgttagacacaatcttggtgatgtttctctggaaattaaaattagggattgatactgaatctaagcaggaattcagaaaagctattttagatcatatacaattcagtcacctctgtgttccaagcaaagtaaataactttaatcagtaatcaaacttttacaagatgcacatgccctctgaatattctgacaatttggactgatttgcatggctatcctcttattcatttaaacagaaggaaagttttccctcagtactgaggctctttcagaggatcaggaagtaaaaagtgatggtgaaagaaaacaaaatgttctaatggctagctgcaggcctaagagctcattaaatctaacagtgtacacactatgtgataaatagatcgaaaagtagataaatggatagatggactgagaacacataaatgaaactttgagtgattggacacatcgattaatatatttggcagcagagcttcaaagttttaaactggactttagccaccataaagtctagcaatccctttaaaacatatagatagaataagacctagccttaacaaaaatgtatattcctttagcttgaaatagatggacgcaagtctcaaatcaatgagtaaatgatttattaactcatacaaccctatatgaaattaaaacattataccctaaactccacttggtattcatttagagcatccagttgagcgtgaatttatggtggctgttcattacaacagtgaggaagatatattggttccaaattgtgatctatgtgcctttggaaaataggcatcatagcacgacttttattttactgataagtttgtttattattggctcactgactttcatagtctttttattgttctaagaagacttaagggtgtcttcatagtagaagttaaccatagcatctttatttggacatctgcctcaattgctagaaatgcatattctacttttctttttcttgatggatattttacttatatgtttttaacacagttactttgaaaaagtattttaaaaattactgtcatttgagaatcatagaatattctccagatctaatgtctgatgtagatgtattgttcagaaatactgttaggtcaactaaagtcagaaaatcacctaaaaattattagaaaaagttctttgaacttctgatataggaaaggaatgactgtaagtttttagtgatttacataatgaaatagttttcctgacattgactttaaagtttaaataaaaatatttattgcccaagtatatctcactgcacagcagtttatgatcatcagtctgttaatccttatgatgtaaggtattatcatctaactcatattttaatattcaattttaatgaggtaagagaagtgatacagcctacctttattcttattacaaaaataagcagccatttgtgaagatagaaccaaattttaggtgtccttcgggagtcagtggatatgaaaaacaattatttattgtatgagtaacatattaggctttgtgggaatttgacagtatgtatttatagtctaagtgattttgtaaaatatggctgcagtccgcttactgggtttttatggttaaaaccatctataatcctctgctctaccagctgagcagtaattgactgtattagttattttaaaataactaaaagagtagaattggaatgttcctaacacaaacaagtgacaattgcttgaggtgatgaatatccccattaccctgatttgatcattacacattgtatacttgtattaaaatatgacatgtaccccataaatatggtccactattatgcatacacaataattaagaataaaaaccatctatatacatttcccctttccttaagacaaacaggaaaagaatcacataataccttaagatgagtgaagttcactttgtaaatgtagatagtatgctttccccatggagtgatccgtataggaaaatttagcaaatgaaacagattttaaaggagaagtagtttaatatcttagtaacatcatattctattctattagtgggagcacaaattgttcttcattttagaaagtgatatggttctgcctaataaaagttaagtgcctatgtccattgactcagcacgtccacttgtagaaatctatagaccacagtgatgagtatgcagttcattcttactagagaagatttaagaaagtaaatggttaaagaacaatgattcttcttgattttaattcaataaatattggttgcataccaggccaaaaatattgtaggttagagctccctaatgacttgagattcaagagatcgacaaccctaaataattttcaatgaggacatctcctttttagaatattttaagtttttgattgataatgtattttccaaggcctgattcaattctctggactgaatgtattaaagaatgtctttcagaacaatgagaacatagggacacaaggaagggaactaactacacacactggcgcctgttagggggcagtggtgggggaagggagagcttttggataaatagctaatgcatgcggggcttaatacctaggtgatgggttgataggtgcagcaaaccaccatggcacatgtttacctatgtaacagacctgcacgtcctgcacatgtatcctggaacttaaaattaaatttaaaaaaaaacaccttttagatctgcttttaatagataaaagtgtgcacaaagataaagacagatgcaagttgctatagaaaatgtttggccacctgtataaaagctgtcatagggtcccagctgcagctagaagaaataacgctagcatgagtatcatctgaatcatatatctttatgagagttcacacacatatttctttttttcacacccataattccaatatgaccttcagttccacactctcaaattactaatgttctattcctttcatttccaattcaaaatattttctcataagagctagccaagatttgaggaatcaaacctttcctatgtacgcttccctcaaatacttgacgtattattatttatggtgtgatctcagtatatgtaaatcactatcataaaacatttaaaagtagacagatatttcctaaagcatacagttgtagaatttcaaggtagccttgccctagggtttttatcttattcacttattatttcttcatgcatctaaatatattatggatcacctaccataggattatagtaaggataaattaacatatggaaaatgccttaaacagtgcttggcacataataagcactcaataaacattacagtcattgttagaattaataaagcctgtaatagaagatgaagttgggatgatggcactcagagaagattaccttgagaatgggatgtttgtactgagctcttaaaagaagagtggagtatgtcacacagaaagaatggcaggtacaaagatcctgcaaggcagtaaggaacgtggcaagtgcaaggaactgaaagaagatgactatggggtcagagaagattcagataagactattaagacagatcagagccaaatcatgtagagcctcagaggtttttgatcttcagtctaagaacgtaaatccatggaagaattttaagcaggggtgtgccttgaccacattttgaattctaaactgtctctgggtgggtgtgggtgccaccaagagcatgtgttcatgtagggagactggttttttacagttgtctatgagagagatgacagttgcctggattatggtggtgacattggagataagcaggtagacagattctcagtgtattaggagagaaaaatcaataggaaatttaaaataaataattaactgtggccataggaggaaggagtctttggttggttctcaatttctgcatgagaaaaaaggtggactaaatcataaaaataagatgcagcaattggaagatgtaagaccatgcgtgcaattttggacatgtggaatctcaggtgtccatgaaccaacatcagctgggatattgaataggtatttgggaaaactggcccgtagttggaggagagttctagaatgaagaattattatccatgcatgataattaagtccatagacatgggcaacatcttgttcacaactaagatctttatcaagactctagctacctttgcaattcataatctatttgtaaaccactagtagtttactaatcaattgggcagtatctctccattcttcaggcttttaatcccagcatagaatcataagctattcatgctggaaggccttaaatgtaacctaattcaagcctttcatcttacacctacacttacatcttacttagtttccttactgaggtccaaataagtcacactcctctcctagggcacacagactaaccacctattctttaggcttctcttgtccccatacagaccttccttttttagctaacacagttctttaggagttattgttaatatgaaaccaacgacacaacagcttctttttctattcctttcaaaccttgctcttcttgctttggaccaaggacatggtttttctgttaagatgacttgtacaattaggtaattcaaggaatttaatgatgcctagcatattacctctttgatacagatcttgctatattttagactctgcttgagtagaaattgacaaaagggactatgcctctagttcattatactttttctttttaatacttctcaattaaggccagacgcaatggctcaggcgtgtaatcccagcactttgggaggccaagtcaggcggatcaccaaggtcagcagtttgagaccagcccggccaacatggtgaaaccccagctctactaaaaatacaaaaaaaaattagccaggtgcggttgtgggtgcctgtaatcccagctactcgggaagctgaggcaggagaatcacttgaacccaggaggtagaggttgcagtgagctgagatggtgccactgcactccagcctgggtgacaagagggagactctgtcttaaaaagcaaacaaacaaaaacttctcaattaagagtcttaaccagggtcatctgcagaggtacttaaagtcacctgttttccctttccagcggtcagcctcaccaggacagtggcatgttgttttgaaatgctccccaggtgatgccagtacatcttccattaagaaccactgccataatgctatcacttttttttttttttttttcagaaaaaaaaaaaaaactgccagctttctttctttttctttttttttggtttttgttttgttttgttttttgcttcttgaacattgttaaaccaagcataagaatatgatcaatgtggttctttttctgtatagtgatagtttcacattttcctcttcagatgaagttccccaaaatccaaattgacaaactgtggcttcatctgtagatggtggtgacactggttttgtgaaacagtatgcccctcataaattagtcccttcaaagttcatttccaataaaaattcattttgtattcactacactgccttttcttctccttttgccagccttgtgttatttaacaaacgcatcattaacatgagcactgtaagactgtcagattcgatcataaaacttttatgcaaccttagaaatgtgtaaaaacggtcgggcacggtgcgtcacacctgtaatcccagcactttgggaggccaaagcgggtggatcatgaggtcaggagttcgagaccagtctggccaacatagtgaaattccatctctaccaaaaatacaaaaaattagccaagtgtggtggcaggctcctataatcccagctactcgggaggctgaggcaggagaatcgcttgaacctgggaggcggaggttgcagtgagccgagatcgtgccattgcactccagcccaggcaatagtgcaagactccatctcaaacaaacaaacaaaaagaaatgtgtaaaaaccctattagcccctcttttttccccagtatttgacatcctggtaatagtgtgtttagcatcagtaattcatagcatcttgacagtgaatataatattatgctgtgaattgaaacaactttccatttgtgttaaacatttttttttcttactaatttcctataaaatgaatctgtttcaatttttttggcatggtggcacaagctaatataccatgaggttactattaataatgctacagtagaaaacaatgttgtatgtgttactaatatctacagacccattggagataaagataaatgtacataagtcaattaaaaaggaaaatgaaagttggaacaaaaagtccacataaatctcatcctgtgaccttattgccaaataactgcacatatcttttgctaacacttaaataaatacccagtgtgctgaatttgacacctggagaggattctgtccacctgtcatggaaggatacaagagcttcttggaggaagtttgccatttatgggacatattctttgagttcgccataactttttaattttgatgcctaggcttttagccacagacttacaaatcccccacttggcaagacttgctacccaaaccttggttttttgttttgttttgttttcctatagtcaaaaaatgcttcttgggaagccagaaagacaagaaggaggactcaagattaggtttgcaaagatgaaggaaaagcatttcagggagagggaatatcagggaatgtgtacaggtcctaagcagggagtatggcttcttcaaagaattgaccaacaagactgggtcataacgagcaagcaagagaatggcaccaaaataaactggatagcaggccaatgacagaacatctcaggaccttatacaccaggagaattttggacattatcttagaatactgagaagccttcaaagggtaataggatgagaatgacattatcagatttgtgtttttaaaagatcagtctggctgcagagtggaaaattgattacagacagacaaatggtgatgaagggagaaaggttaaaagaacttagtagcctaggcaagaaataacgcaaccttgatggtgacagtggatatagagaaacgagatattttggaggggaatggcaaggctgggtgattagctggataatagatgaaaataaatgctttagaaactggaaaatacttagggcaagaggaatataggatccgaaacctcactgtggtctacttagcaacataattttaggcatgtaaatctggagaccctttcctttgctctcaagttaaatacaacagtcacataatgagcacagtacttagtattttctgtaatttatatccttatttgaaaggtaattttcattccttcttgaacttaaaagacttctgagaaaggtgtttctgaggttgtccatttaggtctgaaataacagaacaagataaagggggaaaaacatgtatctctgataatccatgggacttatattcttattctagaactcttcattgcagtgaacacatgaaaccaacttggagttttattcctgtttcaagtaaatccacttaaaatagcatctgcataaacaaatgaaataaactatccaggactgtgacagcaattgactggaatcagcgtctggtgtattttcttataataaagaccaagaaaaccttacagaaaatataaatatgaaacaaggcccctaaaaaacttaactattctttaattaagtttgtatgaaacgaaaacaattcagctattaacacttaaaacactctggtatgttaagttggagtatttcccatcatgttgtaaaagcacgttacataaccttgctacgtgttccttgtctgaatagtaggaaaatacctattgctatggaccaaatgtggtttatttaaaaacaaagcataggggctgggcgcagtggctcatgcctgtaatcccagcactttgggaggccgaggtgggcaaatcacgaggtcaagagatcgagaccatcctggccaacacggtgaaaccccatctctactaaaaatacaaaaattagctgggcatggtggcatgcgcctgtagtcccagctactagggaggctgaggcaggagaaacgcttgagcccgggaggcagaggttacagtgagccgagatcacgccactgcacaccagcctggcgacagagtgagactccgtctcaaaaaataaaataaaataaataaaataaagcatagcaaagaggttaaaagaacctcttcagtgaaagtaacttggaaaactatgattttgattggctgggtgtttgggtggatggatggatggatgaatggatggatggatggatggatgcatggatagatggatgaagggttgctattgataagagaaggtagatggtgctgactaaaggaagtttttttagtataattttcatcctggaacttaggtatatgtggcaaaatttggcaacaccttgttgctatccaagagttggtgatttaggaagcatccaagcctttgtttcttcaaagtttacttctactcatggctacagcatgattagcaataccttctatgggcatgctagtagacccagcagttcaagcctgcaggtctctgggcataaaacaggtcacatagtgtttaggccatccctcagtgactcttttagattgttgtgtggtgctaataagatagtgttttcctaatattagtaagtaaataaataccaaaaaatataggtcacatgtctcttcaactgtaacatccagattgtatattgattaaattagaagactagaacaatgaaataatgtatcctgaacaacctggttttagtagctgaaagtctgcaattgtgtaagttctatacagcttaggaaatcgaagaatatagtactttagaaaaaacatttatgcacatttgtagttaattattttaataaacatttttgaaagttgcagtaggctggggtattgagatttaaaaacaaacaaacaacaacaaaaaaaacagccttcctcctcatggagctcacagctatgagggagaaaaatgcagatacgtaattgcaaaacagtgtaatgaaggctgatagatgtatcagagcatgacctggcataattcatttccccagggccatgacagaaggcttcctacatgagagtccttaaaattctcattattttggatccttttatagtgttctttaactgcataaaataaattttataaaagtacaaagcaactcaattatattgaaatacaggtgccagaatacttttaaaaataaacttgttatataaaagtacaaggcaaatcaattatattgaaatacagttgccagaatactttaaaaaataaagttattaaatagtaatgtatgtacttctttattaacacattaagtaacaaatatagccgcaagtctaataccatagtttcaacaccatagtgaatgtaaatggtatttggagatttctgcaactaccttaatgggatatgaaaatatgtgacttctgttgttgccagtagtttactgcctaccttcctaactgaaggaaatgctaaatttcagtaaaaggttaatgaaatagagatgtaattttcttttcatccaagtttacaggccccatattaaggacccgtcacagaggagggagcttgatctgatttttcaatggtgagttggagtttctcagaccaatgaaaatggagaagccacccaggcatgacagcgaactgtgcaaaagcggaaaacagatttgcccttcaagaaaattataaagcttgatactgctggagaaagggccaccaggcacaggatgatgcagaaggagaggaaaggccttggatactaggtcaaggcttgagtgaggaagggaagccagtcaacagcatcaagcaaggagggtaccatgatcaaagctgagctttacaaagagttttctgtgtgagttttgggatatagattggagggagaagagtctggcagccccagagagagattgtgagagtctgagattatctcatgatggtaagcatgaagacaaagctatttttggaaatattacaaataaatgttaaaggcaaagtatgagggaaaaggcgtttgggcaggcagttcaattttatgaatactcagtgccgattatgtggccccagccaatatacctagcaggatggagggggcataattctaagcaggctttttattttaaaataataatagtttctgttaactaagctcttacaatattcaagtattattcatattctttttgaatattacctattacccttaaactttcctgaggaagatactgttattattattattattatccaattttacagataagaaaactaaggatcagacggattatatcatttgcctaaagtgatgtaactggtatgttgcagagccattttgttctgtccacctgcctcccttagtcaagctaatggcctttatttttttttttgcttatgtcaatactatccaaagcctgtgaatattgtaggaaatgctaagtatcagttacccaagaagcaaagagaagagttttaagcccctcatattgaagggctaggtatttaaacactaggattttattttaacaaaatactgccctgaaaatcaagtaccaaatgatgaaaatcactaaaacaagagtttttaatgaaattttaccctcactacacatgccatttaattgaactaacataaaactctttcagaggtatttagtggccaaagttccttatgtaacataaatgaaattctgggttgctgcacagattcctaaacagatatagattatgggattattttctttaaatttacttctgatcacttcaccttctcagcaacccagatactggcaaagtggaagatagcttgatgaaacaccaggctgtagcagtctgactaaagcttttacagatttctaggaaaattacttaacaaaaaaaaaaagaaagaaagaaaaggaaggaaggaaggaagaaaggaaggaaaaagagaaagaaagaaagaaaagaaaagaaaggagaaaaaaatgttgcccagcttagaagtgagaggactaggtttccaaatccctgctttaagaccttgtcacaattaggagcaattccctttttttctcccaggcttatttttgattttttttttaaagagtgttagaattttggggaccctgagaaatctgtcataaagatagtatatcataaccactgttatctttccaaagtattgccaaacagcacttagatcacccacagtggttcagccttctgctagtaagatgagatgcctttattttccacaaaggatatcaagccctgaaccccacccagagagcaaagaagacacagaggtagttgcttgcaagtcaacaccattctttgtgagcgtaactaggcaatggctttgttactggtggaggatcttgaatatgagttgtccaggttcttggcgttttgagcaaagaattggacaaaacatacaaacaaagcaatgaaggaatgaaacaacaaaagcacagatttactgaaacaaaagtaaactccacagaatgggagcagactcaagcaagcgactcaagagcattggttacagaattttctgggtttaaatactctctagaggtttcccattggctatttagtttacaccctatgtgaatgaaggagtggcccacaaccagtctaattcgtctcggaaggctaccaatcagaggctgatgttacaaagttataccgctatgcaaatgaagacgaggtcacaaccaatctgattggtttcaggagaggaccaatcagaggtactttccatttttcatctgcaatgcagaaagggtggaggttacaaagggagtagcctctgatccttttgttccttgagcgtggaaagttggggttttccttttgatttagttctagaagtcagcatgaatcagccttaggttccctgcctccagaccctattcttcttcttcacctagatattctaaccttttgttaccttccaagaaaaaatgattggtactagcaatgggcagccacaggtttgttatcttctgtgagtcatgatcaatgaacaagtcctctttattctctaagcaatgctaaaacactaagcaaaccagtaatttcttgacagatttgtcacaggaattttgtaagcactttacatttgttacactgtagaaagtacatgtggattttagtcttacaactgattacagtcataatttgtgtggcagtgtttagacaactttaggcccataaagggaaatctgaccagcatttctcagaacaataccagagacgggtccatctttatttctcccttatggactcagtttgaaaacacggattcatgtgactggatgtctgatcaagatgctgttatttaccatgctagttattttatacaaacctcataacaagcagtattagataattagaaatcactttatgcatcttaaccttacccagcctcacacacacctgtgttttagtcctttctaaaccacaaatcccctgcaactgaaaatgattccataacattttccaacattgcattgttctgtgatgatagggtataaaagatatataagacattgttcccatcctcagagaagtttcagtttgtacaaaagaaatacacacaattgcctattatttatattttagcacaagggaaaataatctcatttttaaaaattcttgacacagggaaatagatggaaaataaattttgaaaacttatttttaaaccatgtaggagtacttaatttgcagtgatcaatgactcaaagctcagcatgtcttaaatattccatattgctaagcagctgataatacaaatccatccttcattccgctgcttttctcttgatgtatctagcataattggtgttttcctatgtgtgtatctgaattgcatatttcacagttactgtagaaacctattactccttggcatttagcatggatgataatgttgctccttcagtaattttagcctagaccaaacatttttgaaatggtgttgtacattagggccatcttgcttatagattaataaaatcactaacctttacactaaaaaaagtgcactgctcatttttaataattatcaatatataaagttattgtcagttaagagtcagaatgcattttttaattctcattcttccttttgtttttcttcagcctaatatgatttttatgtcataaatccattctcattagtcttcacaaacagaaaagttatttcataagaagaactgagtagcgtttttctaatttgtccattttggaaacaaatgaaatatttattttaactgattagtgtttctataaacatttaactttggctggacacggtgactcatgcctgtaatctcagcactttgtgaggccaaggcaggtggatcatctgaggtcgggagttcgagaccagcctggccaacatagtgaaaccccatctctactaaagatacaaaaattagctggatgtggtggcgcacacctgtaatcccagctactcaggaggctgaggcaagagaattgcttgaacccaggaggtagaggttgcagtgagctgaaatcgcaccactgcactgcagcctaggcaacaaagcaagactccatctcaaaaaaaaaaaaaaattaactttgtggggcctaaatattcagctcttcctgatatttcatttttatcattgtaaaatggatacattattatggcgatagatatcttcacaaaaattccgtgtgatataataaacatttgaaattgaatatagttattcacttcctaaaacaacaaatcttggcctgtgtaatcaaatttggcaagaatatattatcatccttattcatatatgttttacaattatgtgttgtgctatagctaaacacataagtaaatatcaataaatgaatgtgtaaatttttggcaattaccgtatactaatgttggcacagatacaattattgttaactttattttcatgttcatataacttaagtgtgtatgttttggcttgctatatatgactagagtaaaattcagaaacctaagcatcctaagttagtattattgcttgttatagctggaatttcagtgtatactaaagtgatcttcttttcttatgcaaactaacaatgagtgccatggctcagttcaactgcagagcaattacaagaggagttaatgctatactttctttatatttatctttttaatatccggaggctgccttattttacttaatacctagattgttgaaaaatatatcaatacaatagaaaaactcataatttttaaaactcactcatctaattatgcattaaagtactaactccttttcggttccagtagctacttatggacaaatccactgactcctttattattgtggaaggcttcccaaggctgaggagaaaggagttggttggagtcaagcaggccaaagcagggaacatgacattgcagaaagagggatagcatgtgtgcagaagaaagagagagcttaactacaatttgagttgccttttcaagaaaaatgaggaaagacacagaatccatagattttaaaccataggattaaagtaaaattatatacactaataacaaaaacagaagaagaaacaatattaccctgaaagagtattttaaaaaacaacaacagagctttgaaatctcaccagaaaaaaaagaagggagtagccatataatgcaaaaagtaaggtaggatttttatgaccttgaaatattaaagccttaaaagacagagacaacaaattgaacaaatactagaaaaggctaagaaatctacacataaatgaaactcaaataaacatgaatctatgagattccaagagagacaaacttggtaattatcctgtcagagagaaattggagcaacagaaattgtagcactaaacaaagaagcttaactgctcagttactctataaggaagagtcacaaaggaacaatttaccacctcagtcagagaagcactgagttaagatagaggcagtcatgagcacctcaataaacagcctcacaaagcaaaacaaccttgacaagctagaaaagtcatcatccttgacattactgagcttctgtctcacaaataagaggcaggggtcagccattcttcagtgggtgagattaatgggatgaagcattaactctgagacttttaggtcacctttcatgctgtccaagtaacttggaggaaccagtgtgctcgctaaatgctgcattcaccaatgcacattgagtcactgggagaatcagcattaccaatttgcaatcatatatatacagatactgttagggactctttcccacttgtttttctttttttgaatttttttttaaatctttattttaggttttgtggtacatgtgaaggtttgttatatagacaaacatgtcacaggggcttgttgtacatattattacatctcccaggtattaagctcagtacccaatagttatcttttttgttcctctccctcctcccaccctccctgctcaagtagaccccagtgtctgttgtttccttctttgtgttcataagttcttatcatttagctcccacttataagtgagaccatgtggtatttggttttctgttcctgtgttagtttgctaaggatgatagcctccagctccatccatgttcctgcaaaagatgtgatctcgtccttttttatggatgcataatattccctggtgtatatgtaccacattttctttatccagtctttcattgaagggcatttatgttgagtccatgtctttgctattgtggatagtggtacaatgaacattcccatgcatgtgtctttatggtagaatgctttacattcctctgcatatatacctagaaatgggagctgggtcaaatggtagttctgcttttagctctttgaggaattgccatactgctttccacaatgggtgaattagtttacactcctaccaacagtatattagcattcccttttctccacaacctcaccagcatctgttattttttaactttttaataatagccattctgactggtgtgagatggtttctcattgtggttttgatttgcatttctctaatgattagtgatatggaatttttttcatatgctccttggctgcacgtatgtcatcttttgagaggtgtctgttcatgtcctttgtccactttttaatggggttgtttttcttttgtaaatttgctaagttccttataaatgctggatattagacctttgtcagatgcatagtttgtaaatgttttttcacattctgtaggttgtctgtttactctgttgatagtttcttttgctgtgtgcaagcttttaggtttaattagatcccacttgtcaatttttgtttttgttgcaattggttttggtatctttgtcatgaaatctttacctgttcttaggtccaggatggtattgcctaggttgtcttccagggttttcagagctttgactttcccacttttcattctttcatttggcacacattactgaatgctaaccatgcaccaggtactgcatttgtgccaggtgttaaggaaacaaagcatgagatatagcctctcatcagaagtaggaaatatcttaggtttttatttacattttgaacccgtacacaagtatatatttagagagatgttggagacttgggtagacttgctttttcagaatatattcaaaaataagccaaaatattttttaagcatttgaaaaaaatacttgtaccacttggaatcatggtaggctgtatattacagaagaacccaaaataacagtggcttaagcaaggaagaagtctttctctctctctgtcatgtgaaataaactcaagggtaaggagttggggaccaatgtgctacatctagtatcatcaggcatccaggctcctatccttttactgtacccatacaaatgtctttcataagttcaccacatgggccagggtggctgcaggagttctaccagcatagcattcctgtgaagcaagccagaaggaaaggcagaaagagcagctcttcccagctgaatcagctccctttgaagtcttcctgaaatcccatgcaatacttctcattggacagaattaatcccttggccatatctagttgtaatgtgaactgggaaatgtattcttttgtctagcagtcgggaggagggaggtggagccacaatgtgcccagttaggaatcacatttctcttaaaaaggaggagggaagaatgaatgtagggataggccactagcaatctttgctacaacagtacagctaggggatatgttaattttatgagacatttatgagtggttctgcttgacagcaggaagtacaaatcaatggaccaaatagggattcacctactttcacgatttagttctctctgtgctcattagaagtctaaagtcaactttgcaggtgacaagaaatgtggttgtcttaaatatttaactctagctttgcaaagtaaaaggaatcattaatatctctttcatttgtcctgtttccttggcctttgaaaccagtgaaacagctaccttttgttgtgtttgttcaaaatgagtgatctgaacaaatgagtgatttccttatcttttcaaaaagaatggtcacagtatctgccatttattatatagttaacattgtgtggatcactttactaagagctttgcatggattctcttttatccttcagaaagactgagatagatgctattattttccccattttaccagtgacactgaggcttaaacaaattaagtgaggctgggcattgtggctcatgcctataatcccagcattttaggaggccgaggccagtggatcttttgagcctaggagttcaagagcagcctgggcaacgtggcaaaatcccatttctccaaaaatacaaaaaattagccacacatgttggtatgtgcctgtagactcagctactcaggaggctgaggcaggaggaacacttgagcctggaaggcagaagttgaagtaacctgagattgcaccactgcacccaccctgggtgacagagtgagatgctgtctaaaaataaaaatgaagaagttaagtgaattttagaagatcatatggtttagcggacagcagaaccatgctttaactgagaaagatctttctctagaattcagcccttaaccactaccctcttcattttgaaatttaccaattaaaatgtgatgctcctattgtccaagggagggtgtaatgtaccctttgggagtggacagtaattccttatggtcaaaggtgaataatacctataaaatacctatgttgatatactttaaagtattcaccaccttggtttttctagagcagaacaatgatcttatctatatggttctgaatgtgagcatagttgaatattctaagatgaattgttgattttattttgttttgtttgggcaattgtttttaaggcctctgttacacaggtagatgaacatgagaaaaatcattgaagacaagaagcaaatacagatgagcacttacaaagtaataccctttaggcaaattggagtatatctgtacaatcatatgagaaaatgaagtccattttgaaagctgttcttttctaagcctcctcctttagttagtgagatgaattatccatgtgaacctgaattttccttgaagaaaaggaccactgtgtgctaacattggtattttgacccaccccaacaccacttccctaattcctattggtttcattcaccttgatttaattttatgaaattttgtcagtacagtagggtctagttgtgagagcaaatgattacacagagttgctggcatcagaggacatgatgctatctagggggatgccttcaagctatctcatttcgtctgtgtcacacaacacaacttccaaccaaatgtcattctggggctccaggggctgattgtttctttcacccttcagtaaaaactcactttgtcctccacattcacacatatagtttttcatgaaaatcagaaaaccttctaaccaactatgcaagaactgagaaggaaagcactgtaagttaaaatgtgtttcttcctttgattatgttgtccctgtttgaaacacttataatatgataagcctaatgccaagtgttatagtgtttgacaaaaaatgtaaaacagatttggttaccaaggttctttcttggtgcataggaagatacttgggtaacagatacagaatcattaattactgaagcaaaatagcacaaatgggtcccaaaaagagagtcaattttaagaagtatttcctcagatgcagaaaaaatatagagtgctcactttaaaataacctaacctatattttatatcaacataaagaaaatatattaaaggcaacgtgactgcccatcacaaagaatgcagatactagatattcaaatttcaagttgtgataccccaaacagtaaaaagtaattagttttggataaaagttcttatttctaaatttataacttataaattatttttaactttatcaagtggtcactttaatttttctttttattttaaaagtcatgaatttccattagtccatattaaaaactgcatagtctcttaaattcaattgatctaaaaatgagtatttctaaagcgtattctgttggagacagaatccttgtaatatttcaagcaaaaattaactacttaagaaactaagtaaatttttctttctttaggtatttctttatctttattttaatttgtcagatgagggaagaatataatttccaaaatccatgaaaagctcagactgagttgagtagagaccccacttgcttctttcagtccacttgaagtagcattgaaagctgagtgtatgactataaatccagttgtgtttaaatgagtttgatcttcatggatactaaatacaaaacactttagtcacagatacctcactttcttgattaattatttatattttatatgttatgaatgctttcttttctaaaaagaacactgagttgcttttgaacttttattttcgaactctgaaaagtttatactaaaaattagggaatatttatgggtatgctactaggtatggaaggatatttatgagcctcttagtataagaactttatcgttacattttaaaatagtacaattctaattaaagaatatgtacctcagtgcagtgcttacattaaactttgactccatagctgttactatgaccctaaactgtgaagttaaaggactgtctatctaccctatgccttgaaatttttaaaagttctcaataagtagaaaagctagtgttaggagtactatttagaaatcagcacctgttatcaggtaacacaactagttaactatattggaaggaggcatgtgtgttgcacagctttttagggacacatcaatgtttatacaaatatgaagagagaaagtaaggcttatgtaaaggagttttcagacagtaatgatgagccccaagcaaaactgtgttcttaccttatttttatttatcctttttggtaaagctctatgacctacgtgtggagtgtgtcaccaatataatgatcagtttgtaatgctttggggggaaaaaagcatactgataacttaagacatgtgccagtaatcatatactatagctcagaaccaggatgatatagaaataagttgagctggtatagcagccaggataggataggcattactaatattaaaaaacaataacaaaatctttgtggtttaaagcaacaaacaactctgcttatatctcagatatccaaagtaatagagcctccaccattctgggatgccacctctcacttcaaggcttcaagatttatcacagaggtgaagcatagagctggagagttgagcactagcaataaatgctttggcctacaactattatttcatactctcattgtatggccacatctagtcacttggctacccctaacttcatataaggaattgtattataattctctatctaccttgaaatggagggcaagtagatattggtgaacattatttatatctttcacaatgtatttgctgatttatttggggccaagattccctattattctttctgcaaaaggccatataaaattttcattctgctggctggatcactactgtaagaagtattaatgacagataggcttgtcttagaaaacatcttctcctttggtgatgcccattaaaaatgataaaattcttcaattaacaatttctagcactgatttggaaaacctgactcattctgtaccagtatcattggtcaaagatcaagtacgaaaaagtgtgcacaaacgagtctgtcagtttttcagaaagttaatataaatatcatatgtatagttatatgacccagcaattccacccttgggcatatacccaagagaactgaaagcacgtatctactcaaaatcttctacacaaatgttcatagcaacagttttttttataaaacagcgaaaaaacgtagaaataacccaaataccccatcagctgacaaatagatacatgaagtgtgatatatcctacagtggaatattgtataactgtaaaaaacatgaactactgacaaatgctataatatggctgaaccacaaaaacatgctgggtgaaagaggccagaaacaacagagcacattgtataattacattgatataaaatgtccagaatagcaaatccatagagacaaagagtagattcgtggttgccagggggtgatgaaaagtgggaattgggaagtaaaggatttattcttgagcaatgaaaatgttccggaattggatagtggtgatgcttgtagaactctgaattattgaaatttactaaactgcaagctttaacattgttaaaatggtaaattttatatgaattttatctcagtaaaaaatttttaaaaatatgtgctatagtgagtgatcaccacttttccacgtagaactttctgcctccattttactggggagtgtaaccattgcctcctactgtatcttcacaagacaatacaagtttccaaatctatcagagtgtcacatgttagtcactatgctgatcagttttctcaatggcataactttacatttcaacaaactaaaggctgagtagaaaaaatatctgatttgaagtcagagaacctttattagagacatgagcaagtctcttagctttccaagctttgttttcttcatctgtgaaacaggaatgctcctgcatacttcaccaggataccggaaaagaccagatggtacaatatatgttaaagtactttctgtatttctaatctggtcttctacttttagttttagcttattttctttatattgttcagcctgctttcctttaaataaacttcctgtaaaaatctgaacattggaagtcaacatccttaggttggaaccccagctctgccacatttcagttatgtgaccttgcttaggtagttgaacctctgtaaatctgaggtttttctgtaaaaagggaaataaaaagcctccctcatgatgccaatgtaagaattaaatgagaacatgtaattatttagtatagcctctttgcatggtaaactgtctgtgatattagcacaataaggctcatgataaaattcaccctcaaaaatcttcatagctacaaatactagtcgacttacttggtctgtttgcaaacctaagaatttcagtctcttaagtattccttctaatttttctattctgtctcttcaataatgaataatgtatattgtcaccagagaagattagttactgtttttttctctgaaaaaagcatgttgcacactaattagattatatttgtatgtgttgattatatacaaattatatgcaaatctgattttactctgaaaagtatcaagactgaaaaagttatttatacatgtatgtatatatattatgcacacatttatttacctatatacacatatgtatatgtatatagatatacatttatatacatgttatcttacacatgcaaaattacaattgaggtttttaactatgttgatcaaacattcattcagtgtaacagaaaaacacttaacccccactggagttgacagatttggcaaatacagctctctttttcttccttctccattagagagttcattggtgcattttgttcagatgaaatgcaagaaccaacccaataattcattaaaaggattagacaatcagttgctagaaattccggcctaaaataccaatatatgttaaatcgcaaaagcaaagaaaaaccattctggctactaggctaaattgctgcctttaacagtgctagagccaaatgctcaatctgggcaggagcctggttgcttttaaacagtagacctcactactataaaattttttgcatctaactcaggagtcagttgaatcttagcctcaacgtgtaaggggaagaggtgagaaatatgactcttttacagagttccagatggtcatgtatggatttggtctgagagccgtgaattgtaaggaacaattcatggtgtgattcaagcttcaatcttgttatcttcatggactgaaatggagaacgaggtgtctgatggaactacagagaaagggaactaccaaatcttctatcaatataagtgacattcattcatctcattacttactcaacaggtatttattgagcacttatgtatcaggcaacatggaaatctctaggaataaaagctgtacagggtcttgagaaggtcacaatgcagtaagggaaagcaaacacagcatgaagctgttaagaaatcatggaatgcatgataataatatgagcgttttgtgatactctgacagtatagtgatgcctctgattctgctggggtcaggaagttgcatagaggaacatgagtcttgaagcaaaggaagtataggaaagataaggtggaaagtaacatccagagaaaacaatatgaggaaaagcatgagagcatgtcatattctaaatcctgcagtctctttggactggctagcacccacggcacctatggagaaatggcaagtagagacaggcaagatgggcaggggctaaatgatgccataaaaggagtatgattttcatcctataggcaatgggaagctctttaggatttaaaaagcagagaaatctgatcaggttagatttgaggcagtgtagagagtggagtggacagagtctagaagcaggcccctttagaagactattggaagagcccagctgagagatggctgggataagaatggagagtacaaggctgggcgtggtggctggccaacatggtgaaaccccaactctactaataatacaaaaattagccaggcatggttgcacgtgcctgtaatcccagctactcaggaagctgaggcaggaaaatcgcttaaacccaggaggcggaggttgcagtgagccaagatcacaccattgcactccagcctgggtgacagagtgagactctgtctcaaaaacaaaacaaaacaaaaaaaaagaatggagagtacaggaactatacatgcttgagacatagaattgatagaactggtagctatttaaatatgaatgttctgcaatcatgctcaggtttttagattgggagacacaaaaggaacaataggtttggcaagaaagccaaagattgagctttaggttgttgagtttgagacacttggaaaacatccagataactgggcaattggaagtgtagttctggcacttagagaagagaaacaaaggaaagaaagaggtcatgggggctcagtgtattggttatagcaatggtcatgtaaagttgatatttcccagcaaagcaatgaaagtagatggcccagaacagaagcaaaggagaaagaaaagatgaagatgccactatctgagaggtgggagaaacaaagggaatagtgtcaagcagcacaagggatgagaacattgtaggaaagagggaaaatttttagaaaatcttatcaccaaatgataatagtatgttggaaaagtgctccgagttacccatgagacaaccaccagcaatctctgggagagcagctttaatagagtggagaggataatttgcttcatgaaattagtaccagtaggcccctagccttttaaacttgtttccaactatttactcacgtgtctaagatttttttttattctcatgagtttcctacttacatggttaaacagggagaggaaatcaaccgacatctatgctctggcagggaaagaaggcaggtgttccagagttgttttcagtactgatataggaatctgtccttcacgaggctccaagcaaggcatggagtcgctgtcccgactggtagtggcggtgttctctggtaaaccagattccaagtcacctgctgaagctggtgagagcagtgaggaaggggatagtagagtatggaagtttgggaatagctgttaggggaaagagagtgacattattgcacaaaataggtgtcaattcatgcataaagaaggagtgagtgagcacaattacctgcagaaaatgaaattggacctgtggccatggatcattcctacatctgtgtttgccaccattgattttctgaaatttagggcattctagagacaggcattttaagatcaaacactgttcttagtgctccatctcattgagtttaatgagacatacttaaaaacaaatggaccgttttgcagagggctgagttcacacccagcttcacagagtagaaactaaaaatgttctaaattaactcaaatcaatttttaaaagattttctgagctgagagcacatttggccaagaccctgggtgccacgtgaaacatataaacgattgattgaatgaaaataggccatcctttctcttccttagacactaagcagccttttgtcctgctcttttttactttaattggaagcatttttaggttttagagccagttttgttctaaatatatgaatacttacttttcccctttctgaaaagtcagagattttctccctttcttttttttttttttaatttatttttttttattatactttaagttttagggtacatgtgcacattgtgcaggttagttacatatgtatacatgtgccatgctggtgcgctgcacccactaactcgtcatctagcattaggtatatctcccaatgctatccctcccccctccccccaccccaccacagtccccagagtgtgatattccccttcctgtgtccatgtgatctcattgttcagttcccacctacgagtgagaatatgcggtgtttggttttttgatcttgcgacagtttactgagaatgatgatttccaatttcatccatgtccctacaaaggacatgaactcatccttttttatggctgcgtagtattccatggtgtatatgtgccacattttcttaatccagtctatgattgttggacatttgggttggttccaagtctttgctattgtgaataatgccacaataaatatatgtgtgcatgtgtctttatagcagcatgatttatagtcatttgggtatatacccagtaatgggatggctgggtcaaatggtatttctagttctagatccctgaggaatcgccacactgacttccacaatggttgaactagtttacagtcccaccaacagtgtaaaagtgtttctatttctccacatcctctccagcacctgttgtttcctgactttttaatgattgccattctaactggtgtgagatggtatctcagagtggttttgatttgcatttctctgatggccagtgatgatgagcattttttcatgtgttttttggttgtataaatgtcttcttttgagaagtgtctgttcatgtccttcgcccactttttgatggggttgtttgtttttttcttgtaaatttgttggagttcattgtagattctggatattagccctttgtcagatgagtaggttgtgaaaattttctcccattttgtaggttgcctgttcactctgatggtagtttcttttgctgtgcagaagctctttagtttaattagatcccatttgtcaattttgtcttttgttgccattgcttttggtgttttggacatgaagtccttgcccatgcctatgtcctgaatggtaatgcctaggttttcttctagggtttttatggttttaggtctaacgtttaagtctttaatccatcttgaattgatttttgtataaggtgtaaggaagggatccagtttcagcttcctacatatggctagccagttttcccagcaccatttattaaatagggaatcctttccccattgcttgtttttctcagctttctcaaagatcagatagttgtaggtatgtggcattatttctgagggctctgttctgttccattgatctatatctctgttttggtaccagtaccatgctgttttggttactgtagccttgtagtatagtttgaagtcaggtagtgtgatgcctccagctttgttcttttggcttaggattgacttggcgatgcgggctcttttttggttccatatgaactttaaagtagttttttccaattctgtgaagaaagtcattggtagcttgatggggatggcattgaatctgtaaattaccttgggcagtatggccattttcacgatattgattcttcctacccatgagcatggaatgttcttccatttgtttgtatcctcttttatttccttgagcagtggtttgtagttctccttgaagaggtgcttcacatcccttgtaagttggattcctaggtattttattctctttgaagcaattgtgaatgggagttcactcatgatttggctctctgtttgtctgttgttggtgtataagaatgcttgtgatttttgtacattgattttgtatcctgagactttgctgaagttgcttatcagcttaaggagattttgggctgagacaatggggttttctagatatacaatcatatcgtctgcaaacagggacaatttgacttcctcttttcctaattgaataccctttatttccttctcctgcctaattgccctggccagaacttccaacactatgttgaataggagtggtgagagagggcatccctgtcttatgccgattttctccctttctgaaaagaaaggctagagattgaaaagttaaatatttcttctctgcagctagtaagaaaagaaccatttggttctaactgtacttgcctggactctaatttcctctatttgagtttctaatatatctgcattcagttcccccagcactcacatcccacagtagaggagcatcattggctattgtctaatttccccaagggaaaggtgtctacaattgagaaaaatagtctgaattccaggcacacttatttactacaaactctctaaatattgtaatgtccttttactatgaaattttgcaggctgtgatttcaaagagagctctttctttctctggcttttctgtgtgggcctcaacgaaactggcccttgctgctgttgttgctttctgaaagtgagttatcaaaattactaaccaattccattttgggtgttaatcaaatatttgtggctttcaccacgtggcaatttaaaaaccaggctcagcttaaaataccctttgacaattggttttgccttctttttatttcattctgaaaatgactaatatatttacgtcaattcatctaccccctaaaattattttccataaaccaagtacaaactagcatatgaacctacaagaatgccttgatttctagagctgttgtgcattggttaattcaataaatatatattggtgatccaccctgcagggggctgcatgctgttctacagatacagagttggtaagcatggccttatcccttgggtgctcagaatctattttgcttaccagtcagtaaagagcattgtatgttacaatgagggccatctccatcagctttactaaatgtggattagcctgaaatttaaactgtgtatcaataaggagaactccattttatttaattcattccgcaattccttttataaagcatagtccttatgtaaatatcttcatattcatttctcttataaatgtaaagtttcttaatgtagagcatacctataatttctgcccttgaaattagtatgtaagagtaaatgtttgtgagaagttgcagcattctaataggtttttacactgttaaggtttgtgtgaatttagggttagatcataggtatttctgtctttttctttcatgtacaatcttagaactgggtggattgttagacaatgtgtgctcttgagatagaaaactttgaagtctagaatttagaccttagtccaggtcacactgtggaaggggacaaataggcctaatatctgcttttcaccaaaatagaccaaaagaaaagattttagtctatgcttagagtattcttatgagcattgactttgtgccaatgtatttaaattctcagtttttatatttagaaaaccttaccgaaattcatcaggccacgttcaagaaaggcttaaagagcaaatcttgagtgaaaaatgtaatagccattcctagaagttgttcctttttaaaaatgccattgttaaagctgtcgttataatacatgctctctgtaaaaggtcaattagcagattccccaggatatttaaagttttgtgccaccttctaaatgtcaagttgaagttgggaatcttgtaatatttggaagaattttgccataaaatagtctatatgatgaaaaaacaattccaggtcaaggatgaaagagtggtaggaaatcttgtctttcctccagaagacagaggcagataagggcttagtccagattagcacaaatacagttcccacaccgagccccactccttggaatggaaaggaaattgaacactttttgatacttgacctcctttccctgaacgaaatggtatggaggggcagtatggagtagcagaaggaatagtttttcatgcttttttaataaaagaaaggctttacgcctgcacatacactatggagtatgttttgggagagatttgaaaggataaagggaagaaaataactagtgagacttggtgttggtcctggttatggccagagaaatgaaattaaaagtttggtccatgacttggaacacttgttttcagagcctggaggaaaagaggtgaggacagatatggatgtagaaatctttgtttctgagtttaaatgtgagaaaattcatgcctagtcccttcagttttttgctgagaagatgtaagggagaaaaaataatatctttttttgacctatctcaagagtcataatgggcattactgtaacaaaagagagattaacaagagaaaagcataacaaatgtatttaaccaaagttttatgtgacacagccttcaggcatgaagattgcacccagggaaaactatatatttttatgaacagttgttggaaataagagtggagaacaaaagggtacgatctaatagtaataacctgggaagaactcagtgaggcctgtttgttcagattcttcttggcctctggatatagagaaggaaccctatagactgagggtcttacgacctactttcggaggatgtaggtcagagattttttttttttttttttttttatgaccatgcttcagaggcaaaagtgtggaaaagattagggtgtgagctccaaggtgccatattatggagcagcatgttctgagccccaacaaagacaaggccatcttctaagaaatttgtggaggaataaggattgagatttgaagagaattgtgggtgtttgggaaatctatctattattggggacaggaaaagtttcctggcaacagtgagtatccagccaaggttgaaaactttgaatgtgtatttgtatcaatatgcctggttgtgttatttctctgccagtacagaatagtctagaggttgaaaagtgttcagaaagagccaaacatgaagttctgcagggtggctttaatagagaaacctaaatatgaagacattgaggatctggtgagagtggttagaaggattcacatgaaggttccatagagagggaagcagagccatggagtgagtgagagatcagtggggaatgaatgttgaaggtctctttgaggtagcagagcagttgttcttggagtaaggaagttagggaatttaaaaaaagggcgaaatatctccacaggggatctatataggtgttctagattagggatcagcaaactttaaaagggccagataggaaatattttcagctttgcaggccatatcatttttgttacaacttctcagctctgtccttaaagcatgaaggcagtcataaacaataagtaaagaaatggacatggctgtgtttctgtaaaccttttttacagagtaagtggtacgccagatttttctcaacagttgtagtttgctgatgccaggtcatagatgataataatttccaggatgtggataaatgtaagcagaagtaaagacttagaaatcagggggctaagaaactttaagatgtgtatattgactaaagccatctagatcaggatttttgagaatccgtttgaggctggtgatcatgaattatagaagagctactcatctgctctatagtgtgactccttcagctacatttggctgtgtggctgaagtcacagataaggcaaatgtttgcattcatatagggctaggatttttaccagatgggtataatggaatgatagaggagaagggaaattcaggatattgaaatgatgggaagtggtcagtaagctaaagaaaggagaaaactgataatagcaagtagaggggtcagttaactggtgatcatcaggaggtctaatacccaaatcagcttcacgagggcagtgactgttttattcactcacatgtcccagcacctagcatagtgtgtggcacatagtaggtcacaggaagatcatttaataagcaagcaggaaaagtgggaagttggggtcacgcttggatgagtggtggaggaagttatttgttatggatgacatctcatatgcctgaaatgcacacacaataagttctcagtaattattagcctttatcattatgctttttgaacttttctagggactacatattttcggagaaataaaattgagaataatttctctgcaaatgagtgagttgacctttcccaaatgagtatcatttaaggccattggaacaattagtattgttaaatttaacttcatatgggcagaatacaaaacaaaatactagtagaaattatctcctttccaaattagcctagtctggttctcaaagccagacactcagtgtacttacttctaaagccttcagttgtctagtttagtgtgcttatcaccagtgtggaaaattttatatttacattgctgaatcacctctcagtacatttgaatggcctctcttttgctttttgtctagggctgaagtgtcattcaaaaataggggtgactcaggaagagtttacaggagggagaaggctgaaatgataacaaatctaatttttaaaccatgccagttgtgttagtctgtttttgttgttataaaggaatacctgagactgggcaatttataaagaaaagaggattaattggctcatcgttctccaggctgcacaggaagcatggtgctgacatctgcttctggtgagggcatcaggaagcttatggtagaaggctaagggggaacagccacctcacatagtgaaagtgggagcaagagagagaagagggaggttccaggctctttttaacaaccagatctcatgtgaactgagtgagaattcactcatcaccaaggggatggcactaaaccattcatgagggatctttcccccatgattcaatacctcccaccaggccctacctccaactttggggattacaattcaagatgagatttggaaaggaccaacataaaaaccctatcaccagtgctttcatatttagttacatgaatcaaaaaagtgttttgattttgaacattaagaaatattctttcatatccttttcagacaacttgtatgtcttttggatgtctttttcagatgacctatttctcctttcacaacccatagtatcacgacttgtacacagtaaatatttaataagtctgtgctgactgatctttaatgacaacataagcagttctctgaaatgccctttgctctacctcttggcctggtaaatttattttatgattcggtttcaatgtcacatttaaaacggttcccagctctcatcgttaaaatgaatgggcccctgttccaggtagctcatacccagtttccattacattgtcgttgttcatctgtttctcattcttgccttttatctaccaaggagcagggagatttgggcttattcatctttagtatctctgataccttgcatgtgcttgccatctgtaaagtgctccagaattttctggcaaatgattgtgtgacagggagaaaactcattctataagcatgatgtaggctttagttggcaaaccctgccctctaaaggtttttgcttctttaaattttttctgcagttagaatactgctgtcaaatgagcaatgagtaactgattatgactttgtgatccaattagcagatgtgattaggggatggttagcctttgtttctatacctacttcttttaaattcagaataatccataattgatactcagtatatctttgctgaaagcacagatttcaccaagatgttaacaatggccatatttgagtagtagtatttttatttaactgttttctttagacataatgtttttcgttgtttgaattttctttttcaggatatgtattagaaaaaaaaactattttcattttttaaaatagatggtgtatgaggtagacaattgagagaaatgaatgctttgatgcaacttggaaccagtcagggctggatcacaatgaggcagtctacagtttggtaacaaatctcagtggtttaggaaagcaaaagtttatttgctccagattgatggggactcttctacattcagtctctcagatccaagcctccttcagctcaaagtgacttccaaagttgctgtggccaaaagagggagaaatcgaagagaccagccagctctcacctggctcagcgcatgtcactttccttggccaaaacaagtcccaaggccccaagcttactgcacaagagagtggaaaatgcagagaagcacatggaatccagtatatggtgagcaccagttgtctctgccaacatgacggtaactcttttcatttttcagttactgtaatgaatgtatgttggatccagactgcggtttctgctacaagatgaacaaatcaactgtcattgactcctcctgtgttccagttaataaagcatctacaaatgaggcagcctggggcaggtatatcactcattttaccatacgaatatataataatatttcaaaacgaggcttatgtttaagttttcagagtgcttgcacttatagcagttcttttaaactggccttcataactacattactttgcagcatatactggtgatagtggatgcaaagcattgcaattgtgtgtttcacacagagtagaaagcactcaggcctagacttttggagacccagatttctctaataaggtataggagtttggatctttagttttaggcagctattcacaaatactgccaaggcaatttctcccactgcatattgtttaattgcactgtatttccaaactcccaagcttttaaatgaaagaaaactgtaaagtcaaaatgaattactatcacgttaggttgggcacagtgcatcacgactgtaatcccagcactttgggaggctgaggcaggcagatcacttgaggtcaggagttcgagaccaccctggccaacatggtgaaaccccacctctacaaaaatacaaaaattagctgagagtggtggcacatgcctgtaatcccagctgctcaggaggctgaggcaggagaaaggagaatcacttgaacctgggagatagagattgcagtgagctgagatcaaaccactgcactccagcctagacaacagagcaagactctgcctcaaaaaaaagaaaaaaaaaaaaaaaaaaaaaaagaattactatcacattacattcttttatggaactttttttttttattcttagaggccttttccagggttcagtgaaattaagcaaaataaggataaaatttggtagtcattggcatgtagctggcttgggaggctagaaaccttaatgtttttggtttgtagtacatgcataaatgaaatattagtataaaataaatattctccagatttatgaactaacatttatatccagacatataaaatgtgtaaatgttatctgatatggctttaatctattttgtgttttaaattcctataaaagaatattctcttatcttgtctactcatagtactgataaaggcaatgaaatctgtaataaagtattgtgtctcataggagctataaagtataatgcaataattgtttcattagagaactgctccaaagaagtaaattatatgttagttgagtaaaaatccagaccacattttaaatatactaattacaaagaaatatgtaaaagaaatacaattagtgttttaaatgaacactcaaaagagtttcttttaaaaatactcagtttatagttcttatcagccaaattttgttagtgagttaattgattaaatatttctagatgtacttgttcacagctttaaacctttagagttttgtttttgccaataggaaaaaaaaaaaactaagttactactagtctagaattataaacatgttatgaaatctgttaaaaaaagaaatgtacatagtttcctgtattttacataattaatttataaacttattagaactctactaagtagtaaagagacactaaaattagatgtttctcttaccttcagtagaagagttagaggtcagaggcctcaaagcaggagttttggcttttttgcaaataacaaatcatacaactttttagtagaaatgtttattcctttatttcagaaaaattaattcaacaactcactcttacattttatttgtatttttataccatcatcctgtaactgcacataaattagagaaaagtaaggcacagataactaagtagcaaaaataaaaataactaaaaaaaaaatgatgttcacagcatatccttacaatagtctcaaactctttacaaaaaaagaaagaaaaaaatgttttcttactcctccctgtgctgagcaacggtgctccttctaggtggaccactgctattggttacctccttagtcttggctagaaaagagcaaaaaggcaggatgtgttcaccatgaaaaattcttcagatagattttccacatgtaggtaaaataatattcagtatatataatagtatttttgttggttgattggtggtttggttgatagattttatacaattacctggaatggaactctaagggcaaagtcaaccatgaccttggattcccatctagagatatactatctctagatatttcaaggtcgagtgttgaggcaatccatagccatatatcctgatctctaactgtagctgtttcctgaaaagacaccaggtggaatggcaacaccattaatgatggaaatagtataataatgttgatgaactctgaattgtcaatataatgaaaatcatttgtacatataatcaactatgagattagttggaaacaaaacttcaaaggtccatcagtatggttttctatatctatgttgttaaatttcaatgaaaacttaaaaaaattatttagcagacttctagaaaatgtagtagactgagctgctgcaggaaaatctcctcctgcccataacctccccctacacctccaacatgcatcccacacacatacaagtttaatgcacagcagaacttgaaagaaatccccaagcgtcacaaaagagtgtaagtggtgagcccacatgggaatattagaagcgaatataagccttacaggtgagaggttagagtttttaatgctgagtgagataagctccaggccttgcctctgtagttacaaagcactatccaggttctgaaatagggacaagaaaaaatctggctagactgggcttggaaagctacctacttctctgctgctcatttgggactacaaatggaaataatggtacacatgaaaaagcaaaaccaagagcctttgctatgagggagtgtgtgttctcatttcacactgcctttgtgaagtgggaaccatgagttgagaaacgtaaacaaataaataaattgaatgaaaagtaggtcctaaactggagacatccatagaggcatgttaggaatccacatggaattatcagaacccagtgtacatgagatgtccatgggaagcaactgttggtaaatacaggaggacagtcagagagtatcaggctggtgcaaaagttaactgcggttttaccattactttttgccattaaaagtaatggtaaaaccacagttaacttttgcaccaacctaatagaaacgacaccaattattggaggcaaggaagccaccaggtgtgacagatggacaaatgaatacataaagaaccttgcattgcaaaaaaaaaaaaaaaaaattgaaagagactttaaaagaaataaaggaaatagtgtatttttcaattatactgaaagttatatacttatgattggtgcagtatatatgtgtattttatatgacatatatatgtgttataattcagcaattttgcaaaaaaaaaacttgggaagctgaaattttagagaaatgacataggatgtggtatgagaacttttagaaaaaagccttctaatgagtttttaaaatttttctgctttttattttttttcagaaagaaattgagattacaattagtttttcaatttgttaaatatagatgttacaagtataagagtaaactcttaaaatatgaactgttagagggagaaataagagactcaaagtatagtaagagaagaaggggcaaaaaaaaaaacccagaaaaattacatctaaatataactgtttttacaataaaaaataaaccaattaaacacagttgtaaaagacaaagatcttcatattgaattttttaatacagttgtatgctgttcacaggagacagtcacagaaaggttagaaatacagaaataagaggaaagaaaaaattagataagtactaagtcaaaaaaacaaaaacaagcagagactatttagaaaatttacaagcttgataggagagtcaaacagaacctaaagtagagaatgtcattctttttaagaaaacatggaacacttctgaaaatttaccatgttcaagcacaaacagtaaattcagtaagcttatataaatgtatagatatttcagtaaattataagtaaatccaaataatcagtatcatccagaacatgttttctaataaaaatgcaataaaactacaaaacaacagaaagatatttatcaccccttctagtttagctgggaaactaaaataaacaaaacacccaaaaagcaacttcaaattaattaataggtttagaagaaatcacaatgcaaaacaagatgttaaaattaataactaaacagatccacaagaggttagaagtagaacatagagtaagcctgtagagttagcagaggatgggaagtgcaaagcaaagaaatactcggaaggatcaaaaaataaaagttcttaaagaagactaataaaatgtggaaacctcttgcaatactaatcaagaagagagagaaggcacaaacaatatttagaataaaaaagatgtataataatggatagtaaagatttttaaattcataagagaatactatgaaccgtgttctccagtgcatttgaaaacagataaatggacagttttcaagaaaaaatgtaactttccagaaccaattccgaacctctgtgaagtaagtgatttctataccctacttacagatgagaatagtgtcgcttagaaggtatgaatgactttctcaaagtcaaaaggccagtaagtccacttcttataggggagcagcaactgagtagtggaaagacacacattttagattcagatagtttccaatttctaagttaaagaaagtatgttattgacaaatcaggcattagaattttttttctgtatttatctgtgtctatttatccgcctccctacctcctgactctccatatatacaaaaccttaaataatctattctgaaacttcaaacctcctgactatttaaaatagtattgctaatgagggacactttcttaatgcgctgattcagtatttgtttcctataatacagcactttagctctgtaattagaaacactaaaatagctagatagattccctatttggcaattcattgtttaccgtattcattcagcagagatatttttctcaaagctgcactctgatgtaacacccagcctgttttcccagcatttcaccactctcccacacagattctagtcagtttaaatcccttgtcattaccctaatatctattataatttcctgtctctatgtcttttctcacactgtgccttctgtctagaatttaccctccttgatctctgcctgaagtctattttattttttttgctcagattagatgtccctttttccttgcagtttctgtgataagccccagaaaacaatgcttattctatctcctgctgccctctagcactcccctggatgtagcatactatgagagacatttcctggctataagatgaatgatagctgtaagtcctactggaacacctcacagggctgacactatgtgccacttagcagtagcagtgtgaggcaacctggcctggagatttccaggagacacgtccacctcagtacagatgcaactcttacaaacctttaaacaaagttacccttacaagactagcttaacctccttttatgaatgaaagacctggtaactgactccgattgaacacaggtataagaaaggggaagaatcccccaagctctgagaatagtctccagatggagaccctcttggatgggtggtcatctgacccctgattgaatctggctcatgccacccacctgctcccattatccaacttgtaagagcgctgctagaataaactgctgatgttcaatatcagtcggtatctaagtctcatctttgatgtgaatcagaccacattggaagaaaaattgccactggggaagccagttaactaggaccattcaaaacccctgaataatgaatgatacctgtatagtttatatgataattatattttttatatgatagccatctgtgtttgaatgtatatttgcttctagattataaattctaatttctatattctgcattgtttttaaacctttggtgttttatatacatcaagtattcaatccatacttataaaaatatataagggtttaaaattatcacagttataaatgagaggatatgatgttccagtcacttcattttagttacatcttttgcatccatacttatttccaggaaaggaaacttaggaaaaaattgaagtaatgcaatttacattaacacaaagattttaatgtttacctgtagtaataaaaacactaaaaaacaatttaaaaataatacttaaccatgtgcttcagtatatcactgcaaaaatattgcttggagccatactttgtgaaaaacacttcttaaaaattattggaagaagccaggtgaggtggcacattcctgtagtcccagctactcgagaggtgaaagcaggaggatcacttgagcccaggagtttaaagccagcctgggcaacatagcagaactccgtctataataataataatatcatcatcatcctggctaaagattattagaagaaatattcagcatatttcctgaaaatattcactgatatgccagggaagcagttcatctatggtgatagcataagaccaaatgtattacaaaactatatcaaatagcaaaaacagagggagttttcctttgtaacctctttaaaatttttgaaaagagatatcacttttgtatttagaaaatgaaatttattttatcattgacaaaccacatcagtatcttaaggtactcatgtacaggattgatgtatttttatcagttagtcacataagggatagaaaaacctccagctgtgttcctaaattaataacaatgtagctcaaagttaatttttaccaacataaattttatagagagaagtatagtgtctgatatagaatattttaatccatttgacttttaaaattatacttttttatgttactgcttaaatagaagtcattatggtagattattctctttagtatctgtagctgcatgttatgtgtttggaagtttcatctacccataaataatttcagagatcacatgcctctaggctgttactttttcaggttcagaaatttagactcccttggatttagtgactatattgcagactcggatactatttatgttgcaaagtctacaaatcaaaagaccaaaacacttctgagtaatttatctccctcgtccatattaatttatcgaatttcttacttgacatttaattgtaataataaataaacacttgttaacagttttatccaagtagcgatattcataatatatttaactacctttcattttcagtcaaacttaatatttctagtcaacccatgttccttttacatttttaacatttttcttcatatttcctttgaaaagtagactgtgagttatttctcactaaagaagattaaagaagactaagatttttattataaggataaaagccaaagcttgaattccatgtgcatggtgagtgtaagataatggtggtgaaccttggttcatcaaacattggggcaagtaagcatcagaaggtgtacagcagagatgaagtctggggagcttggaatttattaaaaagggggctgagaaagtaatgagaacaagagaaaggaaaatgcgtggctggtgccaatacagtaaatatgagtttagatcagatggttaaagagccttatttagatattttaatttgttttttatagatacattttcataggcgtgggaatcatattgccagtgattttaggtgaatggctttatgtgatacctggacatggataggatattgtgtcacatagtgagttaaatattttcaatctgtgaagaagaaaatcagttggctagcatgattttaacacttgggcaggaaacgttatcttggaaatcatcattctcagtaaactatcgcaagaagaaaaaaccaaacaccgcatattctcactcataggtgggaattgaacaatgagaacacatggacataggaaggggaacatcacactctggggactgttgtggggtggggggaggggggagggatagcattgggagatatacctaatgctagatgacgagttagtgtgtgcagcgcaccagcatgtcacatgtatacatatgtaactaacctgcacattgtgcacatgtaccctaaaacttaaagtataataataaaaaaattaataatattcttttcattccatttttattcaactatcttctattcttggcacgtgtgatcgattgtattattgttcaaagtatctgctaccactcccaagggaaggattgtatttccctggcccattcagtcttatccacatgagctgttctggccaaggaaattagagtggaaccaatccctgtcatttctgagccaaagctttaaggcatggagttttaaacaaggatttgccacgtcctcttttccctcttcggtatagttcaccatgtcctaaaatagaaggtgttccattagatttggtcacagggtgaagaaaatgtggaacagaagcataactgacctgaggtagacctgtggtgtgagcaacgcattaagcttgggttttgtaaatcccactgcaattcgctctcttttgttactctgacataatctattctcttctgactgatatagcaagataccctggattctcctgtggaagggcacaaaaaaaaattttttttttttgagacggagtcttgctctgttacccaggctggagtgtagtggcacaatctcggctcactgcaagctccgcctcccgggttcacgccattctcctgcctcagcctcccgagtagctgggactacaggcgcccgccaacacgcccggctaatttttgtatttagtagagatggggtttcaccgtgttagccaggatggtctcgatctcctgacctcatgatccgcccgccttggtctccgaaagtgctgggattacaggcgtgagccactgcgaaaaattttttttgagttataaaaggaactctaaagaaaaccattgaacaaataatagtacagggcagtgaaagaaagggtaaaaaattatgaaaggaattgccaaatgtcatgagtttggggagcagtgcagtaggaagtagaagtttggggaacactgcagtaggaagtagagagctgttaaggtttttaagtaggggctaatgtgagtggctttaggttcaggagataaaattctgatataagaaggaagaaggaattgtaaagaattttatgaagaacaaacaaagggcaaggcatttggaaatatggtaatataagggatatagaagaatggtgcttgcatttttacatgttgctttatatatatatatatatatatatatatatatatatatatatatatatatatatatatataaatttaaaaatttaagccgaagattatacatgctgctaggtcacagaaagaagagcagcattagatatccaaataatctcaggaggttttttgctggacagcataaatgaaataaaatttgaccattcaaatcaaagaaccgctgcctctgtacacatcatttggtatccaggtccttcctactctcttggtttcagtgctagttttataacataaacaaaatagttttccactacatgcgatctgggtttacaacttgtgtagtttgtacaatagcaatccatgttttagcattggaatatgcatagacattcatgaaccaatgccaatcacaattcctacagtttgaaaacagtgccaaaatggcaacctgaaaactgtgataacacaaaactctgtgctcataatttctaagaaaaattcattatagtgcccttcactctgtcttcacttgccctctgttaggatgaatgctgtcttattttatctaggaagtttattcttaaatagttccaaggattaaccaactttattttcatttcagaggcacatgtttcctggaaccctccaaaaattacattttttttctttttgttgtcatttatttggtaaatgagttataggggaaagattggatttagagctgttctgcatggacaaacccataaatattaatattatatttaattattggtaggttggattatataacagaatttaaactctgttcacattggtatggcatttatacctgcaaagataaagagttttttctgtggtcattttataggattgaaatttgacattgtgctacatgctattaaaaatgtattattgggcagtgaacacccaagtgtgctttatagttcctttggctttgactttgtgctagagcaatgtctgttatttttctctgcattgaaaggagcatttatccttttaaatgtattcagaaagccagtacatttaattgaaagcatattaaaaagactcagacattactccctaagatttataatctaagaggtagattgtaacatttacacacgcatacttcaaaattattttaaagaaatgaatgttccttttacaaatagagaaaaaaaagtatttgcagtgtatactgcttagtgtcaaggacatttgagagaaaaggtaaatgaaaaatttattgtagaatgtgtaaatttggagtgagttttagaaatcagcccgggcttttaggaacatcaaataatggaaggcttgataaataaaagtttgtagtaaactatgggacagagcacttcagatacaagatatggactgtaaatctgtaaatatttaaagattatgtattgccaccttaatatattttaaaataatgtcaaaggtcctataactgtgacttagtttaactttctatgacataaatgagaaaaaaaattctccaaacgataaaaatatttgtaaaccatgaatttattttgtgacatttttaggctcataaacatatgtcatatattccttattgttcttgatgaaaatttcatttaaggcttaaaaatgagactgcaagtgtgatacatggatatccatttactaaacaatttcaaccatcataacttctgaagcctcagagataggaacctgtttgcttatataactatactgttttcccttctgtggggtgcaagcggttgtctgaaaactatgattgacagtggaaaaacatcttcgttcgtttaacattgagtttttgggaaatacttgattatgcagacctatgttgttttttaattaattggcttaggaaacaggcaatcggaattctgcttgggacaatcagggaaggaaagggccagatcagagttaagtcaatattttatatttcaatttttatacttataacaatattttatatgtagaaacttttctacatctgtgccttcaaactgtagttgttattggtatatgaaacatctacatttattctgcctacttaattgttcaacaaactttaagaactttctgtataacctaagatagtataccaaaccttggtatttataaaaacttgggggacatcagctaggacagttagacacacttgaaacagaatttcaaaggtgattacaaagcagagatacatgctgaccttgggctatgtcacataagctacttatgtaattagaacttataaacttacgtaattagctacttataaagttagagttaaacaaagaaggtaattactcagagcatcatcttccctgctagctcagatactattgtaagctcttcactgattgataagagatcctatctgatatcttggtagcagtggacatttttgcaagtaattctcaattattattactttgcttctttaaatagaaattaagaaggtaccgatcagtatttaatgtcttctccccctccccccaactcattttttttttcctgtgacttcacagaaaagtttcaaaaatcaactcctcagttttagatgtacatgactgggggaatcagatgattttaggaactctgtgggtatttaatagctttttcagttaggcttaactgtgagaagggatcacacacctggggatgtcacttgagtcagaggagtggcccaagggggctctctggcagtgtaagaatgcaggaggtaaattaggaaacatctgtagaagttaaagagctggaaagtgttaccataaagagatactacttgaaaggacaaagcagaggagaaactgacaaaatagaatgaagaaaaacagggcagacctagacaagttcaaggaatgtgtatcctggaagctagttcaggaaacaagaacacatagcctcctctgtagtgagtattctcatttgtggatctctctttgctggtcaaggaaccgtctttgaagtaagcagaattgccccgggtatactgacaaagtcctgataaggtttatagctttgagtttttctcatagatttagtgtttggcatctgcatacgttggctatagatattttaaaatatatataaagtatgtaaaaactaagatgactactaactgaaatagtagttacattttatgatctactgtgtacagctaactttttcgtgaatatagatgaagcattctgtatctttgtttcactaacccccttagctgccatcagttgcctttctcagctggcctctataaaagtttggtgttttatgatgcaaaagtttcatttcaggcaagaaaatctctctgcactaaataaggagttgatacaatgtaagttactaagagcctaaatctgtggagcagatgacccacaactagaagccagcacaccccatcctaaatggaaacagtaatggaactgatcattctgtggatttgcctgtgacttgtaacagcagtgtaaccttgtctaatgacctcctgcatcccaccctagcacaccacatggaccaccctaaaatgagcaacccggaattggttatgagctactttgagtctttcaaaagagactttctaatgaatttgttgagtactcctgtgagagatgttcaaagaaattagtacactttttcccaatactattcactcttatcttccaacttaaaaagttgaatgagatgttctctgtgtttttgctgttatgaaaagagaaggatacagtcactcaccacctacctattttttttttccctcaaggcatttgtggttcttggtatcctgaaagtgggaatgacccaacccacaatgggataacacatttgcccaagataaaaggaaatgataaagcatacccagtgtataggatgtaaaaaagctaaaaatatctgcttttctaggcatttttattagtctttcaaattcttaaaatctttcaaatgtttagaattcttctgaattcagtaaagcattgcttttcaccagcttatcaccaagaactaaggatgaaggcaaatggtgagaggttcttgcagcataaccaaaggagacccatgaaaggacaggcttatttgtttgtttttcatcctagtgttttatttttaaaaattaagtgaattttcctttataccctaaaatacagccatgtccagcttactaatataattcttgtattacttacccttgatttttctttctttttttttattatactttaagtaagttctagggtacatgtgcacaacgtgcaggtttgttacatatgtatacatgtgccatgttggtgtgctgcacccattaactcgtcatttacattaggtatatctcctaatgctatccctcccccctccccccaccccacaacaggccccggggtgtgatgttccccttcctgtgtccaagtgttctcattgttcaattcccacctatgagtgagaacaggctacttatccttgatttttctaggcaacccaacctacggcctttcatctcatctcatccttcaccccatcagtgagaaaaggaaatttttgtttgtagaagaaatgtgctgttttattctgtagcacatcagtacctgtgctaatttgagaatcataactagcgtagatccaacccagaaacaaaccccaagttcacaaaacttaaaaaggaataggcaaattctagttgaaactgtttcagacctcagctcactatcagcccagaacatattatgtgcctcatcgatttaaatgttaccgttaggatttggtggacactgtaagtctagagaatagctaattgaataagacttgaacatctaattgaatttcttgaacaaaatgtatactcagaacagaaaatatttcagaaatctatgacttcataatgtcactggctctgaaacattaacacactacttttccagttttatttggctatatttatttgacaattggatctcttttatagaatgttgtactgtgctataacttaacaactaaaacaacatttatttgttttttccagactgggaatgtcagaattgtgtcattgtagctagcatatatcaagatacttttcagctattgcttcaaatgctctatttttccctacatgccctttagtagaactgctttccagtgctttttctataaccaataattattgcattatggttatttttatccccgttcgcctcttaccgtcccccaaactagaaacttctcaagggcaaagttgggataatgttgttctctctgccagacgttatgcctggacacatagaaatctctcagtgcatgtgaatgttagtgaaaggatagtaataggtgaaaagaaagaatgctccagcctacgagtcctatagctgttttgacaaagaacctgttcgatttattcttccaaatgattttatatcatgtggagaaggccagtctgtttgaaaaacttgtagtagaaatgacaatagttaacaataaaggccagaccatcaccatatccagtacagctcacagtattctctgctttattctgttttctctttttctatttttgattcatatttgggcatatgggattcaggaagtttctttcagaaagtctaaaatcaatgggaagcttagctctggtataatgtagagaatacttgctggaatccaacgactttgatttgtgtctggactcagtaactgaccagaagatggccttgggtcatttattttacttctctaatccttagtttgctgatctttaaaacagaagaaagtaataacactagatcttgcttaccatctaagatcactgagaaagtcaaatgaaaaaaaaaaagtgtaagaagaattcataaacttgatttaattttttaaagaccaacttaaaaatctcagctccacaatctatcatatctttctgccttatctaagaggataaagcgattgataatgcatattgtgaaatatgcataattgtgataatgcatattgtgacatatgcataattgtgataatgcatattgtgacatatgcataattggcaaatgtgaaatttaaaatttctttcttactagtgttgagctaggccttgaaggataggcagggtttgtatatgcagggatagcagacgtaattgtatgagataaccaaatttagtaactgacagcaatttatgtttttcctctctttaaaatgtgcttttccattcttaagtatgtattttaccataaaagaggagttcctttttttctaccaaagcattcttcagtttgtaagaacttttatctattaatttttgttaaattgtatacaattataacagtgtttagcattatcagaattttgattttagtgagccagtgtgttacttgatacaataaagatcagctaaagccttcttgtgttgttcttaaaggaatagatgttttctctttactctctatttggaaaaagtttaggctagtttttaaaaacagtacaaagaggaaattataagtacataattcattaagtgtctttcataagcttattcctcctaagctattacacttgctgtctacatctgtagctcatttcctggggaggtaaagcaatgacattaaaactccagcagtacaatctacatcagaatggttgattaacgttttgaagtattatccccagacctcacattttaaattaatttaattcttaattatcacaaagaaagaaaagagtatgggcaaaagtgaagagaatattcagagcagttttcctcgtcttgaaagatatgattatagttttacagaatttggcaatacaatatagatgaagtaatatacgaaatcactcatactggaaattgtccaagattgaaactttcgaaatgtggagttatccaagatgtgactgtgtaggcttcagacagtttccaggaatgacattcttcagcgtaaaatggaaactccaattttaaaatgcctgtgtaggggttctgttcagttaatattcccaattacatctttttaattgctattttaaattttaaatcaaatggaactcacattgagattgtagatggtagtggctgcagccgtgtttcaagtctccctgaagcttcttcatcccccactactccaataaaaacagacagttggcaaggaatgggccttatttgaatcttgattcaaatgaactgaaaaaagtcacttaaagacaaccaggaaagtgtgaacagtgattggctgtttgatgttcttaagaaattattgttaatttttcaggtgcagtaatcatattgttatatattttttaagtccttgcagagatacatactgaaatagtaacagatgaaatatggtatctgaaatttgcttcagagtaacccaggagaggtggattaagtgacaatttagatgaaatgtcattggccatgtgtttacagttgttgaaagtttgttatgggtacatccggttaattatactatactctctacttttgaatatatttgaaaatatttgtaataaaataaaattttgatgtatgtcaaaataaatgctgacctagatcaaagacaaaagtatttttaagatagctaagaaacaaacagaatagataaaatggaatgcaaaaaatatctaattaatccaataaaagaagttttaaagggagggcaaaagtaatactataggctgggcacagtgggtcacgcctgtaatcccagcacattgggaggccgaggtaggtggatcacttgaggccaggagtttgagaccagcgtggccaacatggtgaaaccccatctctactaaaaaaaaaaaaaaaaaaaaaaaaaaaattagctgggcatgatgtcaggcgcctgtaatccctgctacttgggaggctgaggcaggagaatcacttgaacccaggaggcagaggttgcagggagatcacaccattacactccagcctgggtgacagagtgagactctatctcaaaaaaaaaaaaaaaaaggtaatactacaaactaaatgtttgtccccccaccccctaaagtcatatgttgaaattagaaaccgccaggtgcaatgactcacgcccgtaatcccagcagtttgggaggctgaggcaggtggatcacttgaggccaggattcgagaccagcatggccaacatggtgaaacctcatctctactaaaaatatacaaatcagccgggcgtagccgtgggcgcctgtagtcctagctactcaggaggctgaggcaggagaatcgcttgaatctcagaggcggaggttgcagtgagctgagattgcaccactgcactccagcctgagcaacagagcaagcatctatctcacaaaaagagagaaggggagaaagaaaggagaaagaaagaaagagaagaaagaaaaggaaggaaggcaggaaggaaggaaggaaggaagaaagagagagagaaagaaagaaaagaaaagaaaagaaaagaaaagaaaagaaaagaaaagaaaaaagaaattagtcccaatgtgaggatatttagaggtggggcctttgggaggtgattaggtcatgagggtggagtcatcataaatgggataagtgcctttataaaggggccccagatagattccctcttccattctaccatgtgagggcacagatgaaagatggctatgaaccagggagcagaccctcaccagacaccaaatcttcttgtgcctagatcttggacttcccagcctccaaaaccctgagaaataaatttctttgtgtaagagccatccagtctgtggtattctgttatagcagcttaaacagactaagacaagtaacaaagttgtttcttttatgagataaccataaaagaaacaaattagagatttaaaccaactctattggtaaactatgttaaaataaattgtttagaaactccaataaaagacagaaactccagtaaaagacagagttgtccaattagacatgaaaacaaatgcaactgtctgctgtctagaaaaatggggatggaaacagacatactgtactaacactaatcatataaagctagagtgcttttgttaatatttgacaaagactccagattaaggaatattatcagagattaagaaggatggcttataataaagtggccaattcatcaagacatacaattcttaaatgtatattcctctaataatagagcttcttagaaatcagtaaaaaaaattttcacaaaaattactaaatatttgaatattaaacaatacatttctaaataacccatgctgtaaaaaaggacatcacaaggtaattagaaaatgttttgaagtcaatgaaaatgaaattataacatatcaagaacgtcaggggacagctaaagcaatacttaacagcaaacttatactttaaaataagtatattagaaaattttgaaaggtttaaaatcaattacctaagcttacaattatgaagctaaaaaatgaagagcaagtaaaacccaaagtaattagaaggaaagatataatggtagtaggaaacaataaaatagaaaatgtaaaagcaatagatgaagtaaatgaaatcaaaaggtaatttcttgaagagatcaataaaaagcagattaagtcatagctggactcgtttagggagaaaaggagacccaactttctattattataattaaaagagagcacttctaataaatggagaaaattcctggtgacacatatttccaaaagaaataggaaaactaaatcatctatttaaaaaatcaaatttgtattaaaaatctccccacaaagaaaactgcattggtgaattaaaccagatatttaaagaagaaataatgccaatcctatataaactctttcagaaaagggcagagtgggggaaatttcccaactcattttataaggttggttttatcttcattaccaaatctatccagaaactgcaagaaagaaaaactatagatgaacatcgcagtatctcccttgtatacagacagaaaaattctcaaattgaatccagcaatataaaggaattcatggttgatttaacatctgtattcaatggatgtaattcattatattaagagaagaaaagagaaaaatcatatgatcatcttaatacatacagaaaataaattgattaaattcctaatccattcatgataaaaactctcagaaggctggtaatggaaggaaacttcctcgacctgatacataacatctcttaaaaacctacagcttacattatacttaatagcaaaatattattttccctctaaaattgaaaactaggtgagaatgtctactcttaacactactacatgacattttcctggagatcctagccagtgtaataaggcaagaaaaggcatacagtttggaaaggaatatatactctattttcagatggcattatttttataaaatgctatgagaataaataaatgaatgtaacaaagtctcaaaaaaggtcattgtagaaaaatatattttatttctattactaacaattggcaaatgaaatattttaaaggctaattatatcatcaaaagatgaaattcttaaagataaatttagcaagaaataacaggatcactacactgaacactataaaatattaccgagtgaaattaaagaagatctaactaagtagatcacactcgtggataagaagacttaatatggttaagatgtcggttcttcacttttacattgttggtgggactgtaaactagtccaaccattgtggaagtcagtgtggcgattcctcagggatctagaactagaaataccatttgccccagccatcccattactgggtatatacccaaaggattataaatcatgctgctataagacacattcacacatatgtttattgcggcactattcacaatagcaaagacttgaaaccaacccaaatgtccaacaataatagactggattaagaaaatgtggcatatatacaccatggaatactatgcagccataaaaaaggatgagttcatgtcctttgtagggacatggatgaagctggaaaccatcattctcagcaaactatcgcaaggacaaaaaaaccaaacaccgcatgttctcactcataggtgggaactgaacaatgagaacacatggacacaggaaggggaacatcacacaccagagactgttgtggggtggggggatggggaaaggatagcattaggagatatacctgatgctaaatgacgagttaatgggtgcagcacaccaacagggcacatgtgtacatatgtaacaaacctgcacgttgtgcacatgtaccctaaaacttaaagtataataataatttttaaaaaagatgtcagttccttttaagttgatctctagatcaactcaagtaattctaatcataatccctataaacagttctataaaaaatgacaagctcgttctgaaatttatatagaaatgcaaaagaactggaatggccaaaacattcctgaaaaagaaagacatgccctatctgatttcaagacttactataaagttacagtaatccagacaatgtgatgttggtaaaatagacataaacatcaagggaacagaataaagtccagaaatagatccatatatgcatggccaattgattttcaataaaaaaaccaaattaatccaatggggaaagaatagtcttttcaacaaatggtcctaatacagttggctatctacattgcgggtgaaggtggagggaatggacctcaactcttacaccctaaacacaaaaaagctcaatatacatcatagacctaatagtaaaagctaaaatcataaaacatttataaggaaacataggaggaaatctttgcgacatcagggtaagcaagtagataggacacaaaaagcacacacaacaaaagaaaaaattgatatattggagttcattaaaattaaaattgtctactctttgaaagacattgttaagagaatacaaagcccaagccacagaccggaagtattatttacaataagtatatctaacaaaggaattatgaataaagaattcttacaacttaaaataaataaagcaacctttcaaaagacgccaaaagatttgaacagacaagtcacaaaagactataaaaagatggcaaataagcacatagatataatgttcaacattattaatcattaaagaaatgcaaaaaaattatagtgacatgctacagcacaccaactagaatagctaaaatgaaaaagtcaaaatatcaagtgttggtgaggttgtgaagcatcatgttaatgggaatgtaaattggtacaaacacttcagaaatcagtttggaggtttcttctgaagttaatcacatcttttccatacaacccagtaattcaattatgacacatttagtcaaatgaaataaaatgtgtccaacaaatgtttctacacagtcgtttatagcagccttattcataatggacaaaattggaaattacgtagatgttacttcaacaggtgagtggataaacaaattatgatacacccatataattaaatactacccagatagatggaaggaattactgatatgtccagtaacctggtacaatttcagaaacattgtgttgggcaaaaaagccagatacaaaacaatatatactgtacaagtatttatataaaattctagaagagcaaacccaatctctattgaccagaaatagctcagttattgactggagttgggcatgaaggaaatttttggtgttatggaaatgtttactctcttgtctgtggtagtggttacatggatttatacattgtcaaaactcattgacttacacgtaaaattggtacactttatattttgtatattatacatgaatagatgattaaagtactggatttcttgacttccaagaattatagcatacaaaattatatcttcctagctattttcaaagggcagactaattctactttaagcaaacagcatttgatgacacttttcatcacagacaagattctcctggtacgattattaaaagttggcttaggcaacttttatagctagactcacctagggggagaagacccaactctccattattataattattataattgaaagggtgcacttagaagaaatggacaaaattcctgataacacaaatttccaaaacacaaaaagaaatagaaaaactaaatcatgtatccattttaatcaccagatttatttgcttgtagcttacctgcaggtttaacagtacctttgaaagcaaatgagtagcctagctgatatttatcaagtcttatagccaccctttacttgtttttcaattagtgtttttattttgaaataactatatatttacatgcagttttaagaaataatgtagagatcccatgtactctttacccagttcccctgaataacaacttgcataattatggtatagtttcacccaggagattgatattgtttcaatccactgattgtgttcagactttccgttttacttatgcatgtgtgtgtattttatacagtgttatcatatgtaggcttgtgtgtccaccagtacagtcaagatatagttctgttaccacagggatccctagtggtggtcttctgtaagcacactccactccccacatcctacgtggccctgtccttaactcctcatgaccactaggttggcgcaaaagttatcgaggtttttgcaattactttcagtggcgaaaactgtaattacttttccaccaacctaatgtgttgcaattactttcagtggcaaaaactataattacttttgcaccaacctaatgtgtttttttcatttctggaacgttgtcatctcaagaacgtttaataaataggatcgtacagactgtaatctttggggactggcttttttctcagcataattctctggagattcatgttgtatgtgtcagttgatcacaccttcttattgctgagtagtattgtatagtatgaatatatcagttttcttaacaattaaccctcttaaagacatgggttgtttccaattttaactcctacaaatttattttcgactgtcttgatttcattattccataacaaaacatagcaacccatgtttcccacagtataatttaagcattttgaagaattctcaaataataagatattaactttctgtatactgtctaaaatatcttaagatcttttcctgagtctctttaaggaagtttgcttgaagaagttgtattccaagcacagtggaacttcctttatggagcaccttggattagattttatcacaactgagaacatgactttttgtggacttcttgtgattttcagataatgataaatgcaatcagatagaagcctgtgtgacttctaattggatcccagggaaaatatatatcctgtagcatttaggagaaaaagtgccttgttcaggggacagaatgccattttcttctgtgagtgaaaaagggtgattgattcattaggcacctagggtcagttagatattcctgttaagaatatcttacaatttgttgggcaaaggttttggttctgacatatccttcattcccttcaaaatgcatttagaatttttgttctgatctttcagcattagaggttccaggcaagataaagacagtcaactctgaaatataaacttgtcatcgatttttttcttaatttttagtttgtgaaatcgtgttctcggaagctcttgtgaaacttgcatatatttgtatacaaattgattttgtgattttaaataatcagttctgttgcagctacaattgctgtcactgtaagctttttctggtagcaatcaatatcagaaagaagtttgctaaattgcagggaatctgctattgctaaggaaagtgtttaatgaatagaccagccattaattgtctcttgctgttagattcaattacctgtgaaactaagcaaatcctgcccacagctttctgatctcttcctgtgtttccaaaatgtcccttcagcaaacatagtagagaaaaaaacgggcaactccctttctagattatttatttaaaacctcaactctgacttgcccactcagatctggtttcattgatacctaagttactgaggaagtgcccctcctccaactcccttcacttacctttgccattttaattagcagattatttaagcggaatggatttttgtttttaaggagcgctgtcagcagtatttacaacttctccaaaccttttaaaaaatactgtagcatgttttaaatataatagatcagtttttaaatacactgtttcaggcctatgggaataaagtctctggggaaaaaaaaaaaaccaacagaggcattaacctaagagacagagtataatggaggctggaaagatttgtcatttatcctgtctgtgctccttcacgatgtacccagattcccacttccttacaccacttctacctcttacacctgctccagccaccccaggattattacagatgcctcctaactggtgtcccagcatcagccccaacccctgcctctccctgcaaagcagagcagccacactgacccttttcaaatgaggccagatcacaccactttctgttcaacactctgccgtggcttctcacatcatttagaataaaaaccacgccctgcagagtcctacacattctggccacgtccaacacacaactctctggcctggcctggcctgcccttgctgtcttcctggctccctccattgtcgtcactgatgaccctcactgttcttgcctgcccagcaggcttctctctccagcaggcttctccctccagcaggcttctctctccagcaggcttctctccccagcagtcttctccctcagactgtggcactttccaagcaagtgccaaagtcttcaggtatctgcagagtgttttctttctctgcccagcatagtgccttccctgagagccctgtcaaaacagtagaactacccaccctgatgtcctagccctacttaccctgcttctctttagggtatataattctccatctatatttaacatgtaaatataaatgtatctgtatgctaatccatttattttctagaatgtaagctccattctagacatttctctacatttctagaatgtctgtcctctgagaggacagacgttctgtttagtgttgctacacagcagactagaacagtgtgtgggagcctagaagtcacttagcaaattcttattgaataaataaattaaccaatctgtgtcccctttcctttatgccatattaatataaaagttacagaataagctacaagctaagaaatcagggaataccaaagctatttaataagcatgagtacagtaaataaattggttttgacaggttattattattaatctagcagtttctggtaatgaatgttaaactcttaccattatgattgtgaagttgtcagtttctctttgaaattaatcagtgttgcttcacatagctcgaagtatattatcaggtgtttataagattagaactatttctcttatggaatgaacattttattataatgacatttatccttgataactacttttgccttcaaatttgttgtatttttactacttttctttttgttgatattttcctgttacacctctttttcttcacaaatatttcaactgtctgtatttgtatatgtgggtttgtctcctaaataagatatttagtgtttttttccccaccactctaaccaactgccttttcatcaagtcacgtgtgtttacatttacacacatgcacaccagtttttttcattatttcttgtcaaattttttttaatgaattcagacatttcttcttcctgtactgtatcttttctttggatgctttgagccctgttgtttttttaattctgtagcttcatactgatgtatcttgatagaggtgtaattttatttatcttgggaagggatcgttgtccttcctaaatatgaagattcttgttttccatcagttatgaaaaattctcagccattatattttcagatattacttaccatattatctctcttctgtccttttggaattccggtgagatgcatgctggccatcacattctgctttccctgtctcataagctctttcacacatttcatttcttagtgccatattctgaggaatttattcagatcattcatccagttcactgcttttcttcacatatatccagtttgctggttagcatatctgttgaaggattcttttttctgactctatatatatatgtgtgtgtatgtgtgtgtatgtatatatgtattttttcaagaagttacattttatatctttttaaatctgaaggtttttacagtagctattttttaattttttacatatcttctttaaataattatactcatgcttatttttgctcctaagtgatagttttatggtctaaagtttaatgtgcctgtggctctgctgtttattgttgttatccactgctgtcatctactggctactgatcacggtagattgtttcctcatgcattttgtataattgtcatataagtctattttcatcacggttttatctgtggcaatcctgtgcagcctctgttgagagcttgtccttctagaaagttttttttttttttttttgcatttgcttcttttagatgccacagggctatcaccaaccaataggctggtccctagaataagggaacatttacaatggctgccttataccctgtacttcaggtgggagcccatagaatggctgtactttacttctcctttctgaaaattaatacaaataaatttagaaatttctgccttcattgtatcccaaggggcccatggaagatacctctagtgaggcctcttttccaatgtcattatcttggatgatcccacactgagttgcccttcccagagggctttattgtcctatgacatattttattttgatgttaattcccctacttggaggttcctagattattcattgaaatctcaatctgatataatatttttggcctgtggttataaattctcaggatggagatatagttacatatccatatctacatctatatatggttacatattcatatctatctttatctctgtatctttatatctatatatatggacatgtaactatgtgtgtatacatagacatatataaatataaatatgtaactatatatacatatagttctagacagataaatagataacggtctcaatctaagttcacacagaaacatacaagttttcttgtgtcccactttcagtgggtgggtatctctgcttgtacaccttttaatcaagtacactatgcttatacttccagtctcctacaagaccttgtatgaagtggcccttgcctatttctcggcatcatttcccgccactgtattcctcttacttctgtgcatcaaccatcttagtcttttttctgtttctcagacataccaacgttacgttgcacttgctgtttactcatagaatgtccttccaccatcttcacatacgtctggcttcttattgtcattcagatcacatatccctgaatgacaggctacataatatgaggacctgcatgcaaaatgaaaatacagggccccttgttaaaaatgattaataatttcaagacagtacaagcagagcactaaatcaaacagagacttctaagcatgaggccatatgcagtcgcaaagattacacacccatgaaaccagcggggccttcctgaccagcccatcaactgcccaaccccacttagtgcttctctattatatcacttttgtagttttttcatcatgacaattgtcactatgtgaaattctttgcttacttattcattggctatcccctggtactagattctaagctctgtgggaatgaggatggctgtgttgtttgctgctgcagcacctagaatggtgcctggttcaataattagtttgtgtagtgagtgagtaatgtctgctttcctaattagtctccaagtagcccaagaatcttcttcaacataagatgctgggtctccacttccagttgatctgattttgcacaaaccagtgaattttggattctaagcccgccctttccttttatagatgaggaaactgaatcccagacagtttaaataatttgctaaaattcagaaaaccagttaagtggcagagctaggaaaagaaaaataagtctgctgacttctaattctaccctctttttcctatgactagtacattgggtgaattttcctgctgtaataatctttgtattcagctacttgacttttaaaataatcttaaatggaatatttcccaaatttgaatcttaattctgtgccaagagaaattagactatgtcatgaggtcagccctctcaagcagattgtcattttctctgggaaaactctcttttgtttatggctgtttgctttatgttttgtttatgcctttgctacctacagcaacttcagttctttctttttttttttttttttttttaatttcctcattcatttattcaaaaatatttatcaagtgaaacactattataaaaatataaaaactttgttttaataaatgattttttttttaattatactctaagttttagggtacatgtgcacattgtgcaggttagttacatatgtatacatgtgccatgctggtgtgctgcacccactaatgtgtcatctagcattaggtatatctcccaatgctatccctcccccctcccctgaccccaccacagtccccagagtgtgatattccccctcctgtgtccatgtgatctcattgttcaattcccacctatgagtgagaatatgcggtgtttggttttttgttcttgcgatagtttactgagaatgatggtttccaatttcatccatgtccctacaaaggatatgaactcatcattttttatggctgcatagtattccatggtgtatatgtgccacattttcttaatccagtctatcattgttggacatttgggttggttccaagtctttgctattgtgaatagtgccgcaataaacatacgtgtgcatgtgtctttatagcagcatgatttatagtcctttgggtatatacccagtaatgggatggctgggtcaaatggtatttctagttctagatccctgaggaatcgccacactgacttccacaatggttgaactagtttacagtcccaccaacagtgtaaaagtgttcctatttctccacatcctctccagcacctgttgtttcctgactttttaatgattgccattctaactggtgtgagatgatatctcatagtggttttgatttgcatttctctgatggccagtgatgatgagcatttcttcatgtgttttttggctgcataaatgtcttcttttgagaagtgtctgttcatgtccttcgcccactttttgatggggttgtttgtttttttcttgtaaatttgtttgagttcattgtagattctggatattagccctttgtcagatgagtaggttgcgaattcaatccccccttggaaataccttgccaattcttactcagaataagttgcattcctatttatattattctcagaagagattctagtcacaaattattttttctgtttactgttttcattcaaagcacgtcagcaccaattacctttctgcaaaaatgccaaggatttaaagttatattacccatttgggaagctcaatggcagttttagagttgccctgattttttattgtacctagaagattgggatgggtccagctatcacaataaacattacatatatgtttacttggcaaaaatctgcttttcattgaactgcaaaaaaaggtagacatcaatcttcattttgtaatttgtacatatcagctgctccactgcacatggggaacacttcttactctaaggattctgacaggtgacacattattctgttgtaaatttgattctctctgcaccaatcatctgaaagttctaccaagtttcttgctaaggcatgtgaactcatgatccagccagctctcctcagttgccaggctttagtaatgtgaatgtgttatcctgctttgtctcaaaacacgttcttgtataataggcctaactttaaaaagcattcaagttgttccatttcactgacctgcattctctaccatttgaattgctattaattgtacatactgttttgtggtcttgatttttccaatctttttgaccaggtttttagctaacccctggtttgcatttggtttttgcttttgtttttttgggctatcttcttgtttactttatttgatttactctactctgccagttctaagggaaatgaagcttatttttactataattttagaggttattctgggtggatttctgtaaaagtgcgccgtgtagaggatcctaatggttgagattaaagaacagaacagactgagcttagtggctcatgcctgtaattccagcactttggaaggtcgaggtaggcagatcacttgaggccaggagtttgagaccagcctggccaacacagcgaaaccccattgctactaaaagcacaggaaaaaaaaaaaaaaaaaaaaaaaaggctaagcatagtggcacatgcctgtagtcccagctactcgagagtccaaggtagaaggtaggagaatcacttgaacctgggaggcggaggttgcagtgagctgagattgcaccactgcactctagcagcctgggagacagagtgagactctgagtctaaaaaaaaaaaaaaaggaaaaaaaaaaaaaaccagaacagtaattcttcaggtggctgtattatctgaagtggggataatggggagaagatggtaggattgttcaaaacaagcaacacctttgttttgttactctaatttattttggagacaatttacaaattataattttaatgtataattataaagctgttgtattatttcataaaattatttttatattatataaaatacataatagtgcattaacatatgtttatacatcattataattaatatataattgtgtttatacaaagtattttgagcttcatttagtactaaaggaatgtaaaagatttttatgtttccaaaagtgtcatgagaaatgtcccagaaggttaagaaagactggaatggatgtgatctgtctcacgagtctttcagcactagcccgggctgttccagggaggctgtgcttgccctgccacgaggccaaacacaggagctggagggcctgctcaggacagaagcacttgctttacagttagaaacagttgaagcgctcttatgcgtaataagtatgttgtaaatttttgatgaattaatagttacttggggatctagattttagtttactgttcattaaggtatctccttttgctttcagttacttattcaagttaattgatcttcatttaatattccaaagcccctatattactcatctattgctatgccacaagtgactctaaaacttaacaacttcaaacaatgaacatttatgtctcactcagtttctctgggtcacaaatccaggagaagctgagctgaggctctgtggtggtatctctcatgagattgcagtcctctgaaggcttaaggggagctgaaggatccacttccaaggtggcttcctcgtgtgcctggcaggttaatgctggttgttgtccgacaggccttaatttctctctttatgtggagttttccattgggcagcttggctgtcctcataacatggtagctagcttcctccaaagtgaatgatccaagaaagagactgacagacaccatcatatctttgatcttagcttctgaagtcacacttcatcattccataatatcaaattggttacacaagtcaaccctattctgtgggagctacacaagggcatgaacactaggaagtaagatcactgggggatattctggaggctgactcccacagcccctaatgaagatctcattagaagtattctttaattaaaacaataacttttatgtttacatggatagaatatataggttgaattacgaccggttttcagtatgcatccgtgtatgtgtgtgtgtgtgtgtgtgtgtgtgtgtgtgtgtgtgtgtgtgtgtgtttaccataactggcttataacatgtatccattagcttttcattttatttgaaagcacacttgcatcttggaatatgatgacattatctgcttcatatttatcattctcacagaataaaagttaccaatgagagacaacaaaagggacgaagttgtcctcataatctatgtgaaattgactaaaatatttagctactttacaagagatgggttattggattagctcctcattttgtgtcaaatcaccacttatatattttcccatattgctgttatttatgaaaatagaaaaccatattctgctagagaaccaacatataaatgagaaaaatactgtgctgaaataggaaaataggattataattatagctcaggaaatgcaagtcagaaatccaaaataagttcagtgtatgctgaaaatgttagcatttttcaatgtacttaaagataattacattgcaaacataatacagtttttaccattgtttcccagctgaaaggtttaggtatgttggcgtgcttactttaaatcaggcttgcatgcttgcttgaaatcacatgttgttttcataacatcagaatttttacaaataacaaaatgaatagttttcattaaccagtacttactgttgaatagtttccattatcgggtgcctacacaagttatcaaatagtactttttaggtaattataagttttttaaaataaccaaaaaacactcttttacactgatgtcgaacataaaacaaattatttttctaataggatatttggcaatatgttttaaaagacttaatgtccacattctttaataagcagcttcacttctagaaatgtgttataaggaaataactagagaggaagtcaaaggtgcataaatgtccatggcagcattatcattattaaaaatagtacaaaaccatctagcaggagaatggtaaaataaatgatgctacattcttattgttagttggcatataggctgaactgctgaaaccaaaagacccatctaaacaaagttgatttcaatcatattatattctaggaggtttgctggctgtacagcacaagattatctaaggcctgggtttcctctcctttttcagtagtgactagggtattatactttctagcttctgccagctcactatcactaggaccttgtgccagctcccagctcatgggaatggaaaaatggaaaaaaaggaaaaagtgggcaagcagcttgcttttaaggaaatggcctagaagtcttatacctcatttctttttttgtttgtttaggtttttttttttttttttttttaagatgggtcccactgtgttggccagggtgatctcaaactcctgagctcaagagatcctcctggttcagcctaccaagtagctgggattacaggcatgtgccactgcacccagaattgtaccgtatttctgcccacattccaatggtaaaaatttagtcacatggtcacactcagatcagttaagatgttaagggctaccccctacatcgtgggagtgaatgaaatatgaaaattgccatgcataaccttggaaacatgttaggtctagtaccagttacaaaaggtgatatactgtatgattccattaatatgaaatgtccataataagcaaatccatacacagagtagattagtagttgccagaggctggggggagaagaggtttgggagtgactgctaatggctgtggggtttcttttggggctgatgaaaatgttctaaaattaggtagtgatgatggctacacaactctgtgaatatactgaaaatcactgagttatatgctttaaaaggatgaattgatgacatgtgaatgatcccaatacaactattataaaagaaaaaaatgccccaatgcataaaaggacagcaaggaagtttcctccctcagccatggcttggatagagcaggacactctaccccaataatttaaaatcagaagtcagcccttatgtggcctgactttatgtttcccgtgcccataaaacttctagtaaagatttactcgaaagtagctctggctctgcagcacctccaggtgtctagcaacagccaatgtaaatcttctctggaaataacaatgtctatccaagcccaaatcattccatagataaaagtccaaagaaaatgagtaactcatgacataaaatataccagggaactaggcaccatgagtaggaatcagtgaaacacccagtcatcagctggacctgcaaagattagaggtattggatttattagacaaatataaaatcactgtgtttaagatatttaaaaaataaaagagaattttggaaatatgagcagacaataagcagatttataactataattataaaaattctagaaaagaaatatatgataaattaagtttaaaactgtgtagatttatcagcagatttgactcagtagaattagtgaactgaaagacggatatgaaaatgtttcctgaatgaaactcaaagaaacattaaaaaaaagatgtgacacacacagagagagagagaggtggggggagatcaagatataagagacgttaggataataagtttagcgtactccaaatgatagttctagaaagatagaatggggaagaggcaatatttaaatgtatgataactgagaatattcccgaatttttgaacccatggctttaagaagcacaaagcatcccagcagtaagacaatatccacaccaaacagattagaatgagactgctgaacagcaaagagaaggagaaaatcttaaaaaacagctaaggagggtggaaaaagaaatcatcttcaaggcaagagcaattagactgacagctcatttcttcagaagagaatttaattttatccttcatgcgtggagagaaaatacacagttaaaaaccttagacaaattaaatttaacagagtttaattgtgcaaagaatgattcgcaaattgagcaaagaatgattcgcaaatcaggcagcccccagaaccagaatatgttcacagccactccaggctgccacatggttggataacatttgtggacagaaaaaggaaagtgatgtacagaaaatggaagtgaagtacaaaaacagctggattggttacagctctgcctttgccttctttgaacctgcctttgccttctttgaacagttgtctgtggttgtctgaagtttggctactgcgattggctgagacttggctacttgttacaagagtaggttacagtctattttatacatcaaattgcgttatagttaattatgtatggggaaacctttaggcagaatttaaaatatgtaaagaggcagctctaggccaaatgtaatttaacaataccaatttataattctatgcccagtgaaaatatctttcaagtaactaaagagtgtctgtcagaaattcttggaatctcaaaatgcaacagaaaatgtatattattcaaatatcaagaataagggggttttataggggaaaaacacaaaagcaacaaagggagagctgcaagtttggtggacactgttcaggcaactcttgcaattttgcagaagggaggttttgttttggttttttttttttttttttttttttttgcaatttggcccattccaggccatacatcaccttctaggaattgctagctcaaaagagtaatttagagggagtgtgttactttctcagtatcagagaacaagaaagtaggtattaggttcagagcagaaaattttacagttctccacatccctcttcttggccaaggtggacaaaaatccaacactgaccaaccataatgagctcactgagataaaagtcattagaatgggagggtgaacttcagagttaaagttcccatttgcttctgttcaagataatgttctgggatcatttattttgaaattatgtcactgcttagattaatgaccctagaaattatgcatttcatgggagggattcctatgaagaggaaaagcaggtgcatgaataatctggagaattgttcagagccaagactcggtttctgtttggaatgcctaaaatcagaggtcccagctccatctacctaacgcaatatatatcctagtaagggccaggttgtccatgcagaagagattctggttggcttcacgttagaaatgttctcagggatgcacatgcagaagtcatttccaagtactatacaagtacccccactcaggaggctaagatgggaataatgttgttgtggttatttacatcctttgcaattccatatgaattttagagtgagcttatattgctaagatttttattggacttacattgactctatagatcaatttgggatgaattgatgtctttaccaataaacccataaacaaggtacatctctgcatttatttagtctttaatatttttcagcaatggtttgtagtttttaatgtacaattttgcacgtcttttgtcagatttcttcctaaacatttccttttctagtgctattataaatagaattttctttaattcaatgtccaatgattgtagtatatataaatagtatgtaggttttaatgtgccaatcttgtaaaatgcaaccttgctaaattcactgattctttttgttgattccattagattttctacatatatgatggtagtgtttgcaaactgtaagacttttaatagacaatatagttttatatctttatgacccaaggaatgtgaaagattttgttaaccagtcatagaaaacacagggcataaaggaaaatgtagatatatgcctacttaaagttcataactttggttcacaaaaagataccatagagaaagtagaaagagaagccccacattgatagaaatttgcaatacagttgaccctagaacaatatcggtttgaactgcgtggtccacttttatgtggggtttttttttttcattaaatacagccagccctccatatcagtgggttctaaatctacaaccaaacaggaataaaaaaatacagtacttgcaggatgcaaaacccacatatactttggtatctatatctgacttttggtatctgtagggccaactgcaggacttgagtatgtgtgggttttggtatccacagggatcctggaactagttccctgatggatactgaaggtgactgtatacacacctggcagaggcttagtatctagaattgtgctgcccaaaatggtagtcacaagtcacatgttttgaggacttgcagtgtctcttatcccaaatacatgccagatttcaaagacatagtatgaaaacaaaagaatgttgcctgttcactctgatggtagtttcttttgctgtgcagaagctctttagtttaattagatcccatttgtcaattttggcttttgttgccattgcttttggtgttttggacatgaagtccttgcccacgcctgtgtcctgaatggtaatgcctaggttttcttctagggtttttatggttttaggtctaacgtttaaatctttaatccatcttgaattgatttttgtataaggtataaggaagggatccagtttcagctttctacatatggctagccagttttcccagcaccatttattaaatagggaatcctttccccattgcttgtttttctcaggtttgtcaaagatcagatagttgtagatatgcagtgttatttctgagggctctgttctgttccattgatctatatctctgttttggtaccagtaccatgctgttttggttactgtagccttgtagtatagtttgaagtcaggtagtgtgatgcctccagctttgttcttttggcttaggattgacttggcgatgcgggctcttttttggttccatatgaactttaaagtagttttttccaattctgtgaagaaagtcattggtagcttgatggggatggcattgaatctgtaaattaccttgggcagtatggccattttcacgatattgattcttcctacccatgagcatggaatgttcttccatttgtttgtgtcctcttttatttccttgagcagtggtttgtagttctccttgaagaggtgcttcacatcccttgtaagttggattcctaggtattttattctctttgaagcaattgtgaatgggagttcactcatgatttggctctctgtttgtctgttgttggtgtataagaatgcttgtgatttttgtacattgattttgtatcctgagactttgctgaagttgcttatcagcttaaggagattttgggctgagacgatggggttttctagataaacaatcatgtcgtctgcaaacagggacaatttgacttcctcttttcctaattgaataccctttatttccttctcctgcctgattgccctggccagaacttccaacactatgttgaataggagtggtgagagaaggcatccctgtcttgttccagttttcaaagggaatgcttccagtttttgcccattcagtatgatattggctgtgggtttgtcatagatagctcttattattttgaaatatgtcccatcaatacctaatttattgagagtttttagcatgaagggttgttgaattttgatgggagaaaatttttgcaacctactcatctgacaaagggctaatatccagaatctacaatgaactcaaacaaatttacaagaaaaaaacaaacaaccccatcaaaaagtgggcaaaggacatgaacagacacttctcaaaagaagacatttatgcagccaaaaaacacatgaagaaatgctcatcatcactggccatcagagaaatgcaaatcaaaaccactatgagatatcatctcacacccgttagaatggcaatcattaaaaagtcaggaaacaacaggtgctggagaggatgtggagaaataggaacacttttacactgttggtgggactgtaaactagttcaaccattgtggaagtcagtgtggcgattcctcagggatctagaactagaaataccatttgacccagccatcccattactgggtatatacccaaatgactataaatcatgctgctataaagacacatgcacacgtatgtttattgcggcattattcacaatagcaaagacttggaaccaacccaaatgtccaacaatcatagactggattaagaaaatgtggcacatatacaccatggaatactatgcagccataaaaaaggatgagttcatgtcctttgtagggacatggatgaaattggaaaccatcattctcagcaaactatcacaagaacaaaaaaccaaacaccgcatattctcactcataggtgggaattgaacaatgagatcacatggacacaggaagggaatatcacactctggggactgtggtggggtggggggaggggggagggatagcattgggagatatacctaatgctagatgacgcgttagtgggtgcagcgcaccagcacagcacatgtatacatatgtaactaacctgcacaatgtgcacatgtaccctaaaacttaaagtataataaaaaaagaagaagaagaaaaaaaaaacactgtacacttaggctatactaataaaaaattctttcttcaatgataaattaaccttagtctgtcaaaaaaaaaaaagaacacaaaagaatgcacagaatcttaataatttctatattgaatatatattgaaattaaaatatttaggatatattgggttaaataaaatatattactaaaattaacttcacctgtttccttttactttttgaatgtggctactagaaaatttaaaattatatttgtggctcatgttgtatattaaagatatcctgatttataatatatctggacgttcctatgaaccaatcagaaataggcaaactgtccaattggaaaatgggaaagaatagacactctataaaagcagatacccaaatggccaataaatatgtgaaatgggggctcaagctcttaattaatcaataaaatgcaatttagaacgatattggcataccatttttatcaactaggttaatggatacttaaaaaagaaatgttggctaggttgtagtatagagttctctgtcttctactgctagtgagaatcttaatggtttcaacttcttacgacacagtttgtattatctataaaattgactgtgtgcacatactctataatccagcaattctatttattctgttttcccatatttattagagaaacccttgcacacatgtacctggagatatgttaaaaatatgtgcatagcagcattatttgtaattttaaaaactggaaatgagtagggggatgtatacatcagggataaactgatgtattttcataaagtgtatatcatgatgcactcaaaataaactgtagctaaaggcatctacctgaatgaatttcaaaagcataatattaagaaattaaacaagtaataaaataaatcatataataatccattaagttcaaaaacaggcacaaccaagtgatatgtatttttaggagtacatgcgtagaaaatatcctatacagaaaaacaaggatataaataacacagaactcatgatggtaattatctctggggccaagggagggatcctatcagaaagtggttcacagagagcttctaaaatctgataatgatatagttaataagctgattggtgagtaaatcagtgattatcttattatcattctttaaagtgtacatagataacttctttgtatgtataacagactttaataagttaaaacaaactacaaaacaactatggcatcaatccgattttgtttgcgcacacacacacagtagatttttaaatacgtattagaaaagaactctaaggaggcataccaaaatatttattttatggtgataagatggctacatgtagatgagtagttgaagtttgagtctggaaatttagattgcagggcaacttcgattgttgagctactttctaatacaaatcagcattctgttaattgtgcctatcaaaatatcagcatcattatattactacagacctgaacatgcaagcttggatattttaggaaaattttagatgattcctaaagttttcacacctgcagaaagccatgattggtccatttgatgtactgtagtcctcccttatccatggtttctcgttccacagtttcagtttcctgcagtcaaacatagtccaaaaatattaaacgggcaatttcagaaataaacaattataagttttaaattgtgtaccattgagtagtgtgatgaaatcatcttctcagtcccacctgggatgtgaatcatccctttgtccagtatatccatgctgtctcagctagctgcaccttaatcatttagtagtcttctcagttatcagatttcctgttgcactattgcactgtgttcaagtaacccttatttgttacttaataatggccccaaagcacaagagtagtgatactggcatactgttataattgttttttattttattattagttattattgttaatctcttactgtgcctaacttataaacatattcataggtttataaatgtaggaaaatgacacagcatctatagggtttggtactaggtatgaggatcttggaatgtatccctcacatataaaggtgaacaacagtacataagtttcctagaggtaaaataatttttgtttatataccccacaacaagtatgagtaatagaatattgtttgtattattatgtaattgtcctagaattcataaattactacattctcattccttggccaaatttctatgatagaattggcagtaccatatattacattagtaccaagtacattttgtaggtgacaatactgctcttttcatcaataccactctttacatgatggattcatggctagcaaacagaagtgaattatcagtaaacttgatgcatttggcctttctgatttttagataacgagaaaattaaaagtaggtctcccagctgtttccattcacctaacatcatgtcatttatttattaacagacaccttatcttgtctcttgcccttgctatttattcatttgcatgctaaaatttatcctaatgttacaaaagataatgcttacattactgaatagaaatgagtaagtttattcatgattgcatgaagagaaaacttgtttcaatagggactgaagaggaagccaaaaaagtatatcaaaatgtgattaaaagattaagaaaagtagtatgcctgggataaataaataaagtgaactgaaggaaaaaaataatctcctagaaatcccgataaaggatttctctctgctttagagaacacatcatatccacagggaatattgtaatgtgtaaaactttatagaagaaaaagtattcctttctgtccttggggctggcagaatgcatgcatttttaataataacaacagtaattactgttattttaatactaatttcatttcatgctaagcatttttaaatgaaaataccatgtctcaggtaggttaagtaacttgatggaggccactggtggaaggtagtaagtggtgaagccagaattcaaacctgggtctgttacactgcaaggcttgtgtgttaacctttgtataaaactagccatataccgaaatccatctaaatttttctgcaacttttaaccagattgagtcactcctgatacatagatcagaggtttaccgtaacatctaggtagactgccttgttttactacattacagaacttcaatgctatttattatttttttaaaaaaaagaaaaaacacagaaaatatgcccatgtctctgattagattcatgtaaaaagtcctctggctattatgactgctatgccaagaacaaaggtaagtggacaaagaactagctcaaaataagtcatttactaaaatctcaattccatcagttctgtctcacagaggaaacagtcattgcacctgttacaggagagaggggatttaaatatagaccacttaaccccttgagtaaagatagtacagagaatgattcacccaccaaggctgagcccagatttaatactgtctgtctaagttcccccaattcctaaaagtttctgactctgattttctgtggtgtggtcagggcagccagatggctttgaccatcctgagccccaagtctgaatatcatgctctccttgtgctttatatgcaagggcctgcttagaatgcactccagataccttgaaaccctcttcccttataagttagaacacatgaccagccccagagagctttctgggtgtattagtccattttcatgctgctgataaagacatactgaaaactgggaagaaaaagagatttaactggactcacagttccacatggctggggaggcctcagaatcatggtgggagatgaaagacacttcttacatggcagcagcaagagaaaaatgaggaggaagcaaagaggaaacccctgataaaaccatcagatctcatgagacttattcgctatcacgaggatagcatgggaaagaccagcccccatgattcaattacctccccctgggtacctcccacaatacatgggaattctgggagatatacctcaagttgagatttgggtggggacaaagccaaagcacatcattccgcccctggcccctccaaatctcatgtcctcacatttcaaaactaatcatgccttcccaacagtcctgcaaattcttaactcatttcagcattaactcaaaagtccacagtccaaagtctcatctgagacgaggcaagtcccttccacctatgagcctgtaaaatctaaagcaagctagttacttcctaaatacaatgaggatacaggtattgggtaaattcagctattccaaatgggagaaattggccaaaacaaagtggttataggccccatgcaagtccaaaatccagcagggcagtctaattttaaagctccaaaatgatctcctttgattccaggtctcacatccaggtcatgctgatgcaagaggtgggttcccatggtcttgggcagctccgcccctgtgtctttgcatggtagagcctccctcctggctgctttcacgggctggcgttgagtgtctgtggcttttccaggctcatagtgcaagctgtcggtggatctaccattctggggtctggaggatggtggccctcttctcacagctccaccaggcagtgccccagtagggactctctgtgggggctctgaccccacatttcccttcagcagtgccctagcagaggttctccatgagggcctcgcccctgcagcaaacttttgcctgggcatccaggcatttccatacatctgaaatctaggtggaagttcccaaacctcaattcttgacttctgtgcacccacaggctcaacgccacatggaagctgccaaggcttagggcttccactctctgaagccacagccagagctgtatgttggcccctttcagctgtggctggagcagctgggacacagggcaccaagtctctaggctgcacacagcatggggaccccaggcctggcccagaaaaccacttattcctcctgggcctccggtcctgtgatgggaggggctgctgtgaaggtctctgaagtggcctggagacattttccccatggtcttggggattcacattaggccccttgctacttatgcaaatttctgcagccggcttgaatttctccccagaaaatgggtttttctattctactacatcataaggctgcaaattttctaacttttatgttctgtttcccttttaaaacagagtgcttttaacagcacccaagtcactttttgaatgctttgctgcttagaaatttcttccaccagataccctaaatcatctctctcaagttgaaagttccacaaatctctagggcaggggcaaaatgctgccagtctcttgctaaaacataacaagagtctgtaaaaatgttctcccattctataggttgcctgttcactctgatggtagtttcttttgctgtgcagaagctctttagtttaattagatcccgtttgtcagttttggcttttgttgccattgcttttggtgttttagtcatgaagtccttgcccatgcctatgtcctcaatggtattgcctagattttcttctagggtttttatggttttaggtctaacatttaagtatttaatccattttgaattaatgtttgtataaggtgtaaggaagggatccagtttcagctttctacatatggctagcgagttttcccagcaccatttgttaagtagggaatcctttccccatttcttgctttcgtcaggtttgtcaaagatcagatggttgtagatgtgtggcattatttctgcgggctctgttctgttccattgttctatatctctgttttggtaccagtaccatgctgttttggttactgtagccttctagtgtagtttgaagtcaggtagcgtgatgcctccagctttgttcttttggcttaggattgacttggcaatgcgggctcttttttggttccatatgaactttaaagtagttttttccaattctgtgaagaaagtcattggtagcttgatggggatggcattgaatctataaattaccttgggcagtatagccattttcacgatattgattcttcctatccatgagcatggaatgttctccatttgtttgtgtcctcttttatttcgttgagcagtggtttgtagttctccttgaagaggtccttcacatcccttgtaagctggattcctaggtattttattctctttgaagcaattgtgaatgggagttcactcatgatttggctctctgtttgtctgttatttgtgtacaggaatgcttgtgatttttgcacattgattttgtatcctgagacttttctgaagttgcttatcagcttaaggagattttaggctgcgacgatggggttttctaaatatacagtcatgtcatctgcaaacagggaccatttgacttcctacccatctaatatccagaatctacaaagaactcaaacaaatttacaagaaaacaaacaacccccaaaaagtgggcaaaggatatgaacagacacttctcaaaagaagacatttatgcagccaacagacaatgaaaaaatgctcatcattactggccatgagagaaatgcaaatcaaagccacaatgagataccatctctcaccagttagaatggcgatcattaaaaagtcaggaaacaacaggtgctggagaggatgtggggtaataggaacacttttacactgttggtgggactgtaaactagttcaaccattgtggaagacagtgtggtgattcctcagggatccagaactagaaataccatttgacacagccatcccattgctgggtatatacccaaagaattataaatcatgctgctataaagacacatgcacacgtatgtttattgcggcactattcacaatagcaaagacttggaaccaacccaaatgtccatcagtgatagagtgaattaagaaaatgtggcacatatacaccatggaatactatgcagctataaaaaaggatgagttcatgtccttcgtagggacatggatgaagctggaaaccatcattctcagcaaactatcacaaggacataaaaccaaacaccgcatgttctcactcataggtgggacttgaacgatgagaacagttggacacaggatggggaacatcacacaccagggcctgtcgtggggtggggggagcggggagggatagcattaagagacataagtaatgtaaatgacgagttaatgggtgcagcacaccaacatggcacatgtatacatacataacaaacctgcacattgtgcacatgtaccctagaacttaaagtataaaaaataataataataaaaataacaagagtcacctttgctccgtttttcaacaagttcctcatctccctctgagaccacctcagcctggaccttattgttcatatcactatctgtatttttgtcaaagccattcaacatgtctttaggatgttccaaattttcccacattttcctgtcttcttttgatccctccaaactgttccaacctttgtctgttacccagttccaatgtcaagttcacattttcgggtatcttttcagcaatgccccactctacttgtaccaatttactgtattagtccattttcatgctgctgataaagacatacccaaaactgggaagaaaaagaggtttaattggacttacagttccacatggctggggaggcctcagaatcatggtgagaggcaaagggcacatcttacgtggtggcggcaagagaaaaatgaggaggaagcaaaaggagaaacccctgacaaacccatcagatttcgtgacacttactcactattacaagaatagcatagaaaagaccggccgcccccatgattcaattagctccccctgggtaccttccacaacacgtaggaattctgagagatacaattcaaattgagatttgagtggggacacagccaaaccatgttactggggaaacttctacacaaggtaaacacaaaggtttcttaacagcagactgcctcttactttgtaataaaagcatagcaagacttccttaagttaaaatatgctttcccctaagatttttgtctttatgtcctaagatttggtcttacttctaggcatagttccatactatgattacctcgaccccaccaagtacaagcccatctagaatccaagatagagcctagatgttgggtaattttcagttcctgtattcacaagacaaccataactcaagattatccattgcttcattgttcagaatattcttcattaccaggtggtagagctgatctcctagacacctctgcaagtacaggcaaatgtcctaaatcccttcctccagggtatgtgagggccgtatatgagcccacccactaacttttgtccattgctaccagatcctttccacccattctaaagagaagcacgacaaatgtctactaatatctcttttatgttgtatgcttgtctatgtgtttgtgtgtgttggaaaataactatgctgttaaaatataacttccaaagttgctctggactataatatggaaattcatagcaagaataagggataaattgaatgacttattcattctctccttacataaaatcgctttgaaaataaggaaacttcaaaactgtgagacaatattttgttacatttgtgaaatggtgaaaatgattccttcattaaacaaatatgtattgagccccaactgtgtgcatgtcactgtactagcccctggggcatagtggtgacaatggcaggtgacgtggaggaggtgctgtggaaggctggagggggcaggccagactgtgcggggctccctcagtgggaagctgggctctttttaggagactgggtgtgacagtaggtgtgacatgattttctttgtgccagtgccaggaacagattagaagggaggatagagtgaattttaatagacctgttaagctattcactcaccgaactggtagaaaactcatctttgatttggaaggattgagatagattttctcagttttacagttttgtttcattgctgataatcagtaaggtgcttcagaactttctatacaaatcaggaagtgagtaaaaaaaaggcaattgcagttaaaatgcttaatctgtgaagctattatgttttcactttagcagtaacttgagatgaaatattgtgaaactgccttacagtttatagttttacgataatgactttccatctcctcattatttacaaagctcttatatgtcagtaactaatggcacaagttctattttaaataattgctgagacactccacatgtattttcatactctaagcagcttctaggggaagtttttttaaaaaatttcttttagttccttactgtcatgactgtatcagagaaaatcattatgtagctccatgttttcgtgtatgtattattaaaagactgcctaacactgccatcttattgcattagaatgactgttctccttgtaatacatttgtagtgttgacatcactactctcaaatgagttacttagtcattgagattgatatgtgatattttaacttctagctcatccaggcatcctttctgttctaattattgttttgagcttttggggccaaatggatactgagtcaaaagagaatatacaggacacagaggcgcagacctgccaagatgctgcttattttaattcctaatgctctttgagaagcattttattctactcatttttggatgatatttcagtggcttacttcactgctgttattaaaaagaatgctaacttaggggagatttcaagcagttttcatttcatctctttttccattcaaattccataaaaagtaagacacctcaagagaggtttccatatatatatctgaactggtaagatgattatgttgaaggagaaagagacagagaatactggatttgaaacactgctgtcactgtgtaatcttggggaagtcactatatttaaaaaagacttatatgcaaaatgggaataatgatgctattgctttgaattgtcatcagatttaaatgaagtaatatatacgaatggtgttttgtatacggtaagtctctatacaaacgttagtcaatttcatcaaatgaggaatttacatctactcaaggacattcctgttgggaacacaactatcataaagaagccacagaactcacacttgatggaaagcagctataaaatggattgaaaagaatccaataaagaaagtatgccattgtttgcatcacgatagcccacagtgataaatcagcttgcattcattctcaggcacctgcagataaacacgagccagagatactgtgcaggcactcttgcagtggaaagaaaataaaatcagaatactggtgtagtttgaaatttttaaagcttaggatgatacagatagatttttcaatgcttatggtaaagaaatgtgtctctccttttaccatcacagacagtcacgttttaaattaaatagacatagatttcttagaggtcaagaaatttcaacagcaaatatatgtcttctctgaggcttacaatgtagtgaagaaattgttgtcagatgacaaaagatcagcctaatgggaagcaaaaaaagtgttttaatttttttaattaacatttacatttattgagctattgactatgtgtaaaatgttgtgccaagtgctggcctatgacgcctggggaaggaaaagggaagataataggtatggtgttctcactgaagtttactatctagtgagggtcataaaagtcccccaaaaaacccagggaaatagaagaattcaggcaatagagtgaaggcttaagtgtagaaaaacatcagttctctcaattggaacttggggaggatgctgcaatcagatggcagtgttaagcagtccttcccgtttcagaaggacatttgagaatgctgcatccaacatactcattttatggataactcaaatgaggtccagtgaggttgaatggcttgccaaagtctcagagcaaaactgtaagaaaaaccagtcttcagttgcaccccgcccataggccacccagctcaggggctagtagccactgagatccaacttatgccagcccttggggccagctgtagggatgactcttcctgggggaaagtgtctcatattctagttgtcacaaaggcatgtattacctacgtcctggttctgactccctagttagttcttttccctgcaattagtggtttttcagatatttcccttcctcattattaaactcttaacctaaaaagtaacccccaaactgatagaaacagagttttcctggaagccctgccaacttaaactcctcctatacccctatagatgttgctaaatggttttgtgttgcagacttgctgtttttcagtcattggtatttaagttgatagccacttgttttggtatctcaaaggatgtccaacacctggggcaatgtatgtatactcatgtgtcaaataaatgagtgaagaaatgaatgacgaaaagacaatgagttcaatagagtctattttactggttgccactgatttaataatttaatgtaataatacgttaataataactatttaatgataaaaccatttttaaaccaaaataacacaaaataaataaaattaataatataacttatcaagagataaagttatttctttggaaccgggttatgagtggccctcacatgagtctgttccaaagaaataactaacttcgtccctgtgatatatgcctttgtgacaactagaatatgagacactttcccccaggaagagtcatccctacagctggcccccaagagctggcaataagttggatctcagtggctactagcccctcagctaggtggcacatgggcagggtgctactgaaaactggttttgcttacagttttgctctgagactttgacaaacattcagcctcactggacttgatttgtgccctctataaaatgagtacgttggatgcagtgttctcaaatgtccttctgaaatgggaaagggtctcttgtccccctcgcagggtgtgtgatgggggtgtggctcacttcttcaccgccctgctgctcaaacctctaggggagcatacagatgggcaggctgtgggactccaaccccatggcagtgtctaggggtgaatgtttacagctgaagccccagtgggcgtgtgttacagggtgctcttttagtttagccatccataggtagctcgtgttagtcagctcaattagacccctgccttactgcagggacagagggctttctgtatcctagggatcttgcctctgtgtaccagaagaatcagatcacacgtggacttggagaatgagtgcaaggttttattgagcaggttttatttactcagtggactgggctctcatccgactgccccagccaaactccatgtcattctgccactcagtggcctgctggcatgccgatgcctgttggtgcgttcctctcgacggccagccacctgtgtgtgcctccattgatgtgcttctctcgacatccagccacctgtgtgtctccctgctagggtctcggggtttttataggcacaggatgggggcgtggcaggccagggtggtcttgggaagtgcaacatttgtgcaggaaaacaaaaatgcctgtcctcacctatgtccatgggcccgggccctgggtggagccctagtcagggaccacgccctcctctacctagcacttcccttccatatcatttaaagggaccatgcttttcccttcccagcacttcccttctgtatcacttctctgctgtagatttctataattttaatttgatgaccttcatctaaataaactcattttatttatcataactctggagtcaaaacatacaaatgaacttatcctgagtttgttgctattatttcaattgactatttccctgcctttactcagtttagtccggtctcttcttttcacccaaagtccctcatatgattggctcattatggcaagaaataaaaggaagcgggaagaaaggaaagtgaaccataagtacaatatgaaaaactaagtttgttttttcttgagtgacaaggacgcagattccgaatatgattccaaaaggaattccagaaaatatgagcagtatagtacagcatagttggaataagtattaatatattacctcccatagcaactatatggggaaaagccatcttaattttttatgccatgtctataaaaaattgaaaaagaaaaaacccataggaatggagttgtgttgccaacatagaaaaacctgtggggttttattaattcaaaatcaggatcagtactgtcttagaacctagccatcactttgttataacttttcatgttaagcagaaaagagacatgcttgatttcctcagttaatgaaagttttacaatataggtgcataggaaagttaaaaaaaagaaagaaaaatgtctcaactccacccatccctacctcatggaaatctagaatactgctcagcagactggcagcagtctgtgtttggtttctcttctatactcttctccatcactgtcaactccgtgacccttctttacctcatggcttctattgcagtatggcctctgcctacaggcttctctgtcattcaacttctgtgtcactctatcctctttcaatatttcatattctgacttctcagagaatataaaccatatgccacatcattctctggtatacagcacccaccccttgccaagccgcttcctagggcactgggcaggctgttggtggcctttatgccacacatagttatggccaggcaggcaggttttgcaggggagcactaccacttgtgcttggtggcgagggggaccactcagctgtcggcagaggtgggccccacagctcctaagcggggaagcagtgtgtagtataaatatggaaaccagcattttgaggcctttggtcaatatgaaggaaccgcacaatggagaagatgcataattcccttcctttcagtgccagttgaagcaggagaagggctaataactgtaatgcctgactgtattatgggaaaaattgtaggggggaacagcaatatggaagaagaagccccagattagctgtctatgagtcactaaactttctcccatcttctcaaattaatactgtcacaactacagtttcagtattcctgatccaaaaatctaaaatccaaaatgctccaaaattccaagctttttgagtgctgacatgatgctcaaaggaaacgctcattggagcattttggatttcagattaggggtgctcaaccagtaagcataatgaaaatattccaaaatctgaaatctgaaacacttctggtctcaagtattttgaataagggatacacaacctgtataagttcaaccatgaaaacaatcattaagtaataaattaccttctcctcccctaattttttatatttccagtcactcttatccatataacttattctctggcagtatttgtagtttgatatcttacccactccaactttgtgacatcttgtttgtttccaggtagactttatgaagtaggccatggccaggcttgctttggatgtgataatggaataagagaaagaacttcaaagtattttcttatgaattaatagagtctaaacattttcttagaccactcaaatgctaacgtggaccctccccaaggcagagttcagggctcctctgagcccgtagcctgttaacttcacaatgaccagagaacttcaggaatacaggaggaactggagaggcagaagtaggccacatccacatcctcatgtcctggattttgcatacacctattgccttgcttgttggccagtttggtgccaaaatgaaagtaacttacgttacctaagacttcattttcaccagtcttctatccagaccaacctttgtggcccaatttactttaaaatgattattttaatggctgcttttttattcagttgtaccttaattgcattaactacccttccattgtgggagacttttatggtttctaattctctatctatgttaatcttgtgataaatgaaagcacagagaaaagtacatcttgaagcatataatttcccatttaagtggtttcctaaggatacactttagatatcagactgagacagaggggatgaatattctaatgttcaaattgccaaatttctttccaaaaggaaattatatcaatttaaattgttaccagaattagagactgtaccactattgctatagtctcatcacctttaaatgttatcattgttttaatttgcatctgtccatactccatccatctattttgcatacttggggtatataaggtagtcaatataccgataaggagtttagatgcaatgatttatagataaataatattttattcaggaaaaaagtggctttttgctccaaatttctaaggcttttgaaatttacccatatctatgatttaattgtctcaataaagacttttttattagaaaataatagtaattaacaaaagaataggtttttcatcttgtctgtaaatgacaatcttctgcaggaaaattacaaaaccaaaaaaaaaaaaaaaaggctggacaatgggaaatcattcaagggcaggattttcaacatggtctccacactgcaagctaggaaaccatacttttctaaaattattcaaaatcacagagatgttattagagtttaaatgctatgtggccacccttgacataagtttatttcattttagattattaaataggaaatatgcctactgaacaataattaaaagtatctgagaagtaatgggccaagtttgtaacagtaacttttcatggttgctttgaagggatgcccggaagttagaatttcttataacttgggttgcttagagtaaatttacaccatcctaaatctctggttgggaattaggattttgcttctttagttctcctcagataagagtgaaggtgtcctatcctggagagatactctgtgctttcctaggtacgttttcaccactaccctcaaattgtaatggtgtaattatatcataaatttctatcaataaagaactattagggttaactttctatcaacaaagaactattagggttaacttttagagggatatctatgttttgaggtgatagcttagggaccttgtccagaaaaatcacagtcctgcgtcaggaactggaaataaaatcgtgcttcactgacactcctcagtaatgaattagcaagcttgtgcagtaagcccagtagaacgatggtagatgtgtcacacgaactgtagtaagctctccccttttctaaaattctggatcttttataaactctttgggaagggaactaagtttcatacatttatcagtgattaggactcaatatatgaagttggaagttttggtttttatacacaggtcatatttcttttcctctactcccatatataagcctggagcagtcaaattatttcatcatggagaataaaggggcaatatagacagcatgtgctgtgtaggaagcaaggaatatactacttatggctaactagcaagaacagttgtatatttgcactgcttaagttcctttggttatttcttaggtttgaaactctaaagataaatgatggagaggtaacattttaaaaggcagaaatagatctacgtatgaactaggtttggtgggtgttgagtgggcaggggagcattgttccaccttcaaagggagctgttaatttctacatgttattactaaagggagttctgtgtattccatgattggaacagggaaccgattatttatttggtctgtatatcaggttttagcctagtcattctgctggtaaggattagttctctcactcagccaaaatgagacatatttcacctgattgcatgcaattctgctgctttgtccactgcagtgccctctgagcagcttcccattattgcagtcattttcaggttttgctctaggatgtggtgaaaaggtgccacatccaagagcatgactttttctaatcccagcccacacactgatgtcaaagtatttttgttccttttcgggagcattatgttcttctaccagcagttgccaggaaagcatgaggatattttgcaataatgtttgaaatctgcatttttattttttagttggtatttctagtgtttatattttgaaggtcaggtgtgatgtcacattctcagtcattagctatctacgtattgctgagtatgtaactctgccaagttagtgcctgcagtgccttcccaaaatcagcatgaggatgatgaggagctacttggccttttttttgcacatgtaaacgtgcatagccagatggcaaaaagcttcatcagggcaagcacagagtccactctaaagtatcctacttcattgccacagcaggagatcaccctaggaactgtgataataacgaaaagagtaaatagaaaattgttcagtgaatcttagttatttcattatttgtaagtattcctccttacaggagcctgcctacctgcctgcctttcttttttctttcttcttctcttttttctttcctttcctattttcttaaatcttcatgactcaaaagactatttcattgctggggattattggtcaagggacatctaatgctgttttctactcacaattaaacaaatgcaaatgtaaaagcttcatcattcaaggaacatttatctctacatagggtattatgatggacaataggttgagatttaaaaaaaaaatagcacggtgattattcttttggcaagcccttataaattgctttctatgtgccaagcagttatcaccttgtttaatctttgtaacaaccctatatggactcttattttacaagaaaattgagacacagagaggttaagtaacttggccaaagttacaaagctggtaagggagagaactgagatacaaactcatgcagtctgacattagaccctgtgctcttgacccttgtgccatgctgtactccctgggatgaaatctcagtaccgtagaagaaggagtatattaatatatgaccatacagagcactatatgataatgacataaatgaggaaagtgaaaaggagttgagaggaggagagaatatctcggacaggtgaatgggtagcatccacacaggccttgggtgatgaggtaggaattgatggtagatactgacagtagatatcaagagtaagagtttgccttcagttacaggaaacgtcatgagtaggagatactgggtctagactgtaggttcagaaaataagtaatttagtttagttgcataaaaggattgtgtacaggagtacaagataaggtaggctgcagccacattttgcaggccattttgtagactgctggaataaggaggatggaggtttttgagcagtgaggtggtcagggcgcttaacttggtggcatatgagtttgaagaaaggaatgataggagcaggaaaatcaggaaactgtattcatttactactgcaacacacattaataatatagcacttcctgtgggtcaggaatgcaggcatagcttaggtgtgtcctctgcttagggcctcacaagcctacaatcaatgcacagactggagctatggtttcctctaaggctcagctggagaaggattcatttttgttagcagaattcagtaatttgtggttttgtgctgaggacttcagtttcttgcttgctgttggacagaggctgccctcagttccttccacaaatctcccagcataggcatcctacagcatggcgacttgcttctccaaaaccagcaagggaatgagagacttcagctcaacagcactggaatcttacttacttaatcacatatgtcctgtcacttttgccatattctgttggtcggaagcaaatccaaggtcactcccacactccagaaaaaggaactacacaaggcatgaaaatcagaaaataggaaccatcagggttactctagagtctctctcccgcagaggcagaggcaggtgatgggacacacactcggagtctaaattaggatggtgttaatgcaaatagaaaagtcagattcaagaaattatgtctaggaaatatggtttcttgcctatatcatgtgaaattctttgtgtacgttctctaacataagcatcaaaatagccttttgaggtaggtaccaggaaaatccttatttcacagatgatgacacagctttgagatattacacctagaggccacatatatcctaactttacctgggtgtcccagcctagatctgaacctaggatgtcaataccaaagctcctagtcttggccacttttctttacttggacttaaaagtataaaggacctaagagaagtggataagaggaaaatgaaaataactgcaagattttaaaccattccaatttagggtaaggtggtgttaactaaaatagaaatgtcatgaggggcactagtaaagtaatacttatgctatgcatataccacatgccaggcagtatgctaagcattgagtgtgcagatgctctatgcttatccagatgggaatatttaatgttcccaacagcccatgatacagttctttccccgatctcacagatcaggaaacaggaccatgccagtgcccgctaaactcaaggttctacaaatgcactggttggtattttgttcataactgttattgctaatgtctgatgcataaaaagtgctcattatataagcttttgaatgaatatggctattaagtggtagagtcacgatttgaactcagagcagccccatgctgccttctggagaggtcatttcgttgtagtcatattgcatttgaggccatggcaggatctagatgttcatagcaactctgctattttaggtacttaggtacctaaattccatcagtggaacttggaagaaagatcaaggccagaataaactattgaggagcatccacatggaaattataaagtcctaaaattagatgagatgattatgagagagggtataggtcccaaaatagaaccttagaggacacctatatttagaggttgagaagaggaagaggcaatttaaaaagcaatgaatacatataggtcagagagctaaaatggagatacagatataaaagcaaagagggaagagaaggaaggagagttgtcagcaatgtcaagcaccacagagtaatcaaagagcatcaagattaagacaagaaacctgaatttgtatgttaggagctaattgatgacttttgtttgaacacatccaggaaaaagaccacataaaagttagccagcatctgggagggtgggagagttgggctgtgaaagaaggattgtgtagtcaggtagagctcgtgagtataaacttctggtatttcaggagagctagttgtggtaatatgagaggagttgaacatttgagtaagagagatcttgtgtattgtagacagaagggaaggctcaagtaggatgaaactaaatagggcaggaaaagaagagatattgatggaacgtgaccccagaggaggcaggagaatgagatgcaagaacactgataagaagggcagtcctcagaaagggtgacagacttgtaccaccggagggaggaaggaagcctacaccctacaatgttttttaaaaaactttcttttctcaaatattgagagaaaaatatagaaaagtagaagctgatagagaaaaattgatgttcaaagtaatgatcttcaattcttttaaaagaattccagttgttaaaagatctgttcttcagattcaaatgtatcaagtcctacaaagcatctccaaattcctggttttattttatttttctcaactgaaattgataaatcttccaaaaaaaggaggtaagttcgtcacataggaaacagaaggaaagatttcaggattacaagatagtaagaaatattttaattaattgaggcaatagttgacaaaagtttatggaatgtctactcttagataagcagataattcagtagagaagacaataaaggataaaataagcatcattagggaaccaactgagataaaatggcatgaacttttaatacagcccaacagcatggtttcataacactgctcagtttctgagaagtggttgttgaaagaagttaataagccacaccgggttgggaactcaaatggtgaaaaatggcagacaaaaatagaggaagaatggattctagaggctagtgaagacagtatatacttcattttattgtgtttgccatcattgcacttcacagacattgcattttgttttacaaaccgaaggtttctggcagccctgcatcaagccagtctattgtcaccatatttccaatagtatgtgctcatttagtgtctttatgtcacattttggtaattctcacattatttcagactttttcattatcatatctgctatgatgatcagtgatctttaatgttactattgtaattgttgtcgggcatcacaaactgcacccgtataagacgtcaaacttaattataaatgttgtgtgtgttctgaccactccaccaaccagctgtttccttctttgtctccctctcctggagcctctctattccctaagacactacagttaataactctacaatggcctctaaatgttcaagtgataggaatagtagcacgactctcactttaaatcaaaagctagaaataattgagcttaatgaggaaggcatattgaaagctgagataggctgaaagctaggcctcttgcaccaaatagccaaattgtgactacaaaagaaaattcttaaaggatattaaaagtgccactccagtgaacacacaaatgataagaaagtgaaacagccttattgccgatatgaagaaagtttgagtggtctggatagacgatcaaaccagccacaacattcccttaagcacaagcctaatccagaataagtctctaattccatttaattctatgaaggctgagagaggtgaggaagctgtagaagaaaagtttgaggctagcagaggttggttcatgaggtttaaggaaagaagctgttttcacttcacaccttgttgcaaggtgaggcagcaagtgctgatggagaagctgcgtcaagttatccagaacatctacctaagataactaataaaggtgatgtattagtctggtctcacactgctataaataactgcctgagactgggtagtttataaaggaaagagatttaattgactcacagttctgcagggctggggaagcctcagaaaacttacaatcatggaggaaggggaagcaaacatgtcctcttcacatggcgacaggaaggagaagtgccaagtaaaaaggggaaaagcccattataaaaccttcagatctcatgagaactcactcacaatcatgagaacagcatgagggtaaccacccccgtgattcaattacctcccactgggtttctcccacaacgtggagactatgggaactacaattcaaaatgagatttgggtgaagacacagctaaaccatatcaggtggctatactaaacaacagatttttcaatgtagatgaaactgccttctgttggaagaagataccatccaggactctcatagctagagaggagaagtcaatgtctagcttcaaaggacaggctgggtctcttgttaggagataatgcagctggtgacttttaagttgaagccaatgctcatttgccgctccaaaaatcctagagcccttaagaagggctaaatctattcagcctgtgctctaaaacgaaacaaaaaaacctggacgacagcacttatatttacagcatagtttggagaatattttaagccactatggagacctactgctcaggaaaagaaaaaaaagattcctttcaaaatattactgctgattgacaatgacactggtcactcaagggctctgatggagatgtacaagatgaatgttgttttcatacctgctaacacagcatccattctgcagcccatggatcaaggagtcacttcaactttcaagtcttattatttaaaaaatgcatttcataaggccatagctgccatagatagtgatttctcagatggatctgggccaagtaaagtgaaaatcttctggaaaggattcactattctggatgctattaaaaacattcgtgattcatgggaggaggtcaaaataccaaatgaacagtttggaagtttgcaagaagttgttccaacctttatggatgactttaaagggctgaagactttaggggagaaagtaacttcagatatagtggaaaacagcaagagaactattgtagaagcgaagcctaaagatgtgactgaattgctgcaatctcatgataaaacttgaacggataaggagttgtttcttaaggaggaacaaagaaagtagtttctgagatggaatctactcctggtgaaagtgctatgaacattgttgaaatgatatcaaaggatttacagtatcacacgaacttagttgacaaagcagtagcagagtttgagaggattgactccaattttgaaagaagttatctgggtaaaatgcatgctacagagaaatatttagtgaagggaaaagtcagtcaattttgcaaacttcccagttgtcttattttgagaaattgccacagccaccccagccttcagcaactactaccctaatcagtcagcagccctcaacattgaggcaagaccctccaccaaaaagatgatgacttgtgaaaggtgcagatgatcgttagcattttttatcaaaatattttaaaattaaggtttgtacatttttagacaatgttattgaacacttaatagactgcactttcatgggaacataacttttatatgtagtgggaaaccaaaaaatccgtgtgacccactttattgcagtggtctggaactgacctcgcaatatctccaagctatgcctgtattggcgtggtctaagctgagcagtgaggtaaacgaatactgaaaggataatccaaaggcagatctgggtgtagcacagatgatcagaaatgaggagataaacaaagtggtggttgtgatcagaaaaggaaggctcaaagtctgaagtaaaatagttccaaatcaaggaaactataaagtgctgtctctgtagtgttggagattaaataaggaactatgaggccaatgcattatacggagcacagaaaaccacacactgcgtgttttcacatataattgggagctgaacaatgagaacacatggacacagagaaggaaacaatgcacactagggcctgtgggggctgggaggagggagagcatcaggataaatagctaatgcacatggggcttaatacctaggtgatgggttgataggcacagcaaaccactacagcacgcatttacctatgtaacaaacctgcacatcctgtgcatgtgtcctggaacttaaataaaataatttttttaaatgaggccaatgaattaaaaataaatgaatgtggcaggggatgagaggaggtagactgagcaggcacccaaatcatcaagacaggtggaatgttatgatgagttcataaatatggtaacaatagggcttggatgacaaggttcaaagatagaggttgaaggagacagaacaatactctaaattgacaataggggataggaatgtttttgagtctggtaatatcttcaggggcaattaaggtaaagaactggaagttcaacttcagaatggatctaaactgtaggaccctttgctttactatggattaagaaggcaaggtcatcagggagtgactggtagagaagcaaggacacggagcagaaagggagagggctatttggaatcagatagaatcatttgtttccctcatccaccccatcaccctttacaggttactcttctaatccttaaaatagtctacaaagtattatccccattttatcagatgaaaagtatctggctctgaaatttgaatcttgtcatgattgcaaatgccatggtcttttcactgccacatactgactctcagtggtactgaagtgttactgcagcttccagggactaattagaaatcatgtctaatttatgtgaaatggttataaaacacggtgtctttgttttgctcttgaattatacttggctgtaaaattgctatacaagctcgcatatctaatactgtatatttagttcttattttttaagaaaaacattttggactcttaagacattaaggaatttccaaatacataaatatgatcatattgaatttctgcaactgtagtcaaaaacattaagttaatacttatattgcattatttttcaggtgtgaaaatgaaaccaagttcaaaacagaagatatattttgggcttacaatttctgccctactccatactcctggactgcacttctgggccttattttatatcttgtcttctttgcacctggtaaacaaagactttgttatactgttgcattaattgaattgcctctttttggagtagataaactataatttttcaaatttcttacatgctattttactaaagtttttaatgttttatttctcaggaatgggaccaatgccttggactgtgaattctgaaatatatcccctttgggcaagaagtacaggaaatgcatgttcatctggaataaactggattttcaatgtcctggtttcactaacatttttacacacagcagagtatcttacatactatggtaagataatattttttctaacatagttttgtttttatttttatcactatttttagatacactataatatcatttgtgattgagactatgtggttatattttgctgttataagtatctccatgtggctttcttgtcctccaaaggcatcggaaatgtgtctgggaaagaagagagggattctcctatcctaaacagcactgcttcttgttccacagtgcttagggctgtcacccaacccctctcccaactcagacatctcccagctatctccccaggtggaagtctttacaccatagcttttagtttcacagaaacaaacaaaaaaaaaaaacagaaaatggtaaaaagatgtaggcagggagtctagggccaatgagatgtcctgtgacaggcatagcgtccagtccaagagcagaatctgcgtagggctgaaagtagcttcctcaaatgcttaacagtatgctgtgctgtggccataccttccactgtatcacctgtgctgctcaggccagtgcttgtgcatttcagtgtcctctgagaccagtacttaccacttgcaaaagtgtaaacatgacggaagtattcaaatgcaaatgtatggaggccataattcaaaatgaaaaacaatagtgcttagtggctgagtcaggaaaagactttgctttttagaaaaaagatttctgcattgttcacatgactttataggttgcaataggattattcatgatgaagtatgaggtttcattctaatatcctcataagtccatgtggtagagacggaatgcctgctgcttagaccattctcccagaagagcttctctcatctccccgcaatctctttactctgtgctctggccacttatcatttctctttgcaagaacaggtttgtctgcccttagctctctctagtagactataaatccctggagggccaggactgtgccttgttcattgttacattcccagttcctgccaaggcatcctgttcacctgataagcaccaaaaagtgtttgtcaaatgaataaatacatggataaattttgcagatgaatggtgaatatgatgaaacattataaaaatctattccccatctcttctgaccatgctgaactggtatttgcttttagttaatggtatttatctaatgcttttattatcttcataaaactcttctctctcctaatcaccacttaagacatttgaaatatttattttcttggaaaggaaatgcactggcattttaaactggatatatatttagtatattcagctggatcccatttggcaattaaaatttttcgataaattcataaacttatcttcatgacataataaatacgagcacaataaatatttcctcgtatttactgattctagagaacacttaaatatttgaagacctaagtatatgctcgcatcctgagaaagcatttttcatagaaaggcatagaccaaataataaaagtttacatgattatacttttgacagcaaagctcctctttcttgaatttatcctgccagaaaaccagagaaaaatgaggcaacagtaatgaaatttaaatagggcataagcagaattctttcaaaaataaacagttaaaagtgtgttgctttgcattaagcttctctcatgtcagagcactggtccatttggtctactactctctagtagtagaaaaatagttcattcaggctagtttttctccctttttgtgtctcattttaatccacatgttactggtttatgtaagctatgcatttatattcctcatttaataaatatacatcctaatcgtgtattcctctggaaatagttatgtcttctttgttgcctccttttttattgtttcataagatctcaaaatttgattccttcctcaaccatattgcttacacaggtctgccttgtgcccccattcaataatgtttattactaaaaagtatcattgctatatcaccaatatgccattttatatacagcacatgtggctaaagagatcccttggggggcattatgtcaaagcttctctcttgaggtagtcaatttgtgtaattcaattaaatagttgttttaatctggaacttaatgtagggctctaataagatttaaatccttagaagaataaaggtgaggaatatctaactgttcaatagtcctgatggactcgttacagacattttttcttgccattttcactccaagggaggaataaatgagaaactgagatagtgactgatttgaccatgacatggaccaggtcacagcctcccaggtctgcccacactcctccacgacttagccacaggtctaaccattggaacccacactgagtaggcagttttggcatttgcgtgctttggattcctcagattttgtaaaacggtcttgtattttaatagcaattccttgatattattcagctttgggaatccaggtcacaagaaagaatctgtaatcaacttcaggaatcttcctaacccaacaaatgttttttaactataggagtgagtttagcgctgacagatttgatttgttacttctaattatgctactgttcccaaattgtgaaagataatgatgaagataaaatatactattatatttaaaagtcaaactgggtttgctgttacagattttgtagtttagaagcctagtttaatctaaaatgttttaccatctgtacttattttttctttatcttcatcataattactatcccgtctttgtccctccctgctaaagattccatttctcttcctacctccacagtcttgcatatctgtactcagaacacaggacttcatctcctttcattttttttttgtcaaaattcccccattctccaagagctagcttatcagtatcaccctttttgtaaaaacatcccaattaattagtcacactaatcttattctgtatcttaatagcaactcttcctttcctggtcatttagtagaatttaacaatctgggcatcacttttttgagcaactgatattcagaattctaatgggcatgataacatacattatttctattctttacagttgggcaaagctagaattattttccccattacacagatcaagtctctctctcaaccatctcttaactatatctcctatacatgcccctgattttggctgtaagatttacagaatcataaactgccaacacttaagtaggagctgagaagcccccttattttacttaatgaggcaacagaggcccagagaagaggttaaatgactatccagaagtcacatggccaacacttaaactcagttcttcccactcccagtctgatatcctttctccagccaattgtcacattagtttttcatcttacttcccccatctcatacacatgatggtctggactgaaagcctaaaattagacaggggctccattttactttgttgttttccaccatcaaaagtacaagtatagtttcttatattcaaattggcaattcaattatgtgtgtgtgtgtgtgtgtgtttggtagagacaggtttcaccatgttggccaggctggtcggaattcaattattttaaaagtccatcttggaaatgtgtagagaatataaacaagtcatacattcatatatctcatccatctaggcttgctatcatgacccttagaaaaccaaactagctaatatttatgtgtttctggctgttctgcattgacatgcataatcttacagcaaaacaaaattctctgacttcatggagtttacattctagtggagggaaatgaaaaacaaattaagaaaggaacttcttctgacctcaaagtgcctctagtgtaatagacaaggcaagcatacgtgtgtgtacataattataatatttcttggttgttattttaggggtctcaacaacatgctgtgatagcacatggaagagaataattccctctagtcagggaagggaggaaaggcttcaaagccaaacttacatctgagcctgttctattattcttgagtttctaaacttgagtttagaaagatacattacatcatattctcagagttggaacaattggagtaaaccaggttcatagtaattttttggtccatttcatactgtgattatgcatgactgaccagaaaaaaaaagtcaaaatcaagtaatctttccaacttaagcctctctctatatattcatattcatgtatctattatattccgttgcaggagctttcttcctctatgctggatttgctgctgtgggactccttttcatctatggctgtcttcctgagaccaaaggcaaaaaattagaggaaattgaatcactctttgacaacaggctatgtacatgtggcacttcagattctgatgaagggagatatattgaatatattcgggtaaagggaagtaactatcatctttctgacaatgatgcttctgatgtggaataattttcagctgctcatatatttagttatttaaacaaactggggggagaagaacagcaattggtgacttcactgccctgcttctaatctggttctttccacagcctagttttgattgacttcatattctagaatacttgattaggaggaagatacaaccatgatgactttttttttccacaaggaacaatattttaaaaaatatttacagagattttaatctaataattcttaagcaaatgtgtgtaatgccttcctgaaatagtctaaaatgaatattgtacccagtgacttcagtggtatccttttttcctaagaccatttataattattagtggcaacagagtcagtgctaatctagccaaattacatatgtataatatatttataaaggattctgggagatggtccaagggtgttctgtgtcaaaagatggcctattggccctcagttttcctacagagtagtggcttatctctgatcagctgttacaaactaaattccatgtaagctttcatcaacaaattccaaagtgcctcctacaagggcacagctgtccgtatctcctttggattccatatttttgtttctctccaattcagatattgggagttcttcagatactgactctgcacactatcttttgaacattatgaaaatataatctgtcgggttgttttcatacttcttttttttgcatcagtgataaggcatacatttgcgcagatgagctaggaagttttgagaagtaccttttatgttcagaaagtaacagattaaaggtttttatgggttccaaattggttagtcacttaggtatgcaattataaatgcaaaatagtgccagatctttaactgtatatcagggtcagtttttgttcatgcccaaatcactacaccttcctcattggccttggagtcctactatttcgtgccttcatttgtgttacatacatagctgcaagcaaaccatttttcccctttcttttattcaaacaataatttttgaaacaaaaaagaggaaggaaatcagtggcagaaataatcctgctgttattggtgtttgtttaataaaaataatgggacttttttcttaactttttattagctcttcctaagggaaatgtcacatattattatttaattgtacttgtctttttttactttaagagcataaactcgtttttattttgcacacttttctcattttcctgagaatttaccagaaaaaaaaaagatacatagatttgtctctgtgtttttcttattcttggcttagtttttccttcttgtgtaaaaattgagattgcctattggaacagataattggttctaatatagcacgtctataagaaatgcaggcttaattatatttccacaatgtctttccaaggtattcattggtttttatggtaattcatcactgaactcttaatttttgcttttctattaagaactatatagtatgtacaaaattacttgatcacaaaattacttgctagttccaggaaaaatatgaatgaatcttctgtggccagttaggaatacatcagtttgatgcatttttaaatggctctaaacatctaataaggtactgtatttggagagaaaaggtggctatctccatattcaaaatatttcttccagtctccaagatactctattcttttaatgtctggcttgttcctatcacagttatcaagctgagaatacagctgaggaagttcattctctaagtcaccagaggtataatatgtgcttaaactgtcaatttagtgccctaaaaatccattaaccaaaaacaaaaacgttttctccctttggtcatttcatataataaaaaaaattaatattttatagaggttttttccttgaattaggtgctttaacaattgatttccaagggaatattagtattgattttttcctcagaaaagcagatatgatttaatagggaaaattattattctattgatatttcttatctcataagaaatttcttatctaatattttacacaggtaaattgaagtgaaaaataagctactatatggtacaatcaaaatataataaggagaaaaagtagaccaataaagtgctctctaaaaatttattttttggacttaatcaaaataattgcctcaatccttctctttattgtatatgtagccttaactaactatatacttataaactcagctgggctgatgcacagtaactttattaaaggagaaactggactcttgttatttcctaaagcagaacatggcctgttctccctgatataagaaaacaatgttttcaactttataaccataaatgcacataataacagggaaaattagccacagttctcctcccctactcccctgagcccctactttaaaggactatttgttatttatatagtgttaaagataatattccatatctttgaagtataagacagagaggcacagtataagaattatttataactttttagaaacaattacttgaaaaggaaccttatacaattagggtattatttttagatttggtgaacatttatagtatattaaaaattaaatgtttaaattttgcaggtttttttatattaggcaccttttaagttcccagcatatttggctaccactatcaacttggaaacattccatttgtagtatcatcaaatatatattttgtaggacaatttatatatgatgtgatttgacctaccatattaaagcagacacagattacgtatcatgctttcaaccaaaattacagacttcctttgaaacatgctgcagatttgatagaggtatattatgtcttaggaaaatacaatgaagaaggtccaaatccctattgaggctggatgtctgatctgcactagacttaagaggatatatcatttcatctgcatataaacacatagggctgaatgtgatgtcaaaagggtttgccgttaataattttcttcaatgtaaacattcctaataattttgattgttgctccttagtcaatcatttcccaaaacatgattatttttaatatatgtaaaatatttaaataataaataataaaaggtaatgtgtccattttaaattttgttcccagccatacacagtagttccctgatacaaaatgctatgagaataccgactattttttcataatttaattttaccactgaacctgattttagtacataagagtctaaatattaagttattcactctaaaaggggaaatcagtaaaagcaaggaatttatgaaatttttgctgtaatttcagtatctgttatacaggggaagaatgatcaggaaaaatataagctgacaacttacccttttgctttttaacaacaaaataatattgaaaatatattagaataactcacagatccagaagttggtggaaatggaagaatgttttagaaaataccatccatatgtttatctaagaaagtctcagaatttagtgacactaatacagttcataaatactgtaatacagtggagagagttggaatgttattttggttttatttcatcagcacaattattaaaaacaacaaaattaatgagacgttttgttataatcagatttttttttaccatattgcaagttataaaatgtcaacttatactaagtacctaacaactgacttttattcacttgttgtgacaagtttttaattaccaaattaagaccttttcagtatctatgagtaaaagaaatagatgattatatcagaccaggagcagagaatttataatatgtgctttatagcaaaatgtattaaattgtggttaaaatttatagctcatatgtagctgctgccaataagaaggctcagaattgttctgtggattaatttttacatcctgttttctgtcacttttaccaatcttcttggcctcatgtacaataatgtaaagccaatttgatgaaatggttcaggttgtagcagtctataaattgtcggtacattcagctcttctaggtgagcaatactgctgctatttttctagaaatagcaatcatttaaaaatgccaaatagctaactgctaccaactctttcttgtatcttgtctctttagagaaggaaatttttgtgtgccagtaatcatcaaagaggtgttttataagagtgttgatgttcagaagttcatgaaagtattttatccgtataatttgctagtgagctaaaacaatataatttatgtaaatctttatatgtacaaaatatatagtctgttgtacttgagtaatttggtctatggaattttaaatgccttcatttagcagtaatattcacatttttattttagacagttaagttcatgtgtttgattttgtcatgtcagcataaatgagaaaaagaagtggatcatgcagctaatgagtaaccaacattttgtaaagttttaaagttttagcaaacaacattattccatctcatttaaaggttaaaaaagaagagacaactctagccaaagtagaaatttatattctacacgtccaaactgtctcctagcagcttttggactatatatcacttgatgttaaagtatcttttatttgtaataaatattcaaatttctatttagaagctctaatgtatacctagattaaatcaaatcacagttttatgcttttaaaatatatgtatttcaaactgtatattttaatttctgagtgcatgttatatagtatttaatacttcagatgtcttggcaaattcaatataagtatttattcccacaagcgatatatgggatatctcttaaaaattatgaatatgtaccatttccttcaaagtcatcctagcctatgctgtatcaaaagtattgtatattttatggagatttagtgatatacatgtaaatgttttttaagttattttattgaagttcaatctttacataaaattaaaatctttttttaaaaaaagtgtcagtgccagaactgtaaatgaaaataatcaaataaaagttaaaataattcattactcattaa

SEQ ID NO: 329 - DNA, 370606 bp, Homo sapiens
  source 1..370606: mol_type = genomic DNA; note = NC_000001.11:c21176897-20806292 EIF4G3 [organism=Homo sapiens] [GeneID=8672] [chromosome=1]
agccgtcctgccggactgctggaggcggccacagcgccatgttggatgctctgctcgttgagtgaagaaaatccaccggcatcgcctgagccccgctaccgagaagggcgccgcttcctccggggagggggataaagatcccccgccgccggcccatgaggatattgccgtgaaaggtccggtctctccgcctcctgcccccgccgggtccggccccccccctggggtcgcgttgtcacggagaccggcagccggtggtgctggcccgcggggcggctgctgctgccggcggcggcggcggcggaggcggcggcggcggcggcggcggcgtcgggcgtgtgtgaccggccccggccccctcctcctcctccccccaggctccccccagccccccgctcccgccgcctccccgggtctgcccccatcccgcccccccgctgcccccggcccctgcaccccggcgcgcccggtcccgctctgggggggttggtggcttcgctttgccatgagtttaccgcagaaaccggctctgaaatcaggcacagcgactgcagcaggaaccggacccggcaccggagcggcggcggcggcggcagcagcggtaccgcctcctcacccggcggcggcagcagcggcggcggcggcggcggcggcggcggcggcggcagcggtcccccctcctcacccgaacatcagggccctccagactcaggcgccccaacagtatccttttcaccttcctgtcggcccttcggttctcgtcgtcgcagtccagggggaccccgcagcccaggggaccctcctgccggccgccacagcccagccaggaaagggacagcggctcaagcccctgcatcgggcttgggcggagcttttggggtgccccggcagcagcactgcggggggacccccagaccctctgcaatactgtgaaagctagccccacttggccatgcttctgcagccccttccttttagagcttggggtcccttctcccctcctcccctaaggtaccctccccccctttattgggcagaatttgcttggtgcctgggaccaaccctgcagggaaggcttttctctggttgttgtgaggattacaccctcctgctcttcacctcccctcggctccccctacagcgggacacagtgggcttccataattattattagtacataataaactttatcggtaaatttcttgtttgaaaccaatcagctcgtttccgaggtatgttggattttcagtctaaggtgaaaatgtacagaaagcagttcctctggataattttttttagtaatgggagagttgtgatgtggtttgtggtagagatctgaggaggaaatgtgacgccggacgcttccctgtctttgacctttttaaaggaagaggaagttcaccgacattacccatcacccacaaaagtctcacttcttggaagatttgtgttaggctgaatatttttaatgggctttaatttactcctcataggcctgatgtctagagagttaccagggcttctggaggaaagtctagtattgaatgtttctaatttcatgttatttgctcgattgtagaattttggagagctttgattgaaaagacttggtgatggggtattttagtcaaaaactagccggtgaaggtaaaacgttgaattcatgtattccacggagatttagaaaggtattgcgtacctgagaataacatttcatcatgcatcacctcctccctacacccactgtatttgtgtaaatcaataaataatgattggatgttagatgtgttgtgtttttatgtttgtgtcatcgtgcgtttgacttttagagattgtaggatgtttgagcaagtaagaagctaactgctgtgaggtccccagattatttcacagtctgtagtttgattcttgtctgtatagattactttgagaagggaaagcaatctcccttctagagtcatttcaggtcattgtttgttttctgccaagtgtcattttctctgttctttaaacctagttcgtgattttcaatccaggcaccgcggtgcagtgtaaagataaattccattccagtgtgacgtgtgtactgatttcataatgtttttatcctgcatgattctgttcaattaggaattgttcaccgatgagaaagtgtggtgataacttagcgttgcttatggaaaacctggttggttttgttcagtgtctctggggtgggggaagattggctggtttgcctacttaaaggcagagttcagtgttgaatcttttaaacctgtctttgcttactactttgtgagtttaaattcctttctaatttcattttttaccttgattgcctatactcggttaggacttttaagtttctgaattgtgctaccacgtaaattactcattacctgcatctttgagctgttttggcaattgaacagaaataaaaggaaacctgtagtaggtgtccttgatgtacagagtagtaaggaccacagtgctgaatgtgacactgtttggtgaattgggtggctttttgggatacagctgtgtttcaagtatgctttttctcagtgcatttcatagaaggacttataaaagctctgagttggttgcaacattcaagtagttacaaaagctgaaacttaattttcttttgaataaaaagcacttgttaaagagataaatttaagtgtaagttccagtgtagataattttaaaccaattttagtcatatggaacacttacttttgtgtggctttaagtttttactttgcctcatgccattgaagctaaaattaatcttcctcttgatgtgtttcacagctcttattgttttctctttgcttttacacactgaaaggttacaattgctaaaatagaaaattttattatataaacagtaaaggaagtataggttgtagatttcatcagacataccagtggtgaagtgttatcaactggtaatggggtattgattaaaaaaggattgaaatagagcagttctacttttctaccctgagggagtatgggaatttgtatttgacgcaagtggtcattgttcaataagtggataacatttaagcatcttggcaggagtgcatagctggagttagcactgttcatggcttgaatagatctccagaccctcaaagtatgtgggtatagttgtgtttgcattgaattaataagttcagacagttttatttatttatttttgagacagagtcttgctttgtcgcccaggctggagtgcagtggtgtaatctcggctcactgcaacctacgccggctggattccagccattctcatgcctcagcctcctgagtagctgggattacaggcgtgtgccaccaggtccaggtaattttttgtaaggcgtgatcagactgggtttcaccatgttgaccaggctggtctcgaactcctggcttcaggtgatccgcctgcctcagcctcccaaagtgctgggattacaggcattgagccaccgcacctggccctgatctggtgaaacctggtctctactaaaagtacaaaaattagccgggcgtggtggcgcctgcctgtaatttcagctactcaggaggccaaggcaggagaatcgcttgaacccacgaggcagaagttgcaatgagccgagactgcaccactgcgctccagcctgggttacagagtgagactccacctcaaaaaaaacaaaatcaaaggtcttctagaaaatgtttggaacccacgtcttttttttttttttttttttttttttttgagattgagtctcgctctgttgccaggctggagtatagtggcatgatcttggctcactgcaacctccgcctcttgggttcaaacgattcccctacctcagcctcctgagtagttgggactacaggtgtgcgccaccatgcctggctaattttttgtattttagtagagacggggtttcactgtgttggccaggatggtcttgatctcctgaccttgtgatccgcctgcttctacctcccaaagtgctgggattacaggcgtgagccactgcacccggccgagaaccacatcttaagtcaatggagaggattcctgtaatcccagcactttgggaggccgaggtgggcagatcatgagatcaggagatcgagaccatcctggctaacacggtgaaaccccgtctctactaaaaatacataaaattagccaggcgtggtggcaggcgcctgtagtcccagctacttggtaggctgaggcaggagaatggcgtgaacccgcgaggcggagattgcagtgagccgagatcgctctactgcactccaacctgggtgacagcgagactccatctcaataaataaataaataaataaataggattgccacattttgccatttatattgaggcttcaatagatgtggcaagtttatgaattcattaattcagcatccactgtgtgctgctacactcagtgctagatgtaggattgaagagctaaggtagaaatctttgccctcaaagaacttggtccttttggttagaggtgggtaaacaaaacgtcatgaggcaagtacagtgataactgataactctgctgtgagagtagtctggggaaggaggaattaaggctttctaaaagaagttgacatctcagctaaattagaagaatgagtaagaattaacccaggtttacatagctttctcttctgccggcctgctttttccaattccattgctgctccatagaattttaataaatggatttcagtcacgtttcaggcttttttttttttttttttttgctagaggaggtaccagagaaagtgacagtcaaacacaagctaaaaattcaaagtattttctgtatcataatctaaggaattagtgtatgagaaggagatacatacctgatctgatctgtggtgggtcttttcctggtctccttcccagtgcatctcgtaatatccttgcccttttaatactagactttggcttagaaacagtacttgctagtcttaaaatagaagtagatttaccttggtgtattgagaagtgtacctgatttggaggcaaaaaatctggttttgagtttggctctttcattgtagtagatatcttatcttagactaaccatgcaactgcttcaggcattggttatcccttctctgaaatgtagggtctagactcatttattcagtgaccttcttgaattataattgcttatgattgtcttttgagatttgtgttattcttgcaagtggagaggagggatttacagaaaccagttaatgttttctttgtctgatggtaagtgacatgttctgtggtggcttattgatattagaagatactaacatggggcagaggcagaggcaaagcagcagtttgctcatataagctacttctggtttttggcttgttaatgttagattcagccacagagacagaagcacctctctaacttcagtggtgaagactgtatagttagttgtgagatagtgggagaccataaaataaggttgccatggtcatttgctggcttgttctgggtgatgatacagttagttcattatgagatatgagggaaagtaagttctggaataaactcccgtggtgctgtggtgagacacaatctatttttacctaaggaataatactttgagctaatataataggaaagtaactagttcctgattattagccacgcatatgactttaagcaatggataaactgcagctgagacttacacggatgagatattgcaggatcccaagcgacttctgaattctcaaatggcttccagttctttggcttgctgccaaccaaaggaatttttcaatctcctgtagctcagctgaaatttgagaaagttaaactattttaagtgcatttgaaatttgttggtttttacgactttttttttttttaatttatttttttagacagggacttgctctgtcacccaggctggagtgtgatcttggctcactgcaacctctgcttcctgggttcaagtgattctcatgcctcagcctcccaagtagctgggattacaggtgtgtaccaccacacctagctaatttttgtatttttagtagagatggattttgccatgttggccaggctgctcttgaactcctgacttcaaatgatccatccaccttgacctccccaagtgctgggattacgggtgttagctactatgctctaccatgatctttattaactaataattgttttgtacttttttttgagacagagtctctgtcgcccaggctggagtgcagtggcgcagtctcggctcactgcatcctccacctcctgggttcaagtgattctcctgccttagcttcctgagtagctgggattacaggtgcgcgccatcacacccatctaatttttgtatgtggggtacaggtggggttttaccatgttggccaggctgttctcgaactcctgacctcaagtgatccacccatctcagcctcccaaagtgctgggattacaggcatgagccaccacacctggcctgttgtgtacttttttgagcccactgtgtgctgcctgactttataagacattgaattttgttaatagaatgtaaactccatgaaggcagagatttttgtttattttgttcactgtggaattgctagcacctagaatactgcttgacagacagtaggcagtctgtaaatttatttgtttgtttgtttgtttgtttgtttatttatttatttttgagatggagtttcactcttgtcgccctggctggagtgctagtggcacaatctcagttcacttcaacctccgcctcctggattcaagtgattctcctgcctcagcctctagagtagctgggactacaggcgtgcaccaccacgcctggctaatttttgtatttttagtagaggcggggtttcaccatgttggtcaagatgttctcaatctcctgatcttgtgatccgcctgccttggcctcccaaagtgctgggattacaggcttgagccaccgtgcctggcctgtaaatatttattaaataaaaagtgtgttggactttgggaatcaatttgaagataagttttaggattaatatagatggcatcacaactcacttacagcattcaaagctgccctcaaattattttgcagggatgtataattgaattgaaaataattctgtaatttcctttcagatggaatagcattgacccagtttacaaagccatctgaagtgcctgagttgtatttgaagtacatattgatactgaggattagggttggtatgaaggccaaagaggaacaacatctgtagtcaaatattattattaaaaacttatgattataagagcaagacataattaaatgagaaatttggaaaaatatagaaaagtaaaaaatcactcataatcttattagtggagacaaccccttttattttattttattttatttatttatttttttggggggagagagtgttgccctgtttcccaggctggagtgcagtggcacaatcttgggtcactgcaacctctgcctcccgggttcaaacaattctgcctcagcctcccaagtagctgggattacaggtgcatgccattatacgcagctaatttttgtattttgggtagaggtggggtttcaccatgttggccaggctggtctcgaactcttgacttcaggtgatctgcccacctcggcctcccaaggtgctgggattacaggtgtgagccaccgcgccttgccacttttttaaagaggtggggtcttactctacctcccagggcatggtcatggctcactacagccttgacctcctgggctcaagcaatcctcccacctcagcctcccaaggagctcggaccacaggtgtgtgccaccacacctagctaatttttttgtagagatggggttttgccatgttacccaggctggtctcgaactcttgggctcaagccacctgctcaccttggcctcccaaagttctgggattacaggcatgtgtcccagtgtgtagctgtgataaccacttttaacattttggtgtatttctgtcctgatttttttttttctgtggattttaatattagtggtcatacatttttgtaacataaagtcagattatgtacctagttttgtatcttgcttaatttgctacctaagtatctgccatgaaaagtactttttttggccaggtgtggtggttcatgcctgtaatcccagtactttgggaggctggggcaggaggatcacttgagtctaggaatttgagaccagcctgggcaacatagtgagaccccatctctaataaaaattaaaaaatagtttgccaggagtggcagtgcatgcctgtagtccctgctactcaggaggctgaggccggaggattgcttgagcccgggaggtcaaggctgtagtgagacctgattgtgtgattgcacaccagcctgggtgaaagggcaagactgtcccccaaaaataaaaagagatactttttttttttaaaaaattgagacggagcctcgctctgtcacccaggctggagtgcagtggcacgatctcagctcactgcaaccttggcctcccgggtcaagcaattctcctgcctcagcctcctgagtagctgggattacaggtgccctccaccacgaccggctaattttttgtatttttagtagagacggggtttcaccatgttggccaggctggtctcaaactcctgacctcaagtgatctgcccacctcagcctcccaaagtgttgggattacaggcgtgagccaccacacccagccaagagatacttcttgaatagttttattctgtatctacttgaaatataagtgaactttttgtttatttggaatgcttttcttgggaatattttttcacctttggcttttagcttagaagttatgactgcacattacaaaggggaatgttcaaacctttatcagtaagtcaaacatcttttgagttattgttcctgtaatgttttgcattatttgcaagattaaaactcagtgtaacatcacaagtttttttcccatacaattatttacatttctttattatctctttaagttcatctttatatgttcaagtatactaagtttttaaaaaaggctgggagccagagtcctaattttttttttctttgtgacggagtctcactctgttgcccaggctggattgcagtgttgtgatcttggctcattgcaacctccacctcccgggttcaagcggttcccctgcctcagcctcctgagtagctgggattacaggcacccggcaccacgcctggctaatttttgtatttttagttgaggcagggtttcaccatattggcctggctggtcttgaactcctgaccttggccttccaaagtactgggattacagacgtgagccactgcacctagtgtatttatatattggccaggctggtctcgaactcttcatctcaggtgatccatctgcctcagcttcccaaagtgctgggattacaggcgtgagccatcgcgtctggcatttagttggttttcaggaagtgttagtatcatgaggagtgattgaaggaaggaggaaaagaccacagggattcatgcgggatgagggaaagaggattgaagtgtgggaacaaacataattttggaataaggagagaaaattaagtgggaatagaaaatgaacacagccagttttaaaccagaatactatttttacattgagaatggaaaggactgaaccttgaaggttaaatgagatgattcctgaccttttttctaggtcctagtaattagtatgtaagaaatagaacttggtcggagaacttggccaggtgcagtgactcatggcctgtaatcccagcacttcaggagcccaaggtgggtggattgcttgagttcaggagtttgagaccatcctggatgacatgacaaaaccccgtctttacagaaaatacaaaaattagccaggcgcggttgcacgtgcctgtagtcccagctacttgggaggctaaggtgggaggattgcttgagcctaggaggttaaggctgcagtgagccatgattgcactgctgcactccagcctgggtgacagagtgagaccctgtctcaaaaaaaccccccaaaacaaacaaaaaaaacccttaattcatttatttattttatttatttatttttttgagacagtcttgctctgtcacccaagctggagtacagtggtgcgatctccatctcagctcactgcaacttctgcctcctaggttcaagcaattctcatgcctcagcctcccgagtagctggggattacaggtgcacgccaccacattggggcaatttttgtatttttagtagagatggggtttcaccataataggccaggctggcctcggactcctgaccttaagtgatctgcccctctcagcctctaaaagtgttgggattacaggcgtgagccactgcgcccagcttattcattttttcgagatggggtctggctgtgtctttcaggctggagtgtagtggcataattatggctcacagtagccttgacctgctgggctcaagcagtcctcctgcctcagcctcttgtgtaactgggaccacagacacactccgctatgcctggctaattttttaattttttttttttttttagagatctcagtttgttgcccaggctgatctcaaactcctgggctcaagggatcctctcgctttggcctaccaaagtgccgggattacaggtatgagccattgagcctggcatggaagtatgaatttttaaaaggaaaaaaaagagtttaagactatagtcagggtttagataggcagaggtgggtggattatgatgagtgggtgatcaatatgaacaaagatttgggcctgaagcaagtgtagtgtatgctgtgttctaaggatttggatctgtgtgcttggaatggaggattctcatggtagaatattcaagataatggatccagattctagagcattttgaataaataagaggaagttagacttcagctgtgtgaaaccattacttttttaaaaaacagctttattgagatgtaatccacataccgtatgagtcacccatttagagtgtataattcagtggttttgggtatattcaaaaccagttgagaattgtacaactactaccataattttagaatatttttgtcactccccaaaggaacctgtttgactccccatgactccccattttcccccaattctccctgccctaggcaagtccaagtctattttctgcctctatatatctgcctattttgaactttttacgtaaatggactaatgtattttttgtgtgtgatttgtttcagcataatgttttcagggttcgtctgtgttgtaaccatgtattagcacttcatttttaaaattattgagtaatattccatgtaccatggacatttgggttgtttcaactttttggcctttggataatgaatagccaaaaggttggataaaatttctggctctgaatgatgttgctgtgaccgttcatggatgtttttatatagatgttatgttgtaatttctcttgagtatataccttggggtatagttgctgggttatatgaggtaactccatgtttaacatttggaggagctgccaaaatgttttccaaagtggttacaccattttatgttcctgccaacaatgtatgaggatttcagtttttctgcatccttgccaacacctgtcattatttgtctttttgattataggccatcctattgggtgtaaagtggtatctcattgtggttttgatttgcgtttccctgatggctaatggagttgagcatgtttttgtgtgtatttggccatgtttgtgtgcatttggccatttgtcagttacggagaattatctatatatatcctttgcccagttgttaattgggtcatatgtctttttattgttgagttgtaagagttctttatatattctgaatataagttgtttaacagatacaggagttgcaagtattttctctcatttagtggcttatcttttcattttcttgaggtctgtctctgtcacccaggctggagtgtaatggcataatcagatctcactgcagcctcgaactcctgagctcaaggagccctcccacctaagcttcccaagtaactgggactaactgcatgtgtgcgccactacacccagctactttttgtattttttgtagagacgggatttcaccatgttgcccaggctggtctccaactcctgggctcaagtgatctgcctacctttgccttccaaaatgcgggattataggtgcgagccaccactcctgcctagttttttattttcggtagagacagagtctcactgtgttgcccactcgtgtctcaaactcctgagctcaagtgattctcctgccttggcttcccaaagtgttggaattacagacatcagccaccccgcccagccttgtgcgttaaggttatataatccattaagtgcttgagatttagtgaggtgtgctatttataaaataaggcctattggataaacgaactttgaccatttctatccttttttatgcccggaaaacaagtgttgtctgcttttattattaagataaattactattaggcagtggtagttttgtaaaaaatagagtataagcatttgactgttttgctgtcctgtgaataattgaaattatgagttacaaattcttaggtttttggattttgcatagtgttagttctgtcaggttaaaattggttgttgattgatatgaggttatactcccaggctattctaatgtatatgttattataaagaaacaaaattggagctgggcacagtggctcacacttgtaatcccagcacttcgggaggctgaggcgggcagatcacctaaggtcaggagtacgagaccagcctggccgacatggagaaaccctgtctctactaaaaaaatacaaaaattagccaggtgtggtggcacgtgcttgtaatcccagctacttgggaggctgaggcaggagaatcgcttgaactcaggtggcggaggctacggtgagctgagatcacgccactgtactccagcctgggctacagagccagaccctgtctcaaaaaaacaaaacaaaacaaacaaaaaacaaaattgggaaatactgcttaatctcttgtttagcaggattctttttgctatttaggaaaagaccacattaaagaagaggttattttgttacccttaggtgtaataaaaacagtttatttgttttggataaagactttccacaaaaaaactcttcagttgcttaacattgggaagtgggaatgagtggagttgctgattttgtaagattgtatctgctttaagttttaaattattatgcatgtctccagcttagctcttactcaatattcaaaggaagtgggtcttaattagtccatgtataattttaatggcatcaagtacctaattaataattgttgaatctttgaggctaatgtagtcagctgatactccctgtgttacattgttgatctttttcagaaatattagagtttgaaagtagtccaacttcctggaataaatgctgtttcaaaagcagactacagagcacttgaccttagcttattaccttttatattgtgtgactgagtgagtgtatttaaatgtggtacattttaggtaaggcaatgaaagctgagtgtggctctggaatgtcattgatttcattcttgatcttcattagaaaaatcatagttaaaggatccaaacataagtatgcattagcttatttttcctttacacatagtagacagtaaatttaaaaagaagtgtctttgaaaggtgccaccatgagccagtgatttttctaagctggaaaggagtttggggatttttctggttcagctttctgccccctctcctacctttgttctagaggctgaggggaggttagggcaacttgcctaaccataaagttcatgccaactcaaatttatttgaggtctttaacaacactgaccagtgacctactaatagatcctgtttctcctgtaatggtcctggtttggatagtaaattatatggatacccccacctggtaaccattacatagcttagacaattaggaatctttttatttatttatttttttttggagatggagtctcgctctgtcccccaggctggagtgcaatggcaccatcttggctcactgcaacctctgcctcccaggttcaagcaattctcctgtccttcctcagcctacagagtagctggcattacaggtgtgcaccaccacactcagctaagtttttgtatttttagtaaagacagggtttcggcatgttggccaggctggtcttgaactcctcaagtgatccacccgcctcggcctcccaaagtgctgggattacaggtgtgagccactgtgtcccaccttttttttttttttttaagatgatgtcttgctctgttgcccaggctggagtgctgtggtgtgatctcagttcactgcaacgtccacctcctgggttcaaatgattctcctgcttcagcctctggagtaactgggattacaggtacccaccaccacacctggccaatttgtatttttagtagagacggggtttctccatgttggccgggctgggctcgaactcctgacctctggtgattctgcctgctttggattagtttagatatcattagtttattataaaagacagacatggaaattatttacatgatgaatgatttcagaactttagtggaacgggcagcttcacgttgatgccatttcaatagtgatttatttcagtttacatactttccaagagtgtcaccatctctaaatgaataatccttgtcatgtagagctgctttggcacctctatattctggaagaactttatctccaactttttttttttttttgagacagagtttcgttgttgttggccaggctgcagtgcaatggtgcgatctcggctcactgcaacctccacctcccgggttcaagtgattctcctgcctcagcctcctgagtagctgggattacaggcactcgccaccatgcttggctaatttttgtatttttagtagagacggggttgcaccatgttgattaggctggtctcgaactcctgacctcaggtgatccacccgcctcggcctcccaaaatgctgggattacactggcgcatgagccacggcgcacggcctatctccaacttttacactgactggttgaatctctctctaccctttcgttcagagcctgacccagcagctactgctgttgcttgccatacttttctttgagatttttctgaaaggataatgcttcctttggttacgatttcagtggcacttgtttttctttttcttttctttttttttgagatggaattttgctcttgttgcccaggctggagtgcaatggtgcgatctcggctcactgcaacctccgcctcccaggttcaagcgattctcaagcctcagcctcctgagtagctgggattacaggcatgcgccaccacgccctgctaattttgtatttttagtagaggtggggttttgtcatgttggccaggctggtcttgaactcctgacctgaggtgatccacccgcctcggcctcccaaagtgctgggattacaggcatgagccattgtgccaggctggcacttgtttttcaaccaacgctcagtcaaagaggaagaaacttctttatgagatggagtctctctctcttgcccaagctggagtgcagtggtgcgatgtgtgctcactgcagcctctgcctcccgggttcaagtgattctcctgcctcagcctcctaagtagctgggattataggtgtgcactactgcttctggctaatttttgtatttttattagagacggggtttcaccatgttggtcaggctggtcacgaactcccgacctcaagtgatccacccacctttgcctcccaaaatgttgggattacaggcctaagaaactttctaaatgcttttcctgccatgactcccagcactacacgtcctactctgccctcgtactgtgctggaaggagagacccctgatgtcctttttctgtttcaggattctaattgcatttagttatttctctttattctcttatggtttgtaacgattcctgtgactttccttatcttttgtgactttgacacttttgaagattgctgatccattgtttatagggtgtccctcgttttggatttgtttgatgttttctcatgaatggggcgaggttatgcattccttctcattgccccatatcaggagattcatgatgtcagtatgatgatgattaccttgactacttggttaagttggcatcttgctggtctttctattgtggagttattctctttccttttgtagttgataagtatcttgtgggagatatttgatgagtttgcaaacaatgttagaatcttctcaaactttggttctcaattttagcaactgatggagcttgtctgcaacatttattgcttttgtggttgcccaattgtgactttctatttcactctttccttctacatttattgattataattctatgaggaaaagctttctttcctccatttgtttattattcatatcactatggactcatgggtatatattttattttatgggttaaaatccagtaactatcattgtttgttttcttactcagattgttctagctttggccatcaggaattccttcaggttgatttctgtgttctttcaagaagccattatcttttttttttttttttgagatggagtttcgctcttgctgcccaagctggagtgcaatagcacaatttcggctcactgcaacctctgcctcccaggttcaagcgattagcttgaacacagcctcctgagtagctgggattacaggcacctgccatcatgcctggctaactttttgtatttttgtatagacggggtttcaccatgttgcccaggctggtcttgaactcctgacctcagatgatccacccgcttggcctcccaaagtgctgggattacaggtgtaagccaccgcacctggcatctggataatttttcagttttttgtagagatagtcttactgtgttgcccaggctggtctcaaactcccagcctcagttgatcttccagccttggcctcccagagtgctaggattacaggcatgagccaccatacctggctcactgcagcctccacctcatgggttcaaacaattctcctgccttagcctcccaagcagttggaattacaggcgtgcgccaccacgcttggctaattttttttgtatttttagtagagacgaggtttcgccatgttggccagtcttgtctcgaactcctgacctcaggtgatcagcccgcttcggcctcccaaagtgctgggattacaggcgtgagccaccgcgccagcctttttttttcttttttttttttttaaacccttgctctgtcacccaggctgaagtgaagtttgatcatagctcactgcaatctcaaactcctggactcaagggatcctcccattttagcctcctaagtagctgggactacaggcacacaccactgtgcccagctaatttttaaaatttttggagagatagggataggggtctcactttgttgtccagtctgatcccaaactcctgggcttaagcaatcctcctgcctcggcctcccaaagtgttgggattataggcctgagccactgcacccagcccttgtttttttatttttaagctttgccaacatctgagttccccgacaatcgtgttcttaattcttgttaatatgttattagagttagaaaggattccttcttatattgcagataaaagaaggaaatgtgtagaaggtttttttttcttttttttctttttttgcccttttttttgtgcctcaaatctgaaggccttttatgtatagattgtactaggacctgcagatctagtgtctttactcatcataggtaacaattggatttagcgagaaaatataggtatttctgtttttgagtttcgttaacagcaaattgtttagatgggattaaaggcccaaaatgtactctagttatctttgtggaacccatggatgaacacctatatatatagagagagagtgtgtgtgtgtatgtatatgtatgtacgtgtgtatactcaccgttggactcaaactcaggtaattctactgcctcagcttcttgagtaggggggattacaagtgtgtgccactgtgcctagtttatgttgtgttttagtggtgttaaatcttgtgtaccaggtcagaataattgttttagttggaggagctaagttgaaataagtatttggttatcataagttacagttcataagcactttaaaaataaccccttttcttcaattaactatatattggcttggtgtgttggctcacacctgtaattctaacactttgagaggccaaggtgggtggattgcttgagcttaggagtttgaaacccccctgggcaacatggcaaaacctcgcctctaccaaaaatacaaaaattacctgggcatggtggtatgtgcctctggtcccagccactcaggaggctgaggtgggtggattgcttgagtccgtgaggtggaggctgcagtgagtggagatcgcaccactccactccagcctgggtgacagagtgagatcttgcctcaaaaaaaaaaaaaaaaaaaaaaaagctatgtatttgttaaagagagagtttaggcacagaaaggaagtcttctcatgctttcagtgctttcagtgacattgaaggctttggtcagttcataagggcaccagtgtgaaattagttcatgataaggacaattgtgagaaacctccagttggtcaaatagccttcggaaacttactgctcattattctttctgatttttcttggaatattttgagagaaaagtcattattcccttgtatttcagaatcacgttaatgaggtagcttaactgctattcagctgcaggctcaactgagtgaaaaaggacaactagtaatggtaaactgaaggaaagactagtggaatcttgagaaagaataagagaaaaaagagaaatgttattgttttgatattacagattaagctaaccacagtacctgattcttagcaggtgcacaataattatttagtcaataattaatggagcaaatatttattaagtaacattgtatgtctgtgctgtctattgaagaatatacaaaagaaacctgaggctgggtgtggtggctcacacctgtaatcccagcactttgggaggctagacagaaggagcacttgagcctaggagtaggaagaccaacctgggcaacatagggaaaccctgtctctaccaaaaaaaaaattagccaggtgtagtggtgagcaggagggtcactctagcccaggaggttgaagctgcagtgagttgtgatcataccactgcactccagcctgggtaagaaagagagcaagatcttctcttaaaaaaaaacaaacaaaaaaaaactacaagaaaaaaacagtactctcaaatggaggtacgagatcagaaccttgaaagtcagtgaggactaggggaataggaagtagtatttgggctgacttgaagttgaggggaaggacatctacagttgagggaaatggtatgggcagagtcgtggtcagtggttaggaaatggtgtatggtgtatatggggtagtccgaagatccactgggataaaatagaaagcagcaaatgtgcatctgacaattttggagaacctttggatatctaactgtataatttattattcatttattattattttttgagatagggtcttgctttgttgcctaggctggagtgcagtggtacgatcatggctcactgcagcctcgacctctcaggctcacgcagtacttctgcctcaacctcccaagcagtagggaccacaggtggtcccaggttgatattttgtagagacgaggtttcactatgttgcctagcctggtcttgaactcctgggctcaagcgatcctctggctccagcctcccaaagtgcgggattaacagatgagagccactgtgcccggcctaatttttccaaggttttccaaggttttgctgaggtacatcctgtctagagggaaatgaaaaggaaagggtgatcatatcatgaaagctatcataaaggaagaaaaatagggatttgactatctttgatttctgaaagaagagttaaagttgactccagggttttgagactagaaaatgatgctgtcattgatagagtaagaaagatgtaggatttaattttatacgttgttttgagatagtggacagataaattcagtttaggacatgttggatttgaaatgagtgaaatatccaactcattttacaaacaaatggagataactgaagatgtttggaaatagggagatggaagtcagatgagcagaaatggttggaaaaacaaatctgtgataatataagcataatggagagagggaagagaaaagcaaagattattagtctatgcagtgtctggttacttgaggaagatgaggaagcttacagaaaagagaaagaagctgctgagaggaaagaggaggatcaacgcagcacaacctttaaactatccagaatagattcccactgagttttgtttatgtaattggaggaagtgacatttaatccttgatagctagtttttgattgaaagctcttgagtttttttttgttgttttttttttttttgagacagagtttcgctcttgttgcccaggctggagtgcaatggcgccatctcagctcgctgcagcctctgccctcagggttcaagcgattctcccatctcagcctcccgagtagctgggactataggcatgtgccaccacgcccagctaatttttgtatttttagtagagatggggtttcaccatgttggccaggctagtcttgaactcctgacctcaagtgatcctcctgcctcagcgtctcaaagtgctgggattacaggcctgagccactgcacccggctttttgtgtgtttctttacaagtctaaaattagttcttaaagggctttggtttggagagttacatttaagtttatacttttgcttattttctataatcatatattttagaaataaaaaaacttctcaaaatatttatttatttattttttagatggagtttcactctttcacccagggtggagtgcagtggcgctgtcatagctcactgcaaactcccaactcctgggctcaagcaattctcccgcattagcctcccaagtggctgagattagaggtgtgaggcaccgtacctgactaaaacttcaaaaatatgtaaatcacttgctgtctccctaataggctgctgttggggttctgggcagtagttactgtgaaatcattaatttgaacctggagttttcaataaaagattttaatatgctaatcaggaattgaacagagcatgataaactccattactatccttagttgataaattttaagcagaagaaaaggaactgtttcagttagcttgtctttgcctcattattgtggattgatgtataatttctttctttcttttttttttttttttttttttttgagacagagtctcgcactgtctcccaggctggagtgcagtggcacgatcttggctcactgcaacctccgcctcctgggttcaagcgattctcctgcctcagcctcccaagtagctgagattacaggcacctgccaccatgcctaggtaggttttgtatttttagtggagatggggtttctctatgttggccaggctggtcttgaactcctgacctcaagtaatccacccgcctcagcatcccaaagttctgggattacaggcgtgagccactgtgccccgctggcctatatatttaaaaaatatatttctggtttcagtttcagcctttgtttatggttagtcacaggtttgtagtagatagtttataagtgagtaaaattgaggcatattgtttcaatactcaaataatgagacaatagtgaaaatacctgctcatcaaaatgtaggacatcttttatcatactgctaaagagatatatagatggagagatacatagatgcatagatacatagcatatatctgcatctccttattaatagttcagctagaatttgaaatgttaggttaaattggctgcctttgaatgaaaaaggaacttctatttgtgttcagggtataatgctcagatgaaccgttggatatgcaaccagaaagcagttaggaagtgtttttcagtttagtctttcactggaaaccaaaactttgaaaaatatatttggagcggaggctacttatgacagaaggattcttaaagttcaactacttttgactcagaaggaaaactaagttgaaaatactcaaaaccagaaaaatagataatttcgtagaatgttgcaggttgttttgcctttctggctctcacaaaaaaggttagtgattgatactgtatctgcatattttctattcctttctctgtactttagttaatagcattttgtgattaaaaaaaatacgcccttgacttacttttcttgttgttattgaaagcagtttttcctgtgtctgagcatgtataacattagtgatctatatagagagtttgtttattgcaaccagaggcacattcctagggaagaatggtttttgaatgttccgttatcttatttccagtaggacatctttagaaatgagcaaattccattaaactaataaccctgattttggtggataagcacttatactaattctgctttgagaaaagagattgttcactctgctttaggagctgctggctaagtctggtgcttcttaacctttaactaagaaaaatgaggcttgctgacaataggtagtttttactggcctgtgaaacccaacagcatgttcagcaatgtaaaccacagcagctatcttttgctggcttcactgttgtttgaagtataatgaaatgcttcttggccggtctcggtggctcacgcctataatcccagcactttgggaggccaaggagggaggatcacctgaagtcaggagttcgagaccagcctggccaacatggtgaaatccagtctctactaaaaatagaaaaattagtcgggtgtggtggcacatacctataatcccagctactcaggaggctgtggcaggggaatcacttgaacctgggaggcggaggttcccctgagccaaaattgtgcaattcattgcactgcagcctgggctacaagagcgagactccgtctcaaacaaacaaacaaacaaaaaaaagctgcatctcacaaattgctgtacctgctgactcatcttcaagcccctaaacaaccatagtatccagcattattgaatgctgggacttgagaataaagagaaccagaatcttagaatgcgagggttagaatggattatggaaatcttttaactcacctccttctcaaatggtctcagctattaaaaataaatgttactgtggtagctgtcatagtagatagttaaaagaatgatagtgctattcagaatgccgttagaatcttctagatgagtgaagacttttgtctgtctaagagtctttgagatgtagtctttgagatgtagtactttttagcttcccttcaaaaataacacatcctgaaagtggccgaaagctactaggggcagcacacatcagtgtctgctatacacttcaggagaactgtgggaagaagtaaaaatgaagagtggccattgtccctgaaagtttcttaatctaattagaaaatagatttgagaaaggagggaactttggagcatttaggaatcattttgtgattatttaaaaattattttggaaacagcatattcctttgtttcccaggctggagtgcagtggctattcacagatacagtcacagctcactgtagcctcgaactcctggcctcaagccatcctcctgcctcagcatcttgagttgctaggatgacagagtgtgtacatcgtgcttggcttgaatggatcttttacctgtgtgtgattttgtaatatcatgcattggttatttggaagattataccattatgcatcagttatttgaagataattgttcattaagttatgtaaattttccaaatgttgatatattttattatatggcataaaataatgttattaatagctaataccgcaatgacctcatagggaaagtattttgggaagctctctgggtcatggtagtagataccagctcactgtgacttgtaatgactggaaaggtaattgaagttgcattaggaaacagtctgggagttgaagggaaatggattttacttttataaagaagcttcatgttgaaggccctgtaagggggcgttttatttttctggttttttttttttagtgttagcaagtttgattccatctaaggagtacgtaacaaaaagtagttggccttttcaaatttgtgaacccaaagatttttttaaaaattttatttgctttttttttttttgtagagacagggtctcgctctgttgcccaggccagagtacagtggcatcatcttggctcactgcagcactgaccttccaggctcaagcaatccacctgcctttgcctcccaaagtcttgggattataggcgtgagccactgtgcctggcccaaaggaatttctgtgatggaatgtatagtgtacttctgagcttgcctgctttttctaggtgcttggttccctgtcagttatagatccgggagtctttagaacttcttctgagccttttaatccctccattctccagtctgaagctagacctcagaattgtctgattagagtcctggatcagtcttacctcatggaattggtttcactttttccctaggcttagttactgtcttcttttgtttgaacttgtcttttatactaaactagtatctagagtgagacagggattaggatgaatctctttttccaagtggagtgggtgagacagtttgacctaggagtttcttgtggccctaggtaatgtaacagaaactggactgttgttgtattaaattttgttagtattctaagagatttttttaacatatattcaaggaataccttgaaattagccctgtttttttttttatttaatacaatttgcttttatagaattatactttgaaagttggtattcaagtaagattctgattgttctcatgtcatctttcatgacatgagtaaaccttttgaaacatgctgaaggcctagtgataggacattgggcaaattacagactatataggtattgaaatactatataaccattaaagctgggcatggtggctcacgcctgtaatcccagcactttgtgaggccaaggcgggcggatcacgaggtcaggagatcaagaccatcctggctaacacggtgaaaccctatctgtactaaaaatacaaaaaattagccaggtgtggtggcgggcgcctgtaaccccagctacttgggaggctgaggcaggagaatggcgtgaacccgggaggcagagcttgcagtgagccgagatcgtgccactgcactccagcctgggtgacaaagcgagactccatctcaaaaaaaaaaaaaaaaaaaagaaagaaatactatataaccattaaaaatgttgcggaaacatttactgatataaaaaagtgcacattttctccgtggaagtcagttaaaagtagcatgtatattcaaattttatttaaaaaatacattaggaaaaagtgcttggtgcttggttatgcaacagtgttcatgtggttactggttgctggtgagattaggtcatttgatttttttctgtagtaagtgatattttgtttaatcactttatttatttgtttatttagagacggagtctcactctgttgcccagcctggagtgcagtggtatgattctgactcactgcaacctctgcctcctgagtttaagcgattcttctgcctcagcctcccgagtagctgggattacaggcatgtgccaccatgcccagctaattttgtatttttagtagaaacggggtttcaccatgttagccaggctgatctcgaactcccgacctcaggtggtccacccgcctcggcctcccaaagtgctgggattacaggcctgagccaccgcacccggccagttatttttataattagcaaagtaaagctacttctattttggaaagtgaaatcaagttaaaatttgattctctgtgagctcttcattcagcaaagattaaattacattattttaagagagtgaagaggaatttgaaatgcgtttagattttccacaggaatcaagggagttgttgttaactgttagttgagtagaaaactaaactcattaagcattgttttccccatagtgtcagtatagtgctgatctcacattgtgatgaattaggttccctcaaatttttcatgacgccatgaaaaatggtttaaagtacttgaatataggcatctttttttaaagccttattttaaatgacatggcatattattgcaacattttttatgatgcttgcttcattgttatttttgttaagagtttccattttaaaagtcctttgccatcttgtccttgccgtcctggctttcatctgggactgcagcagggctgagccaaaaatggctgctgctgcagcaggggcgggcatagtataggacttggctgctgtggttcctgtgaagaagcaggaggggaagcttggggagaatgtcctggctcaggattctcttaatggttgtggccacaagaattgggcttttcttgtggaagaatttccatactgtagattctgctgtttggagggaatgacactgagtattggaatttacagcattagtggggggacccacccattctctgcagtagaagaaatcttagctgatgctgtcattcactgagcaggattggctattttcagaaagcagcaaggcttacctgtctgtgtcagttgatgacagatacatgtccagaatgatggtgatttctagcttggtgggtgaacatacttaaatgcgaattatctctcagagatggagtgggtggcatatagtagaggattaaaaaggtcttccctttcgtgcagcttgtgtgaggaatactgttccatataaaaaatctgcttggtatgttaaggtgagagatggggagtggtttgagtagagaattaaagttgctgtgtgtgctctttggaccactcccaagaggaaatacactgccatttggatggggtgagtttgtgcctgagttcctgtcctttctgcctgtgactagagataggcatgatgtaaaaacaccaggatctgctgcttagcaaccagtaaaataccgtatatctggataggcagtaacacagtacttcattcatttctctttcagtgtgatgaagagaaaaggcttttttgcttgagaaacagaaaagccccccttctctagaaaagccatatgtgatcattatggaaaatacagggaaaaaaaaagaataacagtttactcataactctaactcattgatgtatttcgataaatttccttgaaggaattttttgtttatatatgtatacatatttttgtacatatttatgtacacataggttggcatatatgtgtttatatatatacatacacatttgcatagctgcaaatcatactgtaaatgtaactttgtattatttttcctattttaacatattgatatattaacatttctttctttcttttttttttttagagatagagtctctgttgctcaggctggagtacaatggcatgatcatagctcactgtaacctccaactcctgggctcaagctatcctcctgcctcagcttacccagttgctgggattacaggcatgagccaccctacctggccagtatagtcacatttcaaaaaacattctgaaggcatctttaatggctttatagtattagatatatgactgtgccacaatttactgaaaacacattccttattgttggattttttttttctttttttgacatgaggatcttgctgtgtttcctaggctggctttgaactcctggctatcctcccacctcagcctctcgagttgcagggattacagacatgcactttttttttttttttttttttaaatgagacagagtctcactctgtcgcccaggctggagtgcagtggcgcgatctcggctcactgcaagctccgcctcctgggttcacaccattctcctgccttagcctctcgagtagctgggactacaggcacctgccaccacagccagctgattttttgcatttttagtagagatggggtttcaccgtgttagtcaggatggtctcgatctcctgacctcgtgatccgcctaccttggcctcccaaagtgctgggatgacaggtgtgagccaccgcgcccggctgtttactcgatttttaagttaacagttttgctattgagaagaatgctgagaccaggcagggtggctcatgcgtgtaataaccagcactttgggaggccaaggtaggcagattgtttagacccgggagttcaagaccaacctgggcaacatagcaagaccttgtctctgtgaaattagaaaaaaaattggtgaggcataatggagtgtgcctgtagccctagctacttgggatattgagatgggaggattgcttgagctcaggagtttgaggctgcagtgaattatgattgtgctattgcacattccagcttgggtgacagagcaagactcttctcttgaaaagaaaaaaagccatgctggaaaccatctttgtgcataatgcttttcaatatttcagatatttccttaataaaagtaaaaattactgagtcaacaggtgtgaacactaggaaaattgatgtatattaccagatatgaattttcactttacctgcagtgtaccctagtgcctgctacatttttaaattgtttttattgatatataatacatgtacatattttcagggtctactctacttttatcagcattaaatattgcagtctttcaatttttgttgatttgataggtgaaaatgatagacgattttagtttgtatttcttttattacttgtaaggcttatttttttctcccttgtttactaggtttatttcctgttttgaaaattatttgttcatgtcctaggctcatgtattttttgagattttggtttaggttcaaaacttagcaaaggttgggtgcggtggctcacacctgtaatcccagcactttgggaggctgaggtgggcagatcacgaggtcaggagttcgagaccagcctggccaacatagggagaccctgtctctactaaaaattagccaggcgtggtggcaggaacctgtaatcccagctacttaggaggctgaggcaggagaatcgcttgaacccgggaggtggaggttgcagtgagccgagatcacgcgattgcactccagcccaggcgacagtgtgagactctgtctcagaagaaaaaaaacaaacaaaaaacaaacaaacttagcaaaacagtgcatgtgttttataaataatacaaattatatagatttatttatttatttattgagatggagtcttgctctgtctccaggctggagtgcagtggcacgatcttggctcactgcaacctccgcctcccgggttcaagagattcttctgcctcagcctcctgagtagctgggattacaggtgtctgccaccatgcctggctagttttttgtatttttagtagaaatggggtttcagtatgttggccaggctggtcttgaactcctgacctcgtgatctgcccgcctcagcctcccaaagtgctggggttataagcgggagccactgacccgcccaaatcctgaaatttctgaaacaactatatctttaggtaacttactagcttttgaagagttcaggtttgccttttattacaattattgcattgatactagtagtattttatagactttcttgtgtgaaatgaaaagctccttgtgactattaatttttcttattccagttattgaattgctattgtcaccatataatatgtaattttatttatttatttatttttgagatggagttttgctcttgttgtccaggcgggagtgcaatggcatgatcttggctcactgcaacctccacctcctgggttcaagtggttctccttcctcagcttccctagtagctgggattacaggtggccaccaccatgcccggttaatttttttgtattttttagtagagactggccatgttgctaggctggtcttgaactcctgacctcagctgattcacctgctttggcctcccaaagtgctgggattacaggtgtgagccaccccgcccagccaattttaatattttttaaatataaaattgcctttctgatttgtatgtcattagttattgaaattaactgttaatagccatatgtttgcccttcatttactgtactttaaagtttttgagacagggtcttgctgtattgcccaggcaggaattcagtggtgtagccatggctcacctcagctttcagcttcaacctcatgggctcaagcgattttcctgcctcagcctcccaattagctaggactacaggtgcacacccctatgcctggctaattaaaaacatttttttgtagagactgggtctcactatgttgctcagactggtctgcgattcctgggctcaagtaatcctccaacctctactcctcaattttttttagttttggagacagggtcttgctgtgtttcccaggctggagtgtagtggcacaatcttggctcactacagcctcgaactcctgggctgagttgatcctcctgcctcagctttttgtgtagctaggactacagtcctgtgcccaccacaatcagctaattaaaaaaaaaatttaaaaatgttttttgtagagatgaggtcttgctgtgttgcccaggctggtctcaaacatttggcctcaatgatcctcctgtggtggcctcccaaagcactgggattgcagatatgagccactacacccagcccatttactgtaatttttagcctttgagaattttgtgatattggctagattttgccatagagatttgtaagtaaccaaattttattcctaacattgactactagataactgaatggttttggtgagactttaccattcacacttgaatatttatgttttctttaagggaaatcacaatgtatataagtttttaattttgtttcaaatgaattccatttgataaaacacgtagcatagctaggtggggtgactcaaaccagtaatcccactgagtcaggggcctgagtgggagtatcctttgaggctacgtgtttgagaccagcctgggaaacatagtgagaacctgtctcttaaaaaaaaaaaaggcataaaataaactggacacttttaagaggtatgttggtccggatcattggttttagaagatagagcaaaacttgagagttaaaccctagggttttttttgtttgtttgttttgttttgttttttagctctgattctactagaagtagtcatgtcatctttggcaattctcttaatgtaacattttggaacttggtttccttgtctatatgagagagttgatgataccttacaagttgtactgaggattacatgagccctccatgcaaaatactaaatacactgatacagatatggttggtactcaagaaataatggcataattttttttttcttgctatgttgcccaggctggtctcttaactcctggcctcaagcagtcctcccaccttggcttcccaaagtgctagaattacaggcatgagccaccatgcctggccaagaaacaatgctgttattactctagctagcagaaaacaaaaatcattttctggagaattagactatttaacaaggcacatgcttatcagtacgtgcgttacctcttctagtgttctgctgtgttgatattagtgaccaagatctgcatagtttgagaaccctctatttcaaggattaggaggtagaaagcttatgagaaagaaatctggcctggtaaaatgcaccttcgtgggctttttgaaagatgggactcattctttgtctttcagtggtttattataatctattaaaatttactttatgacctgagacaaagccattttactatttaggctcagtttaacattgttaaacctgtctactattcagagtgtaccaaggtgcttttatttcttaagagttctgttgtatttcatccataaaaatgattgaagcagggtcaggaaccagtggctcatgcctgtaagtctagcactttgggaggccaaggtggaaggattgcttgaggccaggagtttgagaccagcctaggcaacacagcgagaccccatctctacgaaaaaaaaaaaaaagatgggtgtgctgctgtagtgttagtttatagtcctagctgctcaaagagctgaggtgggaggctccctcaaggggatccctcaagattgaggctagaatgagttatgattgtgccagcgcactttagcctgcacaacagtgagactctgtctccaaaataaataaataaatagattgaagcagataactgataactgttattgttatgggagggatgttatctcccaaagattacccatagatacttggaattaatttttggagctctatttggactatcagagctctcttaaaacatgacattgcttgcaccaaaaaaatagaagccaagggggcaaaaaacatgaaattgcttcatttagttatttgctttcttaaaaaatattttgggtctggcatagtgtctcatgcctatgaaccttgagaccaggagttggaaaccagccagggcaacttagggagacctcatttcttttataaataagttttttctttttttggagacagagtcatgctctgtcacccaggctggagtgcggtggcatgatcttgacttatggcagcctccacctcctgggttcaagtgattctggtgcctcagcctcctgcgtagctgggactacaggcacatgccaccacacccaggtaatttaaaaaatatttttagtagagatggggttttgccatgttggccagcctggtcccaaactcctggcctcaagtgatttgcccacctcggcctcccaaagtgtataaataaaaatttttgaaaaatattttgtatgtttaataatttgttcattataatgaaatttattttgtgctacagaagaaataaatgtatcttactgtacattatagacataacgttagtaaatggaattccctgtagttgcacacctccttggttaactgtttgaagtctttctccagactttctatgcccattacagcattttaaattttaactaaaatgttgtatactgttttatagtattctttcttagttatccttttatagttttctttcttttccttttcccctttcctttcctttccttctctttctccttcttctccttcttcctttcctttgctctcctttctctttctttctttgtctctctttctctctcccctcccctcctctcctttatttttttcctttctttcttgacgaattctcactttgtcgcccaggcttgagtacagtggcgcaatatcggctcactgcaacctctgcctcccaggttcaagttattctccagcctcaacctccctagtagctgggattacaggcacccaccaccacacctagctaatttttgtatttttagtagagacagggtttcatcatgttggtcaggctggtcttgaactcctaacctcaagtgatctgcctgtctcggcctcccagagtgctgggattacaggcatgagccaccacatttggcctattttttctttttaatgtaatttctttagtaacagttttatgtttcagtaatagatatctatttccattttttggaaatgactagaattacttatggatgctgcttaatttatttttatgcaattctttctaatctacttgagttatttctgtttttcttatattatgaaccatgctgcactcaacatttttatacagcttcttttacttgaatggatatttttggggataaattatagaagcagatcaaaatgtatgaagggaagtatgtcagagtatgaagtgggtaaaaaggttgtggaaattaagtgttagctattatgagttttaaatggtttggttcctgattccatttagatctttattgtttttcttcatttttgtttgtatttactttgtattattttgctttgttgcatgtattctagttagccacttaaaaaaaatttaatttttggggagctagggtctcactctgtcacttaggctggagtacggttgtacgatctcaactcactgcaacttccaccatccaggctcaagcgatcctcctacctcagcctcctgagtagctgggactgcaggcacatggtgcaccacactggctaatttttgtattttttttttttgtagagtgggggtttcatcatgttgcccaggctggtctcaaactcctgggctcaagcagtccacccaccgcaacctcccaaaatgctgggattacaggcatgagccattatgcctgaccattagccacttttagattcctaatacatgttttttccctgaggtgaggtctaactgtgttgcctaggctggccttaaatgcctggactcaagtgatcctcccacctcagcctcctgagtagctttatgtttcagtaatacatatctatctccatttttttggaaatgactgagattataggcacatgccagtgtgccacgctaaattctctttataacaaaattagggaaatattatcttgaatctttgggtggtactgattagcattttgtttttttttttggagacagggtcttgctctgttgcacaggttggatggagcgtggtggcataatcacagctcactgcagcgtcgatttcccaggctcaagcgattcttccccttcaacctctctagtagctgggactacaggcccacactaccacggctgactaagttataaaaatttttggtagagtcagggtctcactatgttgtccaggctagtcttgaactcctaggttcaaacgatcttcctgtcttggcttcccaaagtgttgggataacaggcatgagccactgtttctggcctaattagaaaattttaaaaacatttttctattccctgcaccatttctctcctacagggttggatctgttttttgtcttgtttcttcactttcttaatgtaaaatagaaaacatactgtagtgttgtaattactaagtaagcaggatcttgttttttttttttttttctcttggtaggaaaaaaatacaaaagttcttttgaaataaaaatctttctcacactttttttttttacatagaactacacatacacacacacacacacacacaaagaaaaaatatttttctcaaatagaaatggtaatgttcaattcaaacacacatgctatcccacagcatttcttcttcattcagtgtgttgtagattcttctgtaacatggcacagaaagagaaacagtttggtgagtggttaagagccccagttggagttggttgacacctcttcgtttatgtagtatgaccttgggcagactgcattgctgctgtgcactggggttttctattttgaaatatgggaattataattgttcctaggatttttttgagggttaacattaacttgtgaagttcttagaacagttggttcaagatatttagctgaataaatataaactgtaatgtaatgattataatataattttctcatttaaaaaatatatatgttacggatttatcacattcattaagtcattctcaaattgatgtgcagaaaactttattttagaacacgttatttttcccttagatgttttcaaagtgatggtttttattttagtaactggtaacaagtcttattttgctcttagttccttcagtgaagaacgtaattgaagcttcaaagtgtttataaaatagggaagtaattaactgcttttcattcctaaccctggatatgtctgcttttctcaggttctattttgtatagtttttacaatatagtcttgttttcaaatagtagtcttcacatcagccattgctgaaaactgcttactttaattttatctttttataacctgctgcataaataattttgccaaggccaggtgtggtggctcacgcctataatcccagcactttgggaggccaaggcaggcggatcaaatgaggccagttcaagaccagtctgggcatatggtgaaaccccatctctaataaaaatacagaaattagccatgcatggtggtgcattcctgtagtcccagctatttagggggctgaggcgggaggcccacttgaacccaggaggctgaggttgctgtgagctgagatcacgctactgcactccagcctgggcagtagagcaagactctgtctcaaaaaagaaaaaaaaaatttgcccatgctactgggaccttcaattttagtgaaaggaagaacattttattgttcctattctgttttttctgtaggttattgccttctttgcaattggaaaatcagtttcatgatgattttgttattgtgttggttatccacaaatgtctagagaatactgtattttcctgagaaagacacattatgacatactgttacagagagaagacagcctcaaccaaatctggagaaggtttttaagaatgtgggaaatgcttgctaactttttaaatcactgagcaaagttagttaatattttcattagacttgggtgacccaagtaaggaatcctttacatttttttctaatggaagaaaatactgtcttaatcaggataattctagggatggggtaaggctaggatagttgtactcagtgctagctgttggaatcagttttgtagtttaaattatatagaccagtgtgggcctgtagtcctagctactcgggaggctgaagcaggagtttggcttgaggccaggtgttcagggctgtcttttgtgatgatcgtggctgtaaatagccactgcactctaagttggcaacatagtgaaacccatcttaaaaaaaattaaatagatctgaatcagattttgcagctttagttttagatataccatatagttaagacccctagcttaagagaattaggatgctcagtagtgagttcatttaggtcttgcatataatataaaggatattaacttggtttttgccttgttatttgcacaatacctttttcgaaagctttgagttaccagcatgatgctgattgttggatttagagcctattgtttaagttttttttgtttttttccgagacagggtctcactctgtcacccaggctggagtgcagtggtgagattgtagcttactgctgcctcaaactcgtggcctcaagcgattctcctgcctcagcctcccaatgttctgggattacaggtgtgagccaccacacccagccttcttgttaagatttttggcttgtcatgatccagaaataagttgattatttctcaatggatatattcttttagtttcttttctagagtaatagtataaacagggtttggcaaatgagtagaggaagatgttttttccctttgaagtggatttgttttgggacctgataaagtgcaaaccaagcatgttgtacttgacatcttcttagaacttggaatatttcattaccagttatctaattggtcaaagttagaaactaagttgggcatggtagctcatgcctgtaatcccagcattttgggaggccaaggcaggaggattgcttgagcccaggaggtcaaggctgcagtgagctgtgatcacactgctgcattctagcctgggtggcagggtgagactttgtctgaaaaaacaaagcaaaaaaacccaaattaatgggcaatgatagtatttagctattttttttccatgaggaagtgattttttttctttatttttttgaaacagtcttgctctgttgcctaggctggagtacagtggtgcaatctcggctcactgcaacctgggcctcccaggttcaagcgattctcctgcctcagccacctgagtagctgggattacaggcgtgtgccatcatgcctggctatatttttagtagagacggggtttggccatgttgaccaggctggccttgcgctactgacctgaagtgatctacctgcctcagtctcccagggtgtgggattatgggtgtgagccactgtgccccacaggacatcttgatattaattaagatcattcatatttcctttggtttggtctgtgctgaaccttctgacatgtacaacctccttggtttggggaaggagggcttaggaattctctcttttttgtttggagtgaacttgtgcattttttactctgttccacatttttcttcaggtcactcttgagggacttgggtcattgtgattcatgtacctattgagttaattttcgtgacttctttctagacagtgaagagccagagctctgacttttagcttcggggactgattctataaatatggatggacaggtcatttaaatggattgcattaatacagttaatggcgtttccaggatgttttgaaattttcccctctgtgtttcttatgcaaagagcttacgtttgatgttgtggtctgactttgatgaactgtgttacctgggctatttctagtgtaattcagtgcaaaaggaggaggaacagttttactccatatcagttaattcagaaaagtagagttgtggttttaatttgttgggttaatgagtgtcattgtcacaccatgaatgtgcccaaggtagttaggattctgagagcgtaggtcttttctttgtttgctttttaaaaatattacatttagatttagttatggattactttagttaattatttttgaagtttcaatctgggattcacatttaacaatctttttttttttttttttgagacagggtcttctgttgcttaggctggagtgcagtggcccattgtagctcactgcagccttgaccaccaggctcaagtgatcctcccacttcagcttcctgagtagctgggagtacaagtgtgtaccaccatgcctggctattattgttattattattttttaattttgtaaagataaggtcttactatgttgcccaggctggtctcaaactccaaggctcaagtgatcctcctgcctctaactcccaaagtgttgggattacaggcatgagccaccatgcctagccagctatactttgttgaatacttctgaggtgcattatgtatatattttaatttttttcatagatgatggtgtccagtatataatttgagaccaggtgcagtgtctaatgcctgtaatccaacaatttggaggctgaggcgggatcgcttgaagccagagtttgagaccagcctgagcagtgtagtgagacctcgtctctacaaaaatttaaaattaattagccaagtgtggtggtgcacacctgtagccccaggtagtcatcaggctgaggcaggaggatcactttagcccaggagttcaaagttgcagtgaactatgattgtgccactgcagtctagcctgagcaacagagtgagacctagtctccaaaaaaaaaaaaggaaaaacaaacaaacaaaagcaaagtaatatcatatgagccacccatgtaattttagattttctagtagctacattaaaaagtaaaaagggaaaaacaggaaaaatcaattttaataatatttgactcaatatataaaaatattattaagacatcatataaaaattattagtgagatactgtattttacattctttgtactaagcctttgcacttcagtgtatgttttacacttacagtaacagcacaccttgtcttgcactagccagatttcaagacttcaatagcccagcgttcctggaggctacctattgaacagtgcagttctgtaatatattcaagtgtaaatactgttttctgtctgctttcagaaagaatcagaatgagcagatttgaggtgcaagggaaaggatgaagaggcagagctatatgacaggcaatacctatcagtattgtgatggttcataccatttccttcctgggttagttactctactaacaagtgtgggtaactttgtccaggcatttgggcactgtattgtgattttattatttatcagtttttcccattaaaccatgtagttaaggcaagggagtatggttttttgtttgtttgtttttgttttttttttgatacggagtctcgctctgccacccaggctggagtgcaatggtgcgatctcggctcactgcaacctccgcctcccaggttaaagcaattctcctgcctcagcctccagagtagctgggattacaggcatccaccaccatgcctggctaatttttgtgtttttagtagagatggggtttcaccatgttggtcaggttggccttgaactactgacctcatgatccacctgcctgggcctcccaaagtgctgggattacaggcgtgagccaccatgcccagcctgttctttttttttccctttggcaagggagtgtgttcttttttttttgagacggagtctcgctctgtcgcccaggccggactgcggactgcagtagcgcaatctcggctcactgcaagctccgcttcccgggttcacgccattctcctgtctcagcctcccgagtagctgggactacaggcgcccgccaccgtgcccggctaattttttgtatttttagtagagacggggtttcaccttgttagccaggatggtctcgatctcctgacctcatgatccacccgcctcggcctcccaaagtgctgggattacaggcgtgagccaccgcgcccggcctgtgttctttgtttctgctttcataagggtctgtctatgctagtaataaagtagatgctatacttattattagaagtctttctgttgataacagggagctctggcatgattgattatatgtctgggacccgggtgtgttacattacccatattagttatacatgaattcattcccaggcttattctacaaattgggagttggaaaatgtgtacaccatcagtagtaagaccacatgtgaggactctagtgttattaaatactgacacatggtcttgtatttttgcatctttataggttagcttttgccagtagtaataactaacatttgatgaaaatattctgtgtggactattcattttttaccccatttaattttctttgtttttatttttagtttttgagacggagtttcgctcttgttgcccaggctggagtgcaatgccacgatctcggttcattgcaacctctgcctcccaggttcaagtgattctcctgcctcagcctctcccgagtagctggcatcacaggcatgcgccaccacagccagctaattttgtatttttagtagagacgggatttcaccatgttggccaggctggtctcgaatttctgacctcaggtgatccacccgccttggtctcccgaagtgctgggattacaggcgtgagccaccatgcctggcctaccctgtttaattttcacaattctgttgtgactctgcgggtggtgttgacctcattgtatagataatgaaaatgggttttaaatatcttctgttacaaaaggcatttgcatctcatgaatggaatttgtgtgtaaatttagtgtatgtggtgggacgtatttcttttcttagaatctataatagtaacatgatgatgatgatgtattacgtgaaatttatgtttgtgttttaggcagatgtaaagtggcacatctggtttgaaaacctaaaacaattgtattttaaaatattgcatatatatctgagattggtaactgttagagaataaaacaaaaaaaaaacactgcatagtactatataaaaatacactataacatagcaaagcaatgcattcatcagctggcttcacaaacaaaatgtaactaaagtctcttgcatgtaccctccttgatcacttgctcctctctttcaccagagataagtggtatcctgaatttgggattcattagcccaatgtatttctgttatttttatttttgttttttttgagatggagtctcactcggtcgtccaggctggagtgcagtggtgcgatctcagctcactgcaacctccgcctcccgggctcaagtgattctcatgaatcagcgcccgagtagctgggactacaagtgtgcaccaccatgtctgactaatttttgtagttttagtagagatgggggtttcaccatgttggctaggctggtcttaaactcctaacctcatgtgatcctcctgccttggccctccaaagtgttgggattataggtgtgagccaccacacctggccagcccagtgtatttctatatttactatatatgtatagctgagttttctaggtgtctttttatttcagctgaagaagaaattggaattattaaatctcaattttgacatgtgtatattttttcagcctgtaagatattttctgaacttagctccaacattgtatttctggagagttattaagtctcattatgactgagatacaggaatgtgaggtttgaaagagctaatcttagtattaatacccaatattttgagctgttaagattttaatcttataaagggcaggaataagactgtttaaaattattttgctcagtgaagtaaaattctaatgtgagattttattaaatagggtctgctttactatatttaggcgtaagcatagaagcagcaagtgacattgaaatccatggtgtaaatctccgcagtaagtacagttcaacgactgagaacattgtgatgatggtgacctttaagcatctgaattctgatgatacttatttatctataaatgagaatgacaatacttagattattaggataatggggaggactaggggaggactagagtatataaagtgcccggaatcatcctgggtgctgtcttagtgtatcagatatatttcaaaccttagtatttgtggcctttgaatttaaacagttgctgttattagcttcaattgttagagatagtgtcaatgagtggaatatgtcagctagaagctactccttttagattttccacattctgaaaggtaggactatgtttcctttttgatagttgcatcttcactctcctatagggagccagtgggactccaaaccaatagcatagacaacagtcattaagaaagaaggcttaggctgggcgcggtggctcatgcctgtaatcccagcactttgggaggccggggtgggcggatcacgaggtcaggagtttgagaccagcctggccaatatggtgaaaccctgtctttactaaaaaaatacaaaaattagccgggcgtggtggcacacgcctgtagtcccagctactccggaggctgaggcagtagaattgctggaacctgggaggcagaggttgcagtgagctgagatcgtgtcattgcactccagcctgggtgacacagcgagactccgtctcaaaaaaaaaagaaagaaggctttggaaggctttgtgcttgaacccagccctatctgtgaagtgtaatattatttaaatctgctacattgtcatttttgtttaataggatatttttccatttgaaacaaatgtagtaaatgttcataatgaaaaatttggggccgggcatgattgctcacacctataatcccagcacttggggaggccgaggtgggtggatcgcttgagcccaggagttcaagactagcctggacaacatggtgaaatccccatctctactaaaaatacaaaaattagctgggcgtggtggtgcacacctgtaattttagatactcgggaggctgaggcaggagaatctcttgaacctgggaggcggaagttgcagtgagccaagatcatgccactgtactccagactgggtgacagagcaagaccctgtctccaaaagataaaataaaaatttttttaaaaaaggaaaatttggaagttttaaaagctatgaaagctgggcatggtagctcatgcctgtgcttctagcattttgggaggctgagatgagaggattgcttgagcccaggagtttgacaccagcctacacaacatagtgacaccccatctctacaaaaaaataaaaaatatgcttggtgtggtggcatatgcctgtggtcctagctataatacttgggaggctgaggtgggaggatcagttgagcccaagaaatccaggctctggtgagcaccactgcactctagcctgggtgacagagcaagactctgtttcaaaaacaaataaaagctatgaagagacaaaccctaatttcactattcagaaagaaccttttctttttttaattcagcattttttcctaggcttatttaattttctttttgttgctttaattaaagcaacaaaatgctcctccagagcattccaagctatagatggacaagcagtatctgaattaacagggaggatttttttagaatggtgtttagaaaatgataaatttttatttgaatgttaaggaaaatgtttgaatctctcagtttttaaacctcatttcaaggacaaatatcactttggctatgtttattgagttttgaataaaaatatctaacaatatgtttactttgatacggagaacattatttatattaatgatattgatctttctattgccttcatttttgaaaaatatttttcctcacataaaattctgtgttgacaagtatttttctttctttttttgattattaaaaaaattttttttttgagacagtgtctcactgtttcccaggctggagtgcagtagtatgatcatggcttactacagccttgacctcctaggctcaggtgatcctcccacctcagcctcccaagtagcttggactacaggcacacatgaccacacctggcaacgttttctgtttcttgtagagatgggttttgccatgttggctaggctagtctcaaacttctcggctcaagctatcctccagccaaaagtgctgggattacaggtgtgagccaccatgcccagccacactcttttaaagtagtgcaaatgtcattgttttctgactcgtattgcttctcacaaggtctgctgtaattcttacctgtttacttaagtatatgtaattttttgttttcttcttcttgctgccttcatgctgtttgattttgatgtttccaggcttgtgtgtttgttggtttgttttatatttaccttgcttaggatttctctaaacttcttggatctgtggtttggaatttttttttttttttttctggaaaattctaggtcattatctcaagtatttcttttttttagtctcttttttcttctgtgaatccagttatacatatattataccatttgatactttcccacattagtggaacctcttttttttttttcttccctatgttgtagtttgagtaatttctgttgatacatcttaatgtatctttaagttcgttgatttttttttttttttttgaggcagaatctcactctgttgcccaggctggagtgtagtggcatgatcttgactcactgcaatctccatctcctgggttcaagtgattcttgtgactcagcctcctgagtagctgggattacaggcgcgcaccagcatgcctggctagtttttgtatttttagtagaaatggggttttgccatgttggccagcctggtcttgaactcctgatctcaggtgatccacccaccttgacctcccaaatcccaaagtgctgggattataggtatgagccaccgtgcctggcccaagttcgttgattctttcatcaattgggcccagtctgctgacattgtattttttatttctagcatttgcatttagcttttgaaattattttccatctaaaaataatttttcttcctgaaattacccatctattcatgtatgttgtctcctttttcactgtcctttaacatactaatcattattacagagaaatcactgtcttcatttttctagcttctgtatcatccctgaatctggttgtatttattgcttttttctcttcactaaaggtggttttttctatatgtgtgtctcctaagttttgattaagcgttgaacattgtatagaagaacagtagagactgagataagtagcatttatgtttggaaatgggcacgccacttcttccttcaggcctttaccgtgagatattgggtgcttagttaagctagctagctcacgcctgtaatcccagcattttgggaggctgaggcaggtggatcacttgaggtcaggagttcaagaccaccctggccaacatggcaaaaccccatctcaactaaaaaaacacaaaaaaattagctgagtgtggtggtgggcacctttaatcccaaccactcgggagactgaggcaggagaattgcttgaaccccgggggcagaggttgcagtgagccaagattgccccactgcaccctagcctgggcgacagagcgagactttgtctcaaaaaaaaaaaaaaaaaaaaaaaaaagagatggggtctcctgtgttgcccagtctggtcttcaactcttgggctcatgtgatcctcccgccttgtcctcccaaagtgctggaatcacagccactgcacttggctctagcttgggtttttattgttgttgtcattacctttggtgtaccacaggctttagagtcttaaaatggtagctaatttacccacagtgtagaataccgttgcttggtactaggtgctaggattgtgctaggggctattatcctgatccaccctcatctcagccttatgcggacctggtgtatctggcctcatagatgtggctttgtcagtgttacctcccctcttccatgtagcagccagtttgtcttatatttgtggtagttctcgggttggaatttctcaccccttgcccttgccaatggtagcaaacttctgcttgatggatcagtgtgggatcctaggcccaaaatggtttccatattcttcctcactggaattggggtggggggttgttacttcttcatcctggcaacggtagattttggaaatgtcctgggggagaaaagggtttgctgctttctctacagggacctctgcttcatagcagaaaaggacctgtggaatctcttcaggctttgtgcctgttcctagctgtggaggatctacctcttgcactcctgttccatcagatgggactctctccagtttctgtcatgaagccagtctttcttatgagcaactgtgagagatgtgtaaaggtcttgctcatgtggagatttgtagtgaagaacttgcaagtgaatgtcgtacttaccaagtgcattgtgtctgggcattcacttcggaaactgatatgccagtccacacttaactttgaggaatttattaaacttttagcagtttttttttttttgagatagagtttcgctcttgttgcccaggctggagtgcagtggtgcaatctaggcttaccgcaacctctgcctcccaggttcaagtgattctcttgcctcagtctctggagtagctgggattacaggcacccgccaccacgcctggctaatttttttgtatttttagtagagatggggtttcaccatgttggccaggctggtcttgaacgcctgactttgtgatccacccgcctcggcctcccaaaattgtgggattacaggcatgagctaccccgcccggccagattttttgtattacaaccgaccatctctttctctcatggtctgtcctttggaattcagttcattttgttttcttgcaagttcagctccctaatgggctaaagaaaagttacgttttatattatgtggccttttctccttttaaagtgagtgtgatattctctgcagctttctttttcctaagcagaaacagaaatctaatagtaatctttcagattaatctgtgtcaaatttcactgcaagaaacattcaaagttgtaatcattccaagaaggattacaaaaatacttgaaataccaggtgaaaaaactagatttaggaaatcaaggcattgagaaaatattaataagaatagagattaaaaaataactcgagctaggtagagccatgagcattatacagaaatgaaggccaaagaacctggataattgctggatgtgggttggagttatgaatctgagcttcataatgaccaaagcaaagttatataattgacaatgttgaaacttttttttttgtttttgagatggagttttgctcttgtcacccaggctggagtgcgtggcacggtcttggctcactgcaacctccacctcccaggttccagcgattctgctgcctcagcctcctgtgtagctgggattacaggcacccgccactacacctggctaattcttgtattattttttagagacggggtttcaccatgtttgccaggctggtctcaaactcctgatctcaggtgatctgcctgcctcggcctcccaaactgctgggattataggagtgagccaccacacccagccgaaactttttttttttttttgagacggagtcttgctctgtcgcccaggctggagtgcagtggctcgatcttggctcactgcaagctccacctcccaggttcacaccattctcctgcctcagcctcccgagtagctgggactacaggcgcccgccaccacgcccggctaattttttgtattttttttattagagatggggtttcaccgtgttagccaggatggtctcgatctcctgacctcgtgatctgcctgcctcagcttcccaaagtgctgggattacaggcatgagccaccgtgccctgcccactgaaacttttaatttatttccatgagtggattttaactaggaagaaatattttttgctttactggcagatctagtggagtgaattgtgcaatttataagacatctatctttaacatagatactgtttttcttgtgttacattttaaagtgtattgtctgtacttttctcatattttgtgctgggggagctgagataatttcttgaatattagtgccttgtagtacaatgtaagatgctagttataagatagttgttgtttgaatcccagagtcctcaaaacaatcttttattgctaggaagccagaatggccttatgcacaggtagggttaaggaatgcattcatttgttcctttattcaacaaacattaattgcatgtctgctgcgtaccaggtattgcattaagagctgaggatatagcaatgaataaaaacaagtcattttttcacaaaatttatattgtattcagatagaaaggtagtacccagacataattgtcagatggtgataagtgctgtgtagaaaaaataatgcaggccagatgcggtggcccatgcctgtaatcccaacactttgggaggctgaggcaggtggattgcttgagctcagtataattttgagtcctgaaaaaaaatttaaaggaggccaggcatggtagatcacgcctgtaatcccagcactttggggaggattggtgcagcccatggctttgagaacagcttgagcaacatagtgagaccccatatttacagaaaatataaaattagccgggtgtgaggagcttgcctgtagtcccagctactgggtggggtagggcgctgaagtgggaggattgcttgagcctgagaggtcgaagctgtggcgagccatcattttgccactgcactctggcctggcaacaaagtgagaccttttctcaacaacaacaacaaaaacaccaacaataaaaattatagaaataaaaaaatacagtataataactctttatacaacatttacattgtataaataatctagagatgatttgaagtatgcagggaggatatgcataggttttatgcaaatactagatcatttatatcagggaattgagcatctttggattttagtatccacaggactcctggaaccaatctcctgtggatacagagggacaactgtacttcatcaattgacctagatccatctctattaatgtgttctctgatacttgatgcctttatttcccttatcttttttataattgttagtttttttttttaaagggtctgattctgtggtagcccaggttggaggaatgcagtggcatggtcatagatcactgtaacctgaaactcctgggatcaagggatcctcccatgccattctcgggagtagctgtgactacaggcaggtgctaccctgcctagctgtttactttttgtagagatggcggcttgctgtgttgcccaggctgatcttgaactactggcctcaagcaacctacctcggcctcccaaagtaatgggaatgtttccctcgacttgacatgtttgtttaagtctcttaagcttaagaatcaatactttatataaattcaatgtagtattgtggttaagagtatggactctggcctcagaatacataggttcaaatcttagtcttgggtaagtttttgccttttctgtgccagctttttttttttttttaattttaatttttatatacattcttgagacagggtctcaatctgtcacccaggttggagtgtagtggcatgattatggctcgctgtagcctcgacttcctgggctcaagcaatcctcctgccttagcctcctgtgtagctgggactacaggtatgtgccaccaccacgcctgcctaatttttgtaattgttgtagagacacggttttgccatgttgcccaggctggtctcaaactcctggactcaagtgatcctccctccttggcctcccaaagtgctgggattataggcgtgaggcactgtgcctgttctgtgcctgttttttcatcctgaaataggaataagtaatagaacattcctcctaagtttgttgtaaatgaattaatgtgcatagaacagggtctgtcatacttagtgcctaataagagtgtgtgtgtgtgtgtgtgtgtgtgtgtgtgtgtatatatatataaaaaaattatatatatttatttatatatatttatttattttcgatacagagtcttgctctattgcccaggctggagtgcaatggcacaatctcggctcactgcagcctctgcctcccaggctcaagcgattctcctgtcttagcctcccaagtagctgggattacaggcacccgccaccatgcctggctaatttttatatttttattagagacagggtttcaccgtgttggccaggctggtctcgaactcctgacctcaggtgatctgcctgccttggtctcccaaagtgctgagattataggcgtgagccactgctcctggcctattgcctaataatattagctattattattgtatggaatatataaccctggaacttctcttttaggggctgttgtcattaagaaagtgagggtactgtttcaaatgtttaaatagagtttaaacattgtttctgagacttccctattttcgtttcccagtaactttatcagaagttgaatatcatttagaattctctcatctttttaaaagcttttctttatatctcatatgctgcatacgtagaacccagatttggtcttttttacacactaacattgtactggatacaaagttattgagaaatcagcagctttaagtgggtatgtaattaaaataaatttcttcccttcaaatttataccattgtggtagctgatactgcctgtttacattttttggtaatgtgagggctgagtcacttttgatgaggaattgtggaacttatttctaaacctggatgtgttgaaacagttaattgaactggaggtgattttagatctccttggtattaaagagggataatcagcactgtggtaacagaaaattatgatggaaatattaattcccctttttgattaataattgagtaaatttttccttagtatttgctttcacaaaaatgaagttctttaacttgactggtttaaaatggttattctcaatcttcttgaaaaaattgtattatttaactgtttaggtatgtactttgttggctgaccaaaataaatgccatttttatgcttcctttaagaaggattgcacagaaaaattaaaaaaccagcacattgggataccaaacactactaggtgggatagtttgagatttcaaaattctgaagaattctcatttcctctaccttatagtcccatgaaggcttctgactattcccagaagtcagtctggccgtcttcttgtttatgtgtcagtgagttatcctcttatagaagcaaaataaagcctaccctttagatttccataataaagtatcagctttgctggctcttcaaggtgtttgaagccagtagtgcccatgtaagaagcaatctcacatctttactgctttactgttggacagtggtttgaatgtgtgccagatgaaggacatttcttgaaagctttgtactacaccttgaattttttttttttctttgagaccgagtctcgctcttgtcacccaggctggagtgcagtagtgcaaccttggcttactgcctccgcctcctgggttcaagcacttctgcctctgcctcccaagtagctcggattacaggcgcccacgaccacagctggctaatttttgtatttttagtagagatggggtttcatcatgttggctaggctggtctggaactcctgacctcaggtgatccacctgcctcggcctcccaaagtgctgggattacaggcgtgagccaccatgcctggcctacaccttgaatttgaggaagagatacgtaatgtttaagatatttgaagaatatcttaaacacagtatcatgtgtttccaactcctaaattgatccctagatagaccatcagaaggctgtgtgtaccatagcaattctgtctcttagaaatgccttccatctaaagcctgctctttgtcaacactggaattacagcactggataaggtttgtgtattttttataggacctatgtggcagaattttacttaatcataatctaggaaggaactctgcagataagtttgttttctgtggtttaaaaagttatccactacaatttgtcttttcctgccactcacttccctttttattttaaccttaatgccagtaaattttaagacaagtttttggcccaaatgctctgatctattaatactttttttttctttctttttttttttttttgagacagtcttgctgtgttgcccaggctggaatgcagtggtgcaatcttggcccactgtaacctttgcctcccaggttcaagcgatatctcgtgcctcagcctcctgtgtagctgggactacaggtgcgtgtcaccaaagccagctaattttttgtatttttagtagagacagggttttgccgtgttggacaggctggtattgaactcctggtctcaagtgatctgctcatctcggcctcccacagtgcttggattacaggcttgagccaccgcatctggcctctgaactttagatattgaaggcatcgcatctttctttttttgatgaactgtttttcccacagtgttatgtcttgtattatttaagcctaccactgtctcagagtcattgtggactagggcagattaagaaaattggagatccttttgtgactagacagatgtcttacaacttttaaatattttgataatttaccattaagaaagaacggcaatgataatggaagacacaagaggaaaagcctggccatcaagctgtatagcagttttccagaggcttttactttttattgggattggattatattaaccttacattcatgttccaaccgtgtaattttgccctaatacattattttaacttttctctagcttctgtagacatcatgattcctgtcttgcttgaatccgaatctgtatagcttgaaacagcattattactagtataagtgcaattacacatcatccatatgtgtaatacaaactggcagactaagaccccagccgatatgttaaatgcattggaaaggagtttttcacacatttaaattgtgttattttcttacatgaaagtgctcgatattattggtttgggctataataattgaatcacagttgaacttgaattcacccaaactgaaaaacatctcgtttgacctgttctgtatcagtgtgctaactgctgaaggtattaaaacactaggtgtgtgaaagcatattaaataaggatatgtttatttaaaaagcatccggtttaaatttgcaactaattttccaatttatgacatgcaaaaaaagtaattctccttttctgtcaccttgtaatttataaaaatcaacagaaaaataagttacatggtttgaattagtcatttagttttttggttttccagtatatgggaggatagaaattatttgacttcttgcttctgtttacatgattttgctctgagtaattacagtttattcttttcgtataaaggagttttcatatcttgaaaattgtccatctgagggtaagcatggtatgaatgtaatgcagtagaaatactacattgagagctcatctaaactctttcaaattcaaatgtgtcattgttttaagcagaattctctctaatcctaatgtttattgtttacatatgcatgaattcattccagagggggaattagaggatggtggctataggctttgttgggactggagctcatgtgacctgggttcagtcttggctgtgactctcaccaggtgtgcgaacctgggaaaaccacctaacctctttgttgcttagcttcctaatctgtaaaatgggcttaataataagcccattacctcataaggtaacctaccttacaggctgttttgaatcttcaaggttggaaggcagtgaaatgtgtataatggccagtgtatacacacgtgttgtagttaagatacattgtaaaggaacctgaaggtttcctctcccatttttgtagattgatggattagttttttttttttttttgagacggagtcttgccctgtcacccaggctggagtgcaatggcatgatcttggctcactgcaacctccgcctcccaggttcaagtgattctcctgccttagcctcccgagtagctgggactacaggtgtgcaccaccacgcctggctgatttttgtatttttagtagagacggggtttcagcatgttggccaggctggtcttgaactcctgacctcatgtgatctgcccgccttggcctcccaaagtgctgggattataggcgtgagccactgtgcccggctaggtggtatttttgataatttaggtcatatattaggttcaatactcagttcgcatatttcttaaaatttaatttgcactcataaattgaggaaatgaaatatacatgtatttattttaaacttttgaaattacactacaaactctgctttttgagtaattttgtgtttgaaataatataggaagtatttacatttattataacatatggaagctctcctttaataataattgtgataccatttgttgaatgtctactaatgtctactaggtgccagggttgttaagaataccattttagactgggtgtggtggctcacacctgtaatcacagcactttgggagactcaggaatttgagaccagcctaggcaacatggtgagacactgtctgtataaaatattaaaaattagctgggcatggtggctcactcctgtagtcccacctacttggaggctgaggtgggaggactgcttgagcccaggaagttgaggctgtagagagtcaggatcatgccactgcattccagcctgggtgacagagtgagaccttgtctcaaaaacaccccaaaaaccattttacaggttaggaaactaaacttgttggtctgacttaagtttatgctgcatattccttaggaagctagtaaaaagtaaaaaagaaggtaaagttcatactcgtgctcttatactgagatgcgtattaagtaatgtgagttgagattcatattcggtgccatagtcttttttcttaaccccatcaatcaattgggatatgcatatttataactggtatcttggatctattaggacatatttactgaagactatatgtatttgtataatagtatgttagatttttttttttttttttttgagatggagtctcactcactctgttgtccaggctgtagtgatctcggctcgctgcagcctctgcctcctgggttcaagtgattctcctgccttctgctcaagtagctgggattataggcatgcaccaccatgcccaactaatttttctatttttagtagagacgaggtttcaccacattagccaggctggtcagcctcccaaagtgctgggattacagatgtgagccactgcgcctggacatagatttttattagttggtttttttacatcaggacatggagtgctattgttagtttatgatttgacctaattttgcttacaaaggagtgattactcaattggaacagacttaatgatgtgtaattgagaggaaatagaggaaaagaagatggactggattgataaattgttgtaaatttatagattatgtaacttgtcaaaagtgacagcatcatttatctagtatgtatattttaattttctccattgtgcgaaaataaatgctagaaacgatctttgcagatggactattgggccacagtcttaagaatttggtatatttatattccgtgttataactttcaccaacagtcttcatcatatgttttcataattgtgaatgagacccatattttagaaattttatttttatacctatagagctgacattttagataattttagaacaatcacaatgattaattttagaaatagtttttaagagtcgttaaatcgataaatgtgtatgtgtagaaaatttctggaaagatgcttaagaaacttgatagtggttacttttggaagaaaaagattggatgatggaagatactttctaccttacatccttgtatcctagtcctttctcttttatagcctccgtactatataaatgtttttctttaacaataattcagtgatacttaaaaaaagtaatagttaatagcacaagccacctgcagatctataggttatggttatatctatagtttctttgtcctttttcaaattacataatatttactttttgtttgccaaataaagttaacttattctttgtgtatctttttccttttattctcactgaaataccattttctttcactagtcagcatgatttccagaaaatatggtggccctttggggctatattattcatttgcaaatcatgacccgggaaaattaggttgcaaactgtacatgaatttggtattttattctccgtagtcattttataaaggaaatttagctatgttaccttcaataggttactttatttctcaagtcttttttttttccccttttatttagtcagacattcatttcataagattatctcccagggctctttcaaatctctcattctataagcatttcatacccatttcagctcaaaagatggcattcagtagttcttaaagtagtgttataaacaaaatttcttaaactagataggcttcagaataatctttaattattaaaatgcatttatttgcaatctaatttgtcttacaagctaattctaatgtagctcttcataaagtcagccatatacatacttaaaatctcagtcatggagttggatttttaaaagaaaatttccagtaatgcagatatattaacttcatatatatgtatttttaaaagaaaatcaaaatttcttctcttttttttttttttttttttttttaatagagcttggttctcagtatgttgcctaggctggagtgtagtggctattcacaggtatgatcctggtgcacctatagctggaactataggcatgtgccactgtgcccagctctcagcatttctgtttcttttttttttttttttgagatgtagtctcgctctgtcgcccaggctggagtgtggtggcacgatcttgcctcactgcaaccgctgtctcccaagtgcaagtgattctccttcctcagcctcccaagtagctgggattacaggcacccgccaccatacccagctgatttttgtatttttagtagagacggggtttcaccatgttggctaggctggtctcaagctcctgaccttagtgatctgcccgcctccgcctcccaaagtgttgggtttacaggtgtggaccactgcgccgggcccaacatttctatatctaatcttaatactagagaatgagccttttctttgtttggaacctgaaaggaaatgatgctttatgctacctgtagcttcacagataattacacagtgggttatcaaccaaagctaattaaactatgacagtttctttcgttaattgcattttagttggttcagttatggcaatgaggaaaatagttatgatccacaccctgagggtttactattttcaaagtgttgtatactgaaatacggaggtgtctggttatgaacctgtattacttgttcatatgtgaagtgcttagtgagacaatgaactgttaacttcatagagaactgcatttggttatgcggcctttgaaaaatgaacaaaatcatgaaatttcttaataacttttctaatgtcttctcaaataaaaggagtgggattatctttgctggaatccaaattgcaagccaaaagactgtgtcctctgtggatttctcagtgaactagtttgcaggggccaatgtgagataaaaatgcaattcctggaatttggtttaagagtaaattgaaatgtagtataagtagggtacatgagtcctttttttggctggtctgtgttgaacaaagacctagtagctgcatgcttggaaagctttcctgtgttcatgcaatcttcgtccttattgtagccaggcagctgaggagatatcccctaaagaggcgaactccccatcctcccacttctgcttttaatttttttttttttttttttttttttactatatactgggacagtgaaaggccttccattgaccagaattacaaagagtgctttcatgctcagggtttagccatacccagtgtacagggcttttgttagggcttgcactagtcctttctctcttacctccctcagtcttattattcatactttgcagcagcaactgtatcattttgagaattttacttccttatttaaaaataaatagttgcaaaagaaaaattcagttttttataatgaacaatgcaaagcaaagcttttattgtgtttatttggataaagaaaatacactgttatagctgagtgccacactgcagcatttggttttgttgaaattactctttgtcatttaaaaagtacagtcaaaataaacattatttttttgtgtgtgaccgtatctcatctaactcattgttggtgcttgatactcattcatgagatacaagaatcttttaccagtgccaggtgattttgaaaatattaatgtttttatgttagataagatgaaaaggagagtttagacaattatgtggataattcaaaaatgcctttagcctcagttcagattgacatatctccttaagattaatcttgttagtattgtctttgtccttcacctttcttgtatagaagttaaccattaaggtgaaataaaaaagttattatttaatagatattacatttggatatgtagtctttatcagatagagctggactatattttacaattttatttccaatttgcaatacccaagagttctctttcatttttttatgcaagtgattaatcttttaatgaaatgtttaatgcatatggaaaattataaaaataatataacagatacttgtgtgcctgccacccagctttgttgtatttgcttttttttttttttttgagaaggagtctcactctgtcgccctggctggagtgcagtggtgtgatcttggctcactgcaacatccgcctcctgggttcaagcgtttctcctgcctcagcctcctgagtagctgggattacaggtgcacgccaccacgcccagctaatttttgtatttttagtagagacagggtttccactatgtttgtcaggctggtctcgaactcctgaccctgtgatccgcacccccctcagcctcccaaagtgctgggattacaggtgtgagccgccgcgcctggcctgtattttgatattttaaacgagattttggaggattttgttgatcctaatatccgaatctgtgtcttatttatggttattttattttctcatttgtctcaaatttccctcctagacaagtcatttgttaagataaacctagtgagtacccttgattacccttgatgttacatggtttctgctggaaagtatcaaatagaactttcaaaattgtatttaacaatctcaatattaaacaagctgatatactaaatttttagatactaaagcttggttgtcacatattctaagaagggaatataatgtattacacatggtgaaaatttatttcagatatgttatatggactgttgtacaaatacaggattgaagtctgagaaattttctgttattctgtcattaattcagctgctattgaagtattgtacctcattttgacctttattattagacgattgctcttagagctcataatagtagcagtggtttgttgtatgcctacaatatacaaggccctgggtatcctttaaattgtctgggcacagtggctcacacctgtaatcgtagcactttgggaggctgaggcaagaggattggttaaggccaggagttctagaccaacccgggtaacaagatgagactcctgtctctacaaaaaatttaaaaaaaaattagctgggcatggtggtccctacctgtatattcctagatacttgggagactgaggcaggaggaccgtttgagcccaggagttcacgggtgcaataagctgtgatcgtgccattgcatcctgcctgggcaacaaagtgagactctgtttctttaaaaacaacaacaacaacaacaacaaattattctaataaatcgtctcatttaactgtatacagagagctgtatatcagctctctgaagtagtacacattttttttccccttcattttgcaggtgaagaaacaatcttatacagacacatttcactttatttcacctcagtctgttgcacttcacagataacttgtttgtttgtttcctaacaaatttaaggtttgtggcaactgaatgaagcaaagcttttggcatcattttcaacagcatgtgctcacttcatgtctctttataattctttttagtgatctttgatcttactattgtaattgttttgaggtgccatgctcatgtaataaggaaaacctagtaaaaaatactgtgtgctgattgctccactgaaaggccattcccctctctccccatggaccttgctctttcctgagatatattgaaattaggccaataaccctgcagtgtcctctgtgggtcatgtgaaaggaagggttacatgtctcactttacaatagctagaaatgattaagctttgcaaggaacgtgttagccaagttgtgaatgcaaaggaaaagtttttgaaggaaattaaaagggctgctccagtgaacacatgataagattatactaagatattttttgcccttattttgtatacattttcgccaactgtgaaaatgtaaactgtaattgtaaattaaaaaaaggtttttttccgtagagatggggtcttaccatgttgcccaggttggtctagaactcctggccttaagtgttccttttgcctcagcctctcaaaatgctaggattacaggcataagcaaagtgacttgcacaattgatttgctgctggcaccttagcacaaatcaaggttagtggtaccaaaccgagctaataataacgattgagtttttccccaacatgcacattgaaaacaaacaaaatgtcagttttacttttcacttaatatctttgatgaaacagcaaaaaaaattttttttattaagtgttggccttcgaatatacatcttcttaatattctgtgtgataaaatgggaagtacacataaagcagttctgttgcataattgtccaacagtggtcttaatgaataacacttgtgtgagtgagtggcaagccgaaatggcttttttcaagcatcaccattttgaaatgataaactggttatttatgcttggatattttccagataaattatcaaaaatagatgactgtgcttgtgatttcaaggaaaactgttgccagtggtaaaattacagctttcaagggccgggcacggtggctcacgcctgtaatcccagcactttgggaggccgaggcgggtggatcgagaacatcctggccaacatggtgaaaccccgtctctactaaaaatacaaagagtagctgggcatggtggcatgcacctgtagtcccagctactcgggaggctgaggcaggagaatggcttgaacccgggaggcggaggtttcagtgaggcgagatcgcgccactgcactccagcctggcaacagagcgagactcgtctcaaggaaaaaaaaaaaaaagtacagctttcaagtgaaaattagaattttggacagttgtatccaccaccatgaacttgacaactttccaatacttaatagacttttctgatgagatcagtagcgatatgaacagataagatttaaaaaaattgagacagggcctcactgtatcactctggctggagtgtagtgctgtgatcatggctcattgcagcctcaacctcctgggctcaggtattcttgccacttcaacctcccaagtagctgggaatacaggcatgtgccaccacatccagctaattttttgtattttttgaagagacggggttttaccatgttgctcaggatagtctcaaactcttggctcaagggatcctcctgcctcagcctcccaaagtactgggattacaagtcatgagccactttgcctggcccagataagatttttgatactgtacaatgaaatgtgtcaaggaagacctgtataacagtgcaccagtattttccaggtgaccaatgaatgatgttacaaaatcatggacaggtgaaagatatatttaaaatgcagtatagaccagttgattttactgtaacagcacatggaaagttgattcatttggttttagattagaaatttcacctaagttttaaaaactatcactcattgaattttggtgtaattaaaaaaaaagcccaatatttaggaaagagtgttaaaatactcttcttttttcctggtctaagaccaggttttttccacagacttcaaaataacatgtaacagattaaatgcagaagcacatgtaagaattcattcttctgtctgaatccatttgatagaatttaaaaaaaaaatcattcagcctaagaaagcttattaaaaaaagaaaacaagaattcagctggtctaccattaaaccagacatgaaagtgatttgcaaaaaatgtacagtgctactcttctccctgcattaaaaaacattacatagctcttttttttttttttttttttttttttttgagatagggcctctatcagccaggccggagtacagtggtgcaatcatagctcactgcagcttcgactcctgggctcaagccattctcagcctcccaaagtgctgggattacaggcatgagccactgcactcagccctttttctaaatatttatatgtttctgatttttaccactcacatttattttaaagtctttataagttggctatctttgagaaatggcatttgatttttcaaaactttttttggtagagttttaaatttggacttacgatactggataagtagtgattagattgtgctgaaatttatggaagaaagtcactttgagtatgccccttctacataagaacatagaatgtgctgaaaagctttctatttgagaatatttttattataacatgctttcctttaggcgttttattttgaaatgaaatgctgctgaatgctataagaaagaaaacatctttgtgggaattgggtatatctagaatgagaaagtaaaatattgcctgtagaatttttatacctcagaaaaaccaaataaagtaacattgacttcacatgggtatccatcttaagaaattatgtttagagttttgatagtttgtaggatttttttttctcagtaagggcattttaattgaatttaggaagtaaattataaatgatgtaaaagtttgtattcttcctgttaatgttataaccaaaagctaaaagataatgtagttcactgttttgcttagtgatcaaaaattttattttgtttattcattgctgttcactggaagacctgctgtcttgggtggctctgagtggggtgagattgacttgtagaatggttttcaactcttactggttgtgaatttacaaatacaggtagtgaggaaaagtttttccagtgtactctgatattattgagaatgatgactacaggatgaaggaagagaattatattttctgagtggtggtagctaatattttatgttactgttgataaccatcagatcattcttctttaaggggaaaaatagacttaattaaaaagtgtaagtggaggcctttggagaagagtcttgctaataaagggggtaatgattttttccataattttccttcatagctggcatggtgagaacaagtatatttaataaactagatctttggcctgtgacaattgggtgaattaatttggctaatgacactagtcatctagatgtaagaaaagcagttttctctctgacccttctgtgaaaaatactttgagcagagaactgttattattctgtagttgataagctgctcaccttgggaatagctgttaaatcagaattaacagctttcatggcagagagacattctttcaggaagtgaataaatgcatgtaaaagttcaccatgcaaagtagcaaaagtcaatcagtatctttcagaattttgtcaaatgtgtagcagattgcattctttttagtttcttttttgtatgtcatgatatgtatatatctatctcacatgctcccacggacctacttttccttgtaataatattttattgtagcttttctaagctctaaagaatgaagttaggagatccgttggtgctcttaattaggaatctgggagagatgtcttaaaggctgtgtcacctggatagtccacggaaaggaaaactcatgatctttatggaagagctatgtataataatgaaatactgcttagtatgtgctaagcccatcataagccttattttgctaattctttccagcaatcccacagagtattgatgaggaaactgaagtttggagcgatcacatcattttcccaaggtaatctagctggcaaacgaatctaggattcaaatttttgtcttttccagcttcaaagtctatgccttcgtagagtgccacttgttagtactcaggaatgtgcaacacattctaaaagcaacagaaattgttcattttgtcctgaaatgtatcctgtgtttacattcagtgacagattaagtttatagcccatgtaattaaattttcattgtctcatttaataagagcctgaaagttccttttctgtacatattttcctgaaagataaattatctaagattagttcaaagtacagtcttagatgaactacttgtattagtgttttatgttcttcatagtttaacagagaaagtcaagtgttttggcatagattggatgcagacattaaggaagaaacaaaagtgtttattagttgcaatggttgaataatacagtattttcaaaaagttactctgggtctgggcgcagtggctcacgcctataatcctagcactttgggacgctgaggtgggtggatgacctgaggtcaggagtttgagaccagcctggccaacatggtgaaaccctgtctctactaaaaatacaaaaaaaggctgggcgtggtgcctcacacctgtaatcccaagcactttgggaggctgaggtgggtggatcacctgaggtcaggagttcgagaccagtctgaccaatatggtgaaactccatctctactaaaaatacaaaaattaggccaggcgtggtggctcacacctgtaatcctagcactttggaaggccgaggtgggcgaattgcctgagctcaggagttcaagatcaggctgggtaacatggtgaaatcccgtctctactaaaatacaaaaaattagctgggcgtggcgatgtgctcctgtaatcccagctactcagaggctgagacaggagaattacttcaacctgggaggtggaggttgcagtgagccgcgattgcgtcactgcactccagcctaggcaacagagcgagactccgtcttaaaaaaaaaaaaagagaaaacgttactctgaaacctgtgctgaattatagcatttagatgctgaaataagagctccctgtagaatgttggttagatttgaatatgaatttacctgccttgtcatcaaattatccttttaagaaattaaaaaaatatagaagttatccttatgattgtgcacatttatatttcactttactttaaagtttctactttacaatttgttggccgggtgtggcggctcatgcctgtaatcctagcactttgggaggctgaggcaggtggatcacttgaggtcaagagtttgagaccagcctggtcaacatagcgaaacgtttccatctctacccaaaatacaaaaattagctgggtatggtggcatgcacctgtaatcccagctacttgggtggctgaggcgggagaatcgcttgaacctagacgggggaggttgcagtgagccaagatcataccactgcactgcagcctgggtgtcggagtgagattctatcccaaaaataaaaaatttgttacagtctctgttgaaatgggccatacacttcatttcagtgttgtgttagtcctcaaaaattagcaataattcctagaggaactgctacattcagatgcttcctctgttccttacattaaaaattgggaaatacataaattatactgtggccaccaggaaactctggaacaaattaatggcccaagtttttgcaatattgtaggaatttatagactgctagtctttgtcttatttacttatttactttcatttaaatattctttttcttcttgttgttgtttcttttatacttattttaattttacagagacaaagtcttgctaggttgcctgtgctcgtctggaactcctgggctcaagcgatcctcctgcttcagcctcccaaagtgttaggattacaggcatgagccaccatgtccagtcccatttaaatattctattatttgtgttttttgtaagctatctcagatccattgtggaataaagcaagacataaaatagtggaaaaataaacatcatgagcagggctgaaacaaagtaagggtacaaaacccttgtagctttttccttgagacagtcttgctcagttgcccaggctggagtgcggtgctgtgatctcagctcactgcaacctctgtctgccaggttcaagcaattgttgtgcgtcagcctactgagtagctgggattacagatgtgcaccactatgcccagctaatttttgtatttttagtagagatggggtttcttcatgttggccaaactggcctcaaactctttgcctcatgcgatccacccgcctcatcctcccaaaatgctgggatttacaggcattgagccaccacacctggccccttgtagtttttttttttttttttttttttgagatggagtctcactctgtcgcccagtctggagtgcagtggcgcgatctcagctcactgcgacctctgtctcccgggttgaagtgattctcctgcctcagcctcctgagtagctgggattacaggcatgtgtcaccacacccagctaatttttgtattttagtagagacggggttttgccatgttggccagactggtctcgaacacctgagctcaggtaatctgcttgccttggcctcccgaagtgctgggattacaggtgtcagccaccacacctggcctcttgtagttttaaaagataaaacattaatttctttaacatctttaagcatttatattagtccttatatttaagccttcatattcagaaaataatgaaatgaaataccttactaaacttaatagcgtcctacactggaaggatgtaatagagtaaaattgacaacccgttttatcaacattcccctcctttctccattgtctagtaatcttactaatgatgagtgaaaagacaatagaagtagttatacatgtttatatatattacatataaatatgtacagtagtttatatgtaatacagggaattgatttctgaataatagggttgattgtacatctgttttatatacctagcttattttagaccttcctcatggatattacctaagagatggtttcttagcaagtggtcagattttctttgtttattctttcaaagattgtattttttgtttgtttctttgagacagggccttgctatgtgcagtggttagagtgcccaggctggagtgcagtggtgtgatctcaacactgcatcctctgcctcccaggcttaagcgatccttccgcttcaatctcctaagtagctgggactacaggtgtgcgccactgcgcctggctaattttgttattatttgtagagatgagttctccttgtgttgcccaggctggtcttgaattcctgggctcaagcagtcctcctgccttggcctcccaaagttctgggatcgcaggcacaagccaacctggccaaaaaagaattgttataacttgtataagctgggcatggtggcacgtgtctgtagtcccagctactcgggaggctgaagcaggagaattgcttgagtcggggcagttgaggctgcagtgagccatgattgtaccacttcactccagcctgggtgacagcatgagatcctgtttcaaacaagaagaaaaacagaaatcaaataacttgtatgaatagctgtaatgctcacactaatagtatcacttgtttcattaataaaactttatacattggacagacctattaagattatagctaacttgtggagacccctgctctggaacctcagaactcatctcttagccaatacaacttgtgactgtaaatgctaagctatttttaaaaattggatagttttcaggttgggcccggtagctcattcctgtcatcccagcactttgggaagctgaggcgggcagatcacttgaggtcaggagtttgagaccagcctggccaacatggccagtctttactaaaaatacaaaaaaattagctgggcatggtggtacacgcctgtagtcccagtttttaaggaggctgaggcaggagaattgcttgaattaagaggcagaggttgcagcgagccaagatggtgccactgcattccagtctgggtgatagagtaagactccatctcaataagtaaataataaaatcaaaaattggatagttttctaaataaccactatgatagtaacatttattgagctttcctatctgccagacagtgttagatgctctgaatatattatttctgttccaggagagagtttgcattttcccatactttttttgttttaaatgctgaaagaaattttagcaatatattgtatagagtacagtagcccacgtggtgtaaaacttgattctctggttttctgtagggctgataggtaagttgcccttgtcctgatgtgtcaacagtagagtgtaaagtgtgaagagtattttgaatacaatagtcatttctgtgaatggctaccgtaacatctgttggttttcctccaacctcagtggccacttctctgcaagttgctttactaattcctcctttgtcttattgtcaggtgctttaccttcttcctttttttaattttttaattttttttggcattaaatgctatttttatgttcattactttcaaatttgtatctttggatgagagttctagcctgaattgcatattcatatattcactttgtgtatttacatctcctcctggatttttcataggcatttcagaatttttatgctcaaaataaaacttttgatttcctttctacttctatttcaacttgttcctttccagttttggcgagtagtactgctgtctgcctaactactcaagatacactatctgtaaactattcttggttattcctttccttcatgcctcttatgcaatagctattccccttggttttactatctaaactagtccttttctcgccattcatttctgttatcctactgtcttctaggccactaccttttatttggacaactgctataatctctcagctttttttctttcctctcttacccttctcaggtttattttttataaaaaatgaatggtctttaacagtgctattatggatctcctctgtttaaattctcccattgtcgcctgttaaaagaattcatactgcttaccaggccctacaagcctctcagtgatgtagcttctgcttaaatttccaaactctaattgctactctcagcatagctcccttgatcctttaacaaaaaaaaaaaaaaaaagagacagggtcttgctctgtcacttaggctggagtgcagtggcacattcatagctcactgtaaccttgaactccttggctcaggcgacccttctgcctcagcttcctgggtagctaggactacaggcacatgcgaccatgcccagctaattttttatttgtatttttgtagagatgagttcttgacaagttgcccaggctggcctcgaactcctagcctcaaccagtcctcctacattggccttccaaagtgctgggattataggagtgagtctctgtgcccaaccactcttatcatccttgatcacagctgtttcccacctaaaacctgtaccccagatgcctaccttcctggaatgttctttccctttctcttcataggatgggcttatttgtattactcagatttcaattcagaaattacttctactttatctagaatactattaccttcctctcatgtcatttaaaaaagttttcttcataccattttcactattttattttttatgtattttatttaatcttaaaaaaacatattttaggttcaggggtatatatgcaggtttgtttatatagataaattgcatgtcatggtgggggtttggtgtacagattttttttttttcttttttttttaagacggagtttcactcgttgcataggctggagtgcaatggcgcaatcgcggctcactgcaacctccacctcccaggttcaagttattctcctgcctcagccacctgagtagctgggattacaggcttgcgccaccacctatggctaatttttgtattttttgtttttagtagaaatgcggtttcaccacgttggccaggctggtcttgaactcctgacctcagatgatctgcctgccttggcctcccaaagtgctggtattacaggcgtgagccaacgcacctgacctgtacagattattttatcacccaggtaataagcatagtacttgataggtagtttttcaaccctcactctccactcacacttcaccctcaagtagaccttgctgtctattgttcccttctttgtgtcaatgcgtactcaatttttagctcccacttgtgagaacatgcagtatttggttttctgttccttcattagttgtcttaggatgactttcagctccatccatgttgctgcaaaggacatgatctcattttttttttatgggcgtgtagtatttcatggtgtatatataccacattttctttagtctaccattgaagggcatttaggttggttgtatgtctttgctattgtgaatagtgctatgacaaacatacctgtgcatgtgtctttttagtagaacgatttatattcctttgggtatatacccaataatgggattgctgggtcaaatggtttaagttctttgagaaattggtaaactgcttttcacaatggctgaagtaatttacatttccacactagcagtatataagcattccctttgctccgcaacatagtcagcctctgttattttttgactttttaataatggccatcgtgactggtataaggtagtatctcattgtggttttgatttgcatttctctaatgattagttatgtggagcattttttcatatgcttgttggccatgtatatgtcttctttagaaaagtgtttgttcatgttctttgcccactttataatttttcctattttaattgtctcatttgtttactgacttttggtctgtttgctcccaatagaatgtaagtgccacaagttgtttggtttagtactttgtagctactcataaaatatttgttgaggatggatgaatgaagaaggatgttactagtgctttcaagaagacttttaagcatttgtctttctagtaccactttcctgctcatgatcatatcatattacttctagtttgagggccagaaaggggaattaacagattgaatgtcatgtagccggcattgttcagagtatttcatgtagggatttagttaatactcagagcaatttatggctgtttttgctatcaccattttataattgaggagctaatactttgaggttaactatgattacacagtttactaagggataacgttagaaatggaacccaagattgtctgactccaagacccctgcagcatgaaatggtaaggaattctgtggacaaactgctatacgaacacagaattttggtcacttaaaaagggagagatgtttttttttgttctgagacagagtcttgctctgttgcccaggttggagtgcagtggtgtgatcttggctcactgcaaccgctgcctcccaggttcaagcaattctcgtgcctcagcctcccaagtagctgggactacagacacatgccaccacactcggctaatttttgtattttttgtagagatgaggtttcaccatgttagccagactggtcttgaactactggcctcagatgatccacccaccttggcctcccaaagtgctgggattataggcatgagccagtgtgcccagcctggatcttgtttcttcattaatttttcctctttcattcttccactgctgtaagtttatcctcatagtcaccatttacccattcatctccagataaaatgaatcacactcaatattctctagggcattatttataattttattttatttttacagttctcttaaaacaggatttgtagaagttaagtgatatggagtagggaagatttaggattcctttttggttgcctccttgcctccttgctgtgtaaatagtgaacatttggtgtaggggactgggtagatggtaatagtcaagagtatggaagagggacagggaaagtgaatagaaagcagtataggagtagagttcagctgaccagatggactgggttaccagactgcaatttttcagtctgttattatagtacattaaatcaaacaaatcacaccaatgcttatattaaaagcattaaggagctttagtgagacattgtactatgaggagatccatgtgcttttacaaatattatcaatttaaaaaatacatccaaatatttcccccttatagtaactttgtcagaattaaagcataatatagttggtttcaatataaatttttagtactagtaaaggtggtttaataggaaagagaattgaaatggaatatatttgtgatcctgttccttttgctatggatggatacgttaatttttttctcttgacatttgttattttaatttttaagttattacttgaggttatagaataaaattaagaatttgctgccattattactgaattaacatttcactggactattggcatatcagaaattgctttcattattgatgactataaagaatacctggagaggaggaaaaataggaggatggagtggaagagatgacaagagtcaaggtggtgggagggtgtcaaataataaagaaattgttctaattattaagaacctaatcctgagtttaagccatatgtatactgtgtttcaaataataccatcaaatttttattaatgatgattttaagaatgtctctttagcattgtccatttattaacatagcaccataagtgcgtcatggatgaatttaattaatgtttggtaacttaaggtttgtgttatcaggtgtattatataaccatagcatttataatttgaagttggcagtctggtacaaagtgttgggggaaaattgttttattaggtaaaaatcagggtttgcaatctgtggcccactggctggctacctgtttttataaataatttttgtatttttaatggagacggggtttcaccatggtggccaggctggtctcaaactcctgacctcaggtgatcaacccaccttggcctcccaaagtggtgggattacagacatgagccactaagcccagccagaaatacctccatttttaaaactatttcctttttggtgtttgtcttttttcctcagatagcttaccatataaaactgcaacattctttagttgctttctaggcctgagaattcacagcatcttaattgggctttggtgcatgtttcataaatcttctcaagcttatcccattttttaatttgtaatttatgatttcatttataagttttttgtatataacttataactttaacagatggccgagctctcaagtgtgatgaaaagaaaggttttttttgttaccagttatactctgaaggtctgggtgtactttattgtagttccctgcctgtgttgcagaatacaaattatttgattcaagaaagtatttatgatacgttcttggacaatataatgatgtaataaatataataataacataaaggtgaaatttgtagctgtttgatcagtttcactcaaagtggtattgattacattgatttaaagttggaggaatgtctgttggaatgagtccctccctcccaccctcccttccttcctttctttctttgttccttccttactccctccctccctcggtttttttttgttgtttttttttttttcctgagaccctgttgcccaggctagagtgtagtggtgcaatctcggctcactgcaacctctacctcctgggttcgagtgattctaccacttcagcctcctgagtagcttggaattactgatgcccaccaccatgtctggctaacttttgtattttttggtagagacagagttttgccacgttggccaggctggtcttgaactcctgacctcaagtgatctgcccacctcagcctcccaaagtgccgagtttactggcgtgagccaccgtgctcggccctattgcatattttatcctgcagtgatttaaattaagatgaaattcttgaccaagcacggtggctcatgcctgtaatcccagcactttgggaggatgtttttcattgatagttaaccatgatttttcactttgtgaagttatttttaccgttaaactttgatctcttttttatctgaaaatacgtcgacttatttctaggtaccgtaactaaatctctccttaggtatattgacagtcttcatctgatttagtataagcgtgctttgacttgggtttattggctgtggagaaggatcttttcttgatactagtgaagagagaagtttgtcaggagtagtgtcaaaaagcaggttgggtggtttccatcttgtgaagtcattaagcaagatttgaggagtgtggatgatcctatattgcttttttcctgtcattgaaaaagaacgtagtttgccgcccaagcccagctgttttcctgtgtggtgcctgttttactgttactgttgcataacaattctctttgtttgtgtagattcgcaggataagccatactacttctttttttttgtaagagatgggatctgcctggagagcagcctggcataatcatagtgcatttcagccttgaacttcatgggctcaagggatccttctgcctcagactcctgagtagttgggactataggcacgtgaaactgtgcttggcaagccatactttttttaagtctattgaaccggatcatgatgatgaaacattttgagtttatgacttctttctgcaatattctggatcctggggtgagagtggtagaacagataagatgcttgtctcaccatggagttctaatattatttttaaattacatgcaataatatttactttttttggtaacagcattattgagatataattcacacaccataaaattcagccaattaaaatgtacaaatgtacagttaactgtattaaattatacttaatatccagagttgtgcatccatcaccacagttttagaatgtttggtttatctcaaaaagaaacccaggatcctttagcagtcaccctccttcctcccacctctcccttcagcttaggcaaccactaatctactttctgcctctatggatttacctattctggacatttcatataagcagaatcacatgatatacagtctttggtgattggcttctttaacttaccataatgttttcaaggtttatccgtaatgtacatgtatcaccactttctttttattgccaaataaaattccattgtattgatatgccacaatttgtccatctaacagttgatggacatttatctccacttttttgctattatatataatgctgatgtgaacatttgtgtacaagttttacatggacatgctttttatttttctgttgaatacgtgcctaggagtgaaattactgaaccatatggtgactctattgcttaaccttttgaggaactgactattcatttattttggatatatagtttctaagttctgaaaaatgaatggtttttgtaacctactgtgtagaagacacagaaaacttccatttaccctgttatattccttcaatgatgtccctttgtggataaactctgcccccaacctctaggccctggcaagcactgatctgctttccatttctacatttttgtcttaactagtatattatataaatggacttacagtctttttgagtctagcactccctcagggacagggtctcactctgttgcccaggcaggagtgcagtgagtctagcttcttttacttaaaataattagcatttgagattcattcatgtctttgtgtttattaatagttaattccttttaaatgcctactagtattccattatatggatgtaccatagtttgtctattggccagttgaagatatttgactcatttctagtgtttttggccattatgaatgaaactgctgcaagcatttgtgttcagggttttgtgtaaatttaagttgtcatttatgttgggtaatacctatgagtgggactgctgagtcatatggttagtgtatgtttaattttataagaaactgccaaactgctttccaaagtgactataccattttgcactctaccaacgtgtgagatttccagttgctcctcatccttatcagcactcattattgtcatttttttatggtttcagttagtgtaacaggtatagtgatatctcgttttggttttaatttgcattcattaatgatgtttcattaaggaagtaaagagccttttgtgtctttatttgtgacgtgtatattttctttgattaggtgtcattcatttaaaacttttccccatttgaggctaggcacagtgggtcgtgcctataatcccagcactttggaaggctaaggcaggagcattgcttgaactcaggagtttgggaccagcctgggcaacatagcgagacttcatctttacaaaaaatgaaaaaattagctgggcatggtggcacataccagttacaggttgagctgggaaggttgcttaagcctgggagatcaaggctgcagtgagccatgatcctgcaactgcactccagtgtggggcaacagagcaagaccctgtctctcaaaacagcaaccacagcaaacttttgcccatttgaaaaatattaggttgtttgttgtcttgttattgagtgtttagtttctttcttcttcttcttcttcttctttttttttttttttttttttttcgagacagggcctcgctctggttgcccaggctggagtactgtggcgtgatctctgctcactgcagtctccacctcctgagctcaggtgattctcccacctcaacctcccaagttgttgggattacaggctctaacatgcctgcctaattttttgtgtttttagtagagatgcagtttcaccatcttgcccaggctagtcctgaactcctggactcaagcagttcacccacctcagcctcctaaagtgttgggattatgggcatgacccattgggcccagcctagtttcttcatgtatcctagatacaaatcctttatcttatttacgtaagttttaaaagtatttaccacagtctgtatcctgtctctttgttcttataacaatgtctttcacagtggaaatgtttgtagttttgatgatgttcagtttatcaattttcttctttttaaaaaatattttgtagagacaaggccttgcttgctatgttgcccaagctggtctcaaattcctggactcaagtgatcctcccacctcgtcctcccaaagtgctttgattacaggcatgagccactgtgcctggtcatatcaatttttttttttaaatacatcatgcttttgatgtgttatctaggaactcttggcctaatccaagataacagttgtttcctcttattgtttcttctaaaagattcatagttttctgttttacactagatccacacattttgaattaatttttgtacaaagggtgaggtgttggtagagagtgtcattggtttgcatatggtttttcagttgtttcagcaccatttgttgaaaagactatttctccacttaattgcctttgcacctttgtgaaaaatcgattcactacatttgtgtgggccttcttacaggttgaatattctgttcattgatttgtttttatgtccttttgccagtaccacactattttggttttcaagtgttaattttaaggttggaatgttttgtctaatgcccccttccttttggtttttcaaagttaaaaacttcatttttcctatcataaaaaacagacattttattttacctgaggtgacatatagcaatacctcaaattcatgagttactcctttcttcctatctggattgtgaacaacagtttgagatactgaggtagaggatatgtcaagttgaagatgctgtggatgactgcgtgtcctttttcctagggatacctactgaaagtggttgcattgtgtacaagtctgatcattagctgcatcatcttagcacacagcaccttttttcgatgaaaagagtctcactccttttactccagaaaggaaatacaaaattggaaagatcgtgtatccttgatagaatctgcacactatttgtacagaatagtaaagccaaacttagaagaatctcctctgactattccatagtcatggttcttttatctatttattttaaaagtttattttttgtggtaaagtatacataacacaatatttaccattttaatcatttttcggtgtacagttctgtggcattaagtaaattcacatcatgcagtcataaccaccattcatgttcaagattaatcatgattattttttaacctaagttccatcactgaaacttctagcacattaaagttacattcactttttgaaattacattttaacaatgctctagcatttcaggtcaatcaaggccttaacatttttgtaaatcttatagttatacccataaaaactttcagccagtagtataacttccagcaaactttgactttcgtcatatgtgagtagcattcagttagtctttaaaagatagctttttaaagtctgccaaatgtatgtagctcacctattattatccccatctatgtccagaggaatttggcatatcagcatgttttattttggttattatcaaggccatttgagtggttcagatgtaggacccaactggaattgttaacttcaacttgtttttgttactgatatttcttcacagtgggcaattaaatttatgggggacaagtgtaattttgttcaatggatatactgctgtagtggtgaagtcagggttttcaatgtgtccatcacttgaaaaacatatgttgtacccattaagtaatttctcatcatccccctactccttgtgagtctttgttttctgacattccacactctacctccatgtgtatacattatttaaatctcaacagtaagtgagaacatgtgatatttgtctttctgagttgtttcacataagatcatggcttccagttccatctatgttgctgcaaaagaatgacctcatttttttatggttgaatagtattccattgtgtatatatactacatcttctttatgcagtcatcttctgatggacacttaggttgattccatatttttgctattgtgcaaggtgggcatttttgaggagagaggcttactttgttgccttctgcctttgctttgccatatggattgattgtatttgaatctgaattgggcattagaaaacactgttaaagcatattagtctgttgtagaactaaaaatgtgagggcattagaaacttcatttgaaacttttgtgagtgtatcattcatttttgcatatgaatatcattttgtctcacagaaaatgtgtatgtgtatttttatcttgtgtagaaataacagcgtagtcagcagccattgttgcatagtctctggcaatattgttttgttttttttttgtttgtatgtttctaaacttacaggatatgtttctgggtaaacttaaaaatgactagcaggaaatcaattggcaatatgtgctgacttgtatctgagttaatagaaaatcagagccagaacaaggggttttctggctaagctctttgagactaatgtttctggatttgttaaaaatctaatataggtcaggtgtagtggctcatgcctgtaatcccggcactttgggaggctgaggcaagaggattgcttgagcccaggagtttgagactagcctgggcaatatagggagacaccatctctaccaaaaaatttaaagattagctgggcacgatggtacacacctgtagtcccagctactctggtgagtgaggtgagatcacttgagcccagaaggttgaggctgcagtcagctgtgaacccaacactgtactccaaaacaaaacaaaatctaatataatggtttctagttgtgtacgttccagagatactaattgcaaagattcaatgataaagaatagtatagtcttgcaattctaaaattccaagagcttggaaaacttattctttttcttgcattggtaaatttctggacagaagggtagaagtttgaatattcatatattttgctgtagagatattaatgtgtttgattaagggtgctgcctagattctgctaggcgtgttaagtaatatacataaccactgtatttgctttccaatagggtttttggacctgaattaacagccagcattaaattgagttgaaacagagtttaaaattggttagttttatttccctagatctcaatggtaaaaggtaaggagagcaaaggaagaattgcccaggtgaatatttgggctcgagggatcctgtcatcacagctttcttagtggctggaactacaggtatgcaccactgtgccaggctcttttttaaaataggttattttttcttttgtaggggctatttacaaaaagaaatcctggcttttattattattattattattattattattattattattatactttaagttctagggtacatgtgcacaacgtgcaggtttgttacatatgtatacatgtgccatgttggtgtgctgcacccattaactcgtcgtttacattaggtatatctcctaatgctgtccctcccccctccccccacctcacgacaggccccggtgtgtgatgttccctttcctgtgtcgaagtgttctcattgttcagttcccacctatgagtgagaacatgtggtgtttggttttctgtctttgcgatagtttcctgagaatgatggtttccgtcttcatccatgtccctacaaaggacatgaactcatccttttttatggctgcatagtattccatggtgtatattatgtgccacatattcttaatccagtctatcattgatgggcatttgggttggttccaagtctttgctgttgtgaattgtgccgcaataaacgtatgtgtgcatgtgtctttatagcagcatgatttataatcctttgggtatatgcccagtaatggagtggctgggtcaaatggtatttctagttctagatccttgaggaatcgccacactgtcttccacaatggttgaactagtttacagtcccaccaacagtgtaaaagtgttcctaaggaaatcctggctttttttaaaaaaaaaaaaaaattttttttattatactttaagttttagggtacatgtgcacaacgtgcaggtttgttacatgtgtacatgcgccatgttggtgtgctgcacccattaactcgtcatttacattaggtatgtctcctaatgctatccctccctccttcccccaccccatgacaggccctggtgtgtgatgttccccttcctgtgtccaagtgttctcactgttcaattcccacctatgagtgagaacatgtggtgtttggttttttgtccttgtgatagtttgctgagaatgatggtttccagcttcatccatgtccctacaaaggacatgaactcatccttttttatggctgcatagtattccatggtgtatattatgtgccacattttcttaatccagtctgtcattgatggacatttggattggtttgaagtctttcctgttgtgaattgtgccacagtaaacatacatgtgcatgtgtctttatagcagcatgatttataatcctttgggtatatacccagtaatgggatgcctgggtcaaatggtatttgtagttctagatccttgaggaatcaccacactgtcttccacaatgtttgaactagtttaccgtcccaccaacagtgtaaaagtgttcctatttctccacatcctctccagcacctgttatttcctgactttttaatgatcgccattctaactggtgtgagataatatctcattgtggttttgatttgcatttctctgatggccagtgatgatgagcattttttcatgtgtctgttggctgcaaaaatgtcttcttttgagaagtgtctgttcatatcctttgcccactttgtgatggggttgtttgtttttttcttgtaaatttgtttgagttctttgtagattctggatattagccctttgtcagatgagtagattgcaaaatttttcttccattctgtaggttgcctgttcactctgatggtagtttcttttgctgtacagaagctctttagtttaattagatcccatttgtcaattttgtcttttgttgccattgcttttggtgttttagacgtgaagtccttgcccatgcctgtgtcctgaatggtattgcctaggttttcttctagggtttttatggttttagatctaacatttaagtctttaatccatcttgaattaatttttgtgtaaggtgtaaggaagggatccagtttcagctttctacatatggctagccagttttcccagcaccgtttattaaatagggaatcttttccccatttcttgtttttgtcaggtttgtcaaagatcagatggttgtagatgtgtggtattatttctgagggctctgttctgttctgttggtctatatctctgttttggtaccagtaccatgctgttttggttactatagccttgtagtatagtttgaagtcaggtagtgtgatgcctccagctttgttcttctggcttaggattgtattggcagtgcgggcccttttttggttccagatgaactttaaagtagttttttccaattctgtgaagaaagttattggtagcctgatggggatggcaatgaatctataaattaccttgggcagtatggccattttcatgatattgattttatgaggccagcatcatcctgataccaaagcctgacaacaacaaaaaaagagaattttagaccaatatccctgatgaatattgatcctcaataaaatactggcaaaccgaatccagcagcacatcaaaaagcttatccacagtgaccaagtgggcttcgtcactgggatgcaaggctggatcaacatacacaaatcaataaatgtaatccagcatgtaaacagaaccaaagacaaaaacacatgattatctcaatagatgcagaaaaggcctttgacaaaattcaacagcccttcatgctaaaaactctcaataaattaggtattgatgggacgtatctcaaaataataagagctatttatgacaaacccacagccaatatcatactgaatgggcaaaaactggaagcattccctttgaaaactggcgcaagacagggatgcccctctctcaccactcctattcaacatagtgttggaagttggccagggcaatcaggcaggagaaagaaataaagggtattcaattaggaaaagaggaagtcaaattgtccctgtttgcagatgacgtgattgtatatttagaaaaccccatcgtctcagcccaaaatctccttaaactaataagcaacttcagcaaagtctcaggatacaaaatcaatgtgcaaaaatcacaagcattcttatataccaatgacagacaaacagagagccaaatcatgagtaaactcccattcactattgcttcaaagggaataaaatacctaggaatccaacttacaagggatatgaaggacctcttcaaggagaactacaaactactgctcaacgaaataaaagaggacacaaacaaatggaagaacattccatgctcatagataggaagaatcaatatcgtggaaaaaaaatttttttttaatagaggcagggtctcttgtggtctaggctggagctggcttgtttaaattgcatttttttaatttttgaaaaacatattcgtgtggttcagaagtaatgttaaaagactgtagctatggtcaggtgcggtggcttatgcctgtaatcctagcactttgggaggccgaggtgggtggattgcctgagctcaggagttcgagaccagcctgggcaacattgcaaagccccatctctactaaaaatacaaaaaattagccggctgtggtagcgcatgtctatagtcccagctgcttgggaggctgagtcacaggaggctgagtcacgagaattgcttgaacctggaaggcagaggttgcagtgagctgagattatgccactgaactccagcctgggtgacagagcgagactctgtctcaaaaaataaaaaattaaaaaaagaagactatagctgtttccaaagtaactgtattttaaacagtacatgttttgagaaatcctgttcggtatctttgtgaaatagggtatagtttagaaattctgccattactttatgtattatagaagttaacttccttttttatttcagaactatgtagaaataagaagtagagaaagcataaattgacattgacatcttggcctaaataagaaataatatagaaaaagaccctttgcattatttttttatctcctgatattagttgcctattttacctataaatcagtatttatttgatgacatttgtatccttgatcttcctttcaatgaggaaatgataacttgagtctttcactttaagaatattgcttatgctgaacattagagcagtagtttttcttgtagtggagtggggcaaggtttaggaacgttcagctgggaattataaatggaacattagtgttttggcagactgaaagacaatttctgtttattttcacttcttcttttctactttgtgcaaatccaccttttaaggaggtactgactgtaaacaaccccagtgccagacatgattaccattgatcaagaaggtttattttgaagagagttcatccttcatgaagtttcataaacatttgttctttaaaatgtattggtcctctcttttctgcataagtaggaaacattcatatcagtaatacatgtcatgtaatatcctcatggattcttggatttctctgatgaaatttagtctttgcaagtgtatttgcctagttggcatttgttgtagcatgtatgtagtgagtactttaataatcagagtctttaaccatcaaattatatttatttctgaaatttgtcttttgttattattctactagaaaaaagaaagaggagaattcgaaattttttacatttatatttctacttagagtcttaattcagtattgcataccatctatgtaatcttactaatagttttgcttgtacttcctaatgatataaatcacagcaatttgaaatacagaaatatcaagtggatgtactactgtatttcaatcatgggttatgaaaaatcagcatgttctggattattgtatgtgcatgttacactgctcatttattgaattagaattttaagtagcactatgaaaagctgttttgcctgtatcttgagctcagagggaaagaaacatccaatgatttatgcttggagatacagagtttggtgagaactggtaataagcacaatggcaggcagaattaggaaggaagtatgttgtagtgtacagagttttacatgggtcatttctttgaattcaaattctgtagaaaatttctggcagttcctgtctcatgctgatttatttaggcttttttttttttttggtagagaggtttgctaattgcaacttgttaaactcctgtgctcaagtgatcctaccacctcagcctcccggagactacaggtgctggcaaccacactcggctaatttagtagagatgaggtcttgctgtgttgcccaggcttgtcttgaactcttggggtttaagtgattctctcagtttgacctccaaaagtgttgggattataggcttgagccactgtgcccagccagttatttttagtacaaagtaaaggtggcagagtctcatcatgggtctaaagtttggacacttattgtatagttgtgtttgttttgagattccatggaatgtttatcatgggaaggcttttgaagagattgatttagtcattttaggacatttgaaacatttggtttttagttttagtggagaagtatataactcactaattgggtgaaaatgcttaggtcgttggtggaattttgtggttgcaattttctctaactattaagcatccatttttgaattctcttatccttaactcgctcttctagaattcctagaggacctgtgcaacaacctcttgaggatcgaatcttcactcccgctgtctcagcagtctacagcacggtgagtgtctgaaggttgtcaaattgtgtgtgtgcttttgtgtgtgaatccttggtattaattataggcagtgtttgtttgattgacacatgacaaatttttggcaaaaagttcaataaaattctgaatagaatgataggccctttccatatcatcttaatctaagaaatggagtgaaacaaatactgtgttaagatagagagacctgtcttatttttcctttctgtaaatattcacctctggccttattattattattatttttattattttgagacagagtttcactgtgtcacccaggctggagtgcagtggtgtgatcttggctcattgcaacctccgcctcctgggttcaagcaattctccctcctcagcctcctgagtagctgggactacaggcacgtgccaccacacctggctaattcttgcatttttagtacagatggggtttcaccgtggtggccaggctggtctcaaactcctgactgcgggtgatccacctgccttggcctcccaacgtgctgggattataggcagctttgtattctttttggactcttgagttttattttctttctggattttttttcttaaaaattttatcagttttacattttctaaactttaaattttttaagttttactttttattctccttgattacatattttcaaaatgctgaaagtttagaagagtgaacactttttttttaaattttgagatggagttttgctcttgttgccaggctggaatgtaacggtgtgatctcagctcactgcaacctctgccttcccagttcaagtgattctactgcctcagcctcccaagtagctgggattataggcgtgtgccaccatgccctgctaattttgttcttttagtagagacagagtttcaccatgttggttggtctcgaactcctgacctcaagtgatccaccacctcagcccctcaaagtgctgggattacaggcctgagccactgtgcctggccatgaacactgtttttaacagaaggaaatttaattttttttcatttttaagagatcgggtctcactctgtcacccaggcaggagtgcagtggcatgattatggattactgcagccttgaactcctggcctcaagttatcctcctgcctcagcctcccaagtaactgggactacagtcacatgctactgtgcatgctaattaaaaaatttttttggctgggcacggtggctcatgcctgtaatcccagcactttgggaggccgaggcaggtggatcacgaggtcaggagatcgagaccatcctggctaacacagtgaaaccccgtctctactaaaaatagaaaaaattagccggacatggtggcgggcgcctgtagtcccagctactcaggaggctgaggcaggagaatggcgtgaacccaggaggcggagcttgcagtgagctgagatcgtgccactgcactccagcctgggcgacagagcgagactccgtctcaaaaaaaaaaaaattttttttggtagaggcaaggttttatgatgttgctcaggttggtcagactcccgagctcaagcagtcctcctgcctccacctcccaaagtgctgggattatagacatgagccattatgcccagcccatttaattttttatattagatgattcaaattcataaatgaagggaaaataattattttgaggattcttacttggttgagcaggctggtttcaaattcctgggctcaagtgatccacccaccttggcctacgaaagtgctgggattacaggcgtgagccaccatgcccagccatatgaaagaaaatttaaaagttagaggatgaagctaataatattagaagtaaattttaggtgttttacagtgaacctaaggtaatttaggggaattagggagtgaaacctatcttttaaatatttcggttcaacataccatttattcctgtggatatagataggataccttaaaaggactcatagtctactgagggagataagaaaataaataattctaatataaagtgatatgatagagaagtgattcctattattttgggttgtgaatcacttttagaatctgaaaatagttgtaatgctctctctttcaagagttacatatacatagtgtttacatataatttcagagtttcccagatgtccatcaggccatttctttttttctttttttttttttttgagaaggaatctcactctgttgcccaggctggagtgccgtggctcgatcttggctcactacaacctctgcctcctggttcaagtgattctcctgcctcagcctcctgagtagctgggattacaggtgcacatcaccacacctggctaatttttgtatttttagtaaagatggggtttcaccatattggccaggctggtctcgaactcctgacctcaagtgatccgcccaccttgaccttccaatatgctgggattacaggtgtgagacactgcgccccacctcatcaggccatttctaagctccagattaagaacctttgattagagacaggaacgtgttaattgcatgcgaaaggaagaggtgacttcattgagaaagtgacacttaaagcagaagatgcaagacttctgtaggtagagaagagaaggcaaagccttctaggaagtgaagatccagaggcgtggttaatggaatggccagtagacagttcactatgacataatatgaagtgaaataaagagtatgtaggttggttgggggggttttaagctgatctttgtatatttgcaaattaaccaggcatggtggcatgtgcctgtagtcccatgtactttggaggctgaggcaagaggatcacttgaggccaggagttaaaggctgcagtaagctttgatcaaacctctatgctccaacctgggtgacagagtgagaccctcaaaaaaaaaaaaaaaaaaaaaagagtatcatgtaggtaatggatatttttcttggtctgtctgaaggctcagtaacacctattgtagatcaattaattatttctgcagccccattcactcttagaattgacccagtttctgttataaattatctggtcaccctaatcattaggaaccttcagttcattgaaaaataacattttgaataacactttgaaaaataacctttgggccaggcgcgatggcttactcctgtaatcccagcactttgggagaccaaggcagacggatcacgaggtcaggagattgagaccatcctggccaacatggtgaaaccccatctctactaaaaatacaaaaattagccgggtgtggtggcgtgaacctgtagtcccagctattcgggagactgaggcaggagaattgcttaaatccaggaggcagaggttgcagtgagccaagatcgcgccactccagcctggcgccagagtgagactgtctcaaaagaaaagaaaaataacctttggctgattgtgctgtctcctacctgtaatctcagcacttggggaggccaaggcgggaagattgcttgaacccagtagtttgataccagcctgtgcaacataatgagaccccatctcaacaaaaaataaactagccaggcatggtggtgcgagcctgtaattttaggtagttgggagaccgaggcaggagaatcacttgagcccaggaggtcgaggctgcagtgtgatacatgattgcgcctctgaattccagcctggacagtagagcaaaatcctgtgtcttaagaaaaaagaaaacttaaaatatttttttctggcacaacctttctctaggtcttagttttttatagttttttcaaaaagtactatgcaaaagaacagcatcattgtcagaatccctcttaaaatacgataatgttttctaattacctaagtatactttcaccatttaattattatttttaaattaagataagtaaaaatgaaaacttctagtaatcctgagtgatttatggaggcaaatactataaccatttttggagtgtagcttgtctttcttgtcttttttttagaccctatgctttattctgtccctttatctcgtatcagctttttgtatgccattccttagataacatttcttaaataataaatggttatatattgtttattataaaagaatttaatcactcagcattgaatacttaagcttaagcttttactgtgtgtcatgcagtggtctaggtgttcaggatatggtaatggagcaacacagaccctcagccctcatggatattacatctttatgggataagaagacagcaaacaaatatatatacagtatactattgggttttagtaagtaacttgatgagaataaagcaggataaagggatagagaatgactggccattctaccttaactaattctctcagggaaagtctctctgaaaaggtggcaattaagctgaaactgaagatttctaggaaaaaaaaaacatttgtggtagaaggaacatcagtgcagaggcccagagataggagtgagctcaatgtagtcttagaaatggaagaaagccagtgtggctggaatggagggaggttggatttgagacatcagattatgtggactggtatggtttggctttgtgtccttacttaaatctcatgtcgaattgtaatccccaacaagtcaggggagggacctggtgggaggtgattggatcatgggggcagattttccccatgctgttcttgtgatagtgaatgatttttcatgagatctgatggttcaaaggtgtggcacttctccccttgctctctctctctctcctgccatcatgtaagacgtgccttgcttcctcttcgttttctaccattattgtaagtttcttggggcttccccagccacgtggaactgtgagtcagttaaacctcttttttttctttcttttttttttttttttaaattacacagtctcaggtagttctatagcagtgtgagaatggactaatacatggacattacagaccatagtaaagattttggattttaatctagatataatagaaagccagtggaggattaagaggagtaggtgtgaatttacttttaaaaggtcactgtggctgctgtatggagaatagactgtgtgatgtggacatgtggtggtgattgaaatgggagtaaggagaagtaaagtcagtagaatatgttgatgtcttggatgtgggatgtgagagaaaagagtaaaggtggtgtcgtagatcttggtttgggcaactgagtggtcctatttgtggagatgaatactgaatgaggaacgagtattttgttgaaaaaacctgagttataaaacctcataaatgaggacatgtaattctgtaattttattactttggagaatagatcatccaaatcctgtgagcaacagcacactgcctgtcatgcagtttacaggaaatatttgaatctaagcttttgaatgtatttttttagtttgatctaatttgatttttactatttaaaactactgtcatatttgtagtcctttgatcagttttaaaaaatcgagaccaggcatggtggctcaaacgtgtaatcccagcactttgggaggctgaggtgggtggatcacttgagctcaggagtttgaaaccagtctgggcaacatggtgaaaccctgtctctattagaaaaaaaaaaaaaagtgtgtgtgtggctgggtgtggtggctgacgcctgtaatcctagcactttggcatgccaaggagggaggactgctcgagcccaggaacttgagaccagcctgggcgacagagtgaaaccgttgtctccaaaaaaaaaatgtgtttgtgtatatattatgttttatgcctattctggaagaaaggtttttaggcagctaaaagttaccttaaagtgtgatagtctccactttttatttatttatttatttaacagagtctcactctgtcgtctaggtcagagagtagtggcataattacagctcatcgaagccttgaactcctgagttcaagtgaacctcctacatcagcttcctaaatagctgagtaactaggattacaggcacaagccaccgtgcccagctaattttttaaacttttttttttttttttttttttttttttttttttttgagacagagtctcgctgtgtctcccaggttggagtgcagtggcgagatctcggctcactgcaagctccccctcccaggttcatgccattctcctgcctcagcctcccaagtagctgggactacaggcgcccgccaacacgcccggctaattttttgtatttttagtagaaacggggtttcaccgtgttagccaagatggtctcgatctcctgacctcgtgatccgcccgtctcggcctcccaaagtgctaggattacaggcgtgagccaccgcgcccggccaattttttaaactttttaacagagacagagccttgctatgttgcccaggctggtctcaaactcctggcttcaattgatcctctcacctcagccactcaaagtgctgggattatggtgtgagctgctgcatcctgccggtttccccttttttgttgtttttttgtttgttttgaggtggaaccttgctctgtcacccaggctgaagtgcagtgatgcattcttggctcactgcaacctccatctcctgggttcaagtgattcttctgccttagcctcctgagtagctggtattacaggcacgtgccaccacacctgactgatttttgtattttttagtagagaaggagtttcgccatgttggccttgctggtcttgaactcctgatgtcaagtgatccacacgccttggcctccgaatatgctgggattatgtcatgaagtaaaagttaaccctcagttcacctcctactgccttagcatatggtgtccatatgtcactttcattgagttggttaaattccttgaaaggctcctggccagtctcaaaattacacaaagattatgcttttttgtatctggtatgcaggctttttacactaatgtccgtcattttacataatagggatttgctgataatcaaagaagcattaaaagtcagacttggccaggcacggtggctcacacttgtcatcctggtactttgggaggccaaggtggtgggaagattgcttgagctcaggagtttgagaccagcctgggcaacatggtgagaccgtgtctctgtatttttaaaaaattaagaaaaaaaagttggggctgtgcgtggttggctcactcctgtgatcccagcactttgagaggctgaggcggttagatcacttgaggtcaggagttcgagaccagcttggccaacatggcgaaacaccgcctctactaaaaatacaaaaaattagctgggtatggtggcgtgagccagtaatcccagctacttgggaggctgagacatgagaattgcttgaacccgggagtcaggggttgcagtgaaccgagatgcaccactgcactccagcttgggcaatagagcaaggctctgtttcaaaaaaaaaaaaaaaaaaaaaaaattggactcatcttctggaatgtgttcatgttacatttagtctagttattttgtatttgtttattttaacctggtttttgtaagtttgccctgggaacatttatcagatatgagagagaagcttatgtcattattccttattagccataattgagtgattgatcatatgaacaaaaaaagaatcaagcacatatatatatattttgagatggagtctcactctgtcgcccaggctggagtgcagtggtgcgatcttggctcactgcaacctccgcctcccaggttcaagtgattctcctgcctcagcttcccgagtagctgggactacaggtgtgcaccatccatgcccagctaattttttgtatttttagtagagacggggtttcaccatgttggccatgatggtcttgatctcttgacctcgtgatccacccgcctcggcctcccaaagtgctgggattacaggcgtgagccaccacgcccagcccaagtacatatttttaaaaggtctagtgagagctgcatatgttaaatgggggagggaaaatgtcaaaactaaagaaacataggttaatttgaaatattaattgataactttcttatattggcctgcctctgcagtataaactgtggaattttactatgttctataattttgtcgtatatattttacttagagaaattagattttatgactatcaggctagtatttttaatataattgcagagatgaacttaataatagaataatgacattactaaaagaaggagaaatttatattctgtgaggttggaagggttatcttagtaactgcttatgaaaaattcacagctgggcccggtggcttatgcctgtaatcccagcactttgggaggctgaggtgggcagatcacgaagtcaggagtttgagatcagcctgaccaacatggtgaaaccctatctctactaaaaatacaaaaattagccgggcatggtggcgcacacctgtaatcccagctactcaggaggctgaggcaggagaattgcttgaaccccggaggcagaggttgcggtgagctgagatggcgccattgcactcgagcctgggcaacagagtgagaccctgtcccctccaaaaaaaataaaggaagaaagaaattcctataaattatttaaattacttcttaataaatagctcttttttttttcttttttttgagacggggtcctccgctcttgcacaggctggagtacagtggcatgattttagctgactacagataattcctcttcaatgccataaaatttattttcttctttctctctctcttttttttttgttgagacagtgtctctctctgttgcccatggtggagtgcagtcgcacgatcatgtctcactgcagccttaaactcctgggctcaggctatccctcctcccttagctttccaagtagctaggactacaggcatgcatcaccatgcctggctaattttttttttttttttagttggagtcttactctgtcaccgaggctggactgcagtggcaccgtgttggctcactgcaacctttgtttcctgggttcaaggaattctcttgcctcggcctcccgagtagctgggattacaggcacccaccaccacgcctggctagtttttatatttttggtagtgacggggttcaccatgttggccaggctggtctcgaactcctgacctcaggtgatccacctgcctcggcctcccaaagtgctgggattacaggagtgagccaccgcacccgggccatgcctggctaatttttaaaatttttgtagagatgagatcttgttgtgttgcccaggctggtctctaatgtcagggctcaagcaattctcccgcctcagccttccaaagtgctgggattacaggcatgagccaccatgcccagctatgccataaaatttcatgagtttttttttttttttcttttgcgacagggtcttactgtgtcatccaggctggagtgtagtagctcagtcatggctcgctgcagcctcaaccttttaggctcaagagatactcttgccttagcctcccaagtagccaggactacagatgtacatcatgactcctggctaattaaaaagcattttttttttttttttttctgtagagacaaggtctcattatgttgcccaggctggtcttgaactcctgaactcaagcaattttcctgcttgagcctcctaaagtgttgggattataggtgtgagccactgctcctggcctcatgatacatttagccattttatattttataaaatcttgattcttttaccctaaagctttgtttaatctaattagagaaccatgcttttatttcttttgccaggccactgttgagtatttgccaggtcactattgagtaggctaggatttcagtggagatacctcgccagagacaaaagtttagcttgggttgatcaatattctttaggcaatggtgtccagccagatgtaaatctgtttgattgtcctatcatctagcacagatggcaaatatatcatttaaactaaagatttatttatactttttttagaagaatcatttatctttacatctctgcttttaaaaattgatacttaataattatttgtgggatacatgtgctattttatttatttatttgagatggagtctcactgcgttgcccaggttggagtgcaatggcatgatctcagcttactgcagcctccgcctcctgggttcaagcgattctcctgcctcagcctccatagtagctgggactaccggtgcacgccactatacccggcgaatttttgtatttttagtagagacggggtttcaccatatcggccaggctggtctcgaactcctgacctcaagtgatccacctgctttggcctcccaaagtgttgggattacaggcatgagccaccatgcccagccacgtgtgttattttgatgcatgcaagtaatgtgtggtggtcaaatctgggtaattaggatatttatcacctcaaatatttatcttttgtgttagaaacatttgaaatcttctagctattttgaaatatacaacaaatgaatgttaactatagttgccctactctgctaacgctagaacttattccttttatttaactgtatgtttgtactcattaaccaaccagtcttcatatgtctcaccacccttccatgcttcccagcctctggtaaccatcattctactctgtacctacatgagatgaatttttttttaactcccacataggagtaaagacatgatatttttctttctttgcttggcttatttcatgtaacatcatgacctcctcttccatttctgttgttgcaaatggacgtggttgagtgatatttcattgtgtatatatgacacatttatattatccattattctgttgatggatacttacattgatccacatcttggctattgtgaatagcgctacagtaaacacgggtggcagctatctctgcactgaattcattaataaataaatgaatgctataaattctaaatgctgtagaattcacttataattttaatgcactgatttcctttcttttggatatgtacccagcagtgagattgctggatcatatggtagatctattgtagttttttcacgaacctttatactgttctccttagtggccttactaacttatgttcccagcagcagtgcgagcattctcctttctctgctttctcggcagtgtctttttgttgttttttttttttttttgagacggagtttttgctattgttgccctggctggagtgcaatgatgtgatcttggctcaccacaacctccgcctcctgggttcaagcgattctcctgccacagcctcctgagtatctgggattacaggcatgcgccaccacgcctggctaattttgtatttttcgtagagatggggtttctccatgttggtcagcctggtctcgaattcccaacctcaggtgatctgcccaccttggcctcccaaagtgctgggattacaggagtgagccaccacgcccggcccgtttttttttttttgtatttttaataatagccactttaactggagggagatgaaatctcattgtggttttcgtttgtgtttccctgatgatcagtgatattgagcacttttcatatacttgtcagccatttgtatatcttcttttgagaaatgtctgtttagatcatttgtcctttttttttctttttttttttttctagacagggccttgctctgttgcccaggctggaggacagtggtgcaatcctgactcactgcagcctcaacatcctgggcttgagtgatcctcctgcctcagcttcctgagtagctgggactacaagcatgctgcctccataccaggccaatttgtttatttatttttgtagctatggggtcacactatgttgcccaggatggtcttgaatgcctgggctcaagcagtcctcctatcttgacctcccagagtgggattacagatcactgcctgcccatttttaaattggatttttttcttcttttctttttgctgttgagttgtgtttcttatatagtttggctgttaatcaattgtcaaatgtatagtttgcatatattttctcccgttctgtaagttgtctctttactctgttgactgtttccttaaatttgcagaaactttttaattggatataatcccacttctctagttttgcttttttctctttttagattttacccaaaagaaaaatcttttttcagaccaatgttctgaagcatttccttggtgttttcttgtattcgtttcatggtttcagatcttaacatttaaatatttagtccattttggtttgattttggtatatggttagagatagggatctagtttcatttctctgcatgtagatatccagttttcccagcactgttgattgaggagactgtcctttctcctgtgtatattcttggcacccttaaaaaaatgaattggctataaataaatggatttgtttcttgattctctgttgtcttccattggtctatgtttttagtccagtatcatgctgttttggttactgtagctgtgcagcatattttgaagttaggtagtatcatgtctctatttttttattttttatttttattttttgagatgggatcttgctctctctcccaggctggagtgcagtgggcatatcttggcttttttgcttttctgctgctttgcttttgcttttctttctgcttttttgatgtaggtgtttattgcaataaactttcgttttactactgcttttgctgtgtcccatggattttagtattttgtgtttctactgtcatttatttcaggaaattttaaaattttcttcctcatttcttcattgatccattgttcattcaggaggatattgcctaatttccatgtatttgtacagatctatttccaaagatctttttgttactgatttctagtttcattgtatatcggtcagaaaagatacttggtatgattttatttcttttaaatttgctgagacttgttttgtggcctaagtggtctattttggagaacccgtgtgctgatgaagagaatgtgtattctgcagctgttggatgaaatgttctgtaaatgtctgttaggtgtctttcgtttaaaatgcagtttaaatccaacgtttggttatttattttctttctagatcatctgtccaatgctgagagtgggatatttaagttgaataatagttcaagtccccaactattattttattttagtctatctcaccctttagatcaaatagtacttgctatatatgtctgggggctcttttgttacgtgcatatgtatttataattgttatattttcttgctgaattgatccgtttatcatcatatggtataccttttctgtctgttttacagtttttgacttataacctgttttataaggcaggagtagtatagctactactcctggtttgtgtttgtgatgagtaactttttttgtctcttcacttttagtctatgtctgtcttttttttttttttttttttttttttttttttttgtgagttggagtctcactctgttgcccaggctgaagtgcaatggcataatctcggcttgctgcaacctccgcctcccgggttccagtgattctcctgcctgaacctcccaagtagctgggattaccggcacccaccaccatgcctggctaatttttggatttttagtagagatggggtttcaccatgttggccagcctcatctcaaactcctggcctcaggtgatctgcccaccttggccttccaaagtgctgggattacagacatgagccaccctgcccggccctatgtgtgtctttacggggaatttcctataggcaacatataggtgtgtaatgttttttaatccagccagtctatattttttaattgggaaatttaattcatttacattcatggttattattgatagataagtactaattcctatcattttgttaattgttttcttgttgttttgtatatcctttgttccttttttccctctccttgtttattatttcagtttgttggttttctgtagtgataagattcgattcttttttctttcttctttgtgtatctgatctatcagtgagttttatactttcccatgttttcatgattgtgattatcatcttttcacttacggtaaccaccccggcgaatactttactttttgtagaggcagggtcttgctgtgtttcccaggctggtctcgaactcctgggctcaagcgattctctcacctcgctcggcctctccaagtcctaggattaaaggcatgagccagtgtacctggattagttttcttttttaatacaacattgtattggaaaatatttttccaagttattacacagcagttataatcttcctaattctgtaggaacataataattaggaatttttaaagaactttcttcttagccatttaatctttttttcctgtttaatgcgtttgaattatttggtatggaaaagtaatgaaattttcttgattgttaagacagaaaggatttggttgtaagaagatttatgtatataaattattattatttttttctccagtagcatttatgaatgataactgaccatagttagaaatccagatttttgtatttgataaatttaaatacgagatgatagcatttagatattttcataatgttaggcattcttataatgtttagcttagaatttgccagtcatttggaaatacctaagtcagttgttctcaactggaggtgagtttacccccagagatatttagttatgtgtggagatgtttttgactgccacagctggtgagggttgaggagatggacagaggatgctgctgtcatttagtgggtagaggccaggtaagtatctaaacatccaagtgcatgcaacaatctcatgataaagaattatcctggccctaatggcagtagtgtcactgttgagaaacttgaatctagattttctcaaacgttaggcaaaattattaagattggttaatattattaatatttattcatctagccagtatttgttcaataccatctatggtactctactagatggtggtagaaaaacatatgaaagtaaaaaataatgaaaattgtagtgtttagaaatagagaaacaagatttaaaactgatcatttctgttaagatatgagagaaggtggaaggatcatttgagcctcagaggtcaaggctgcagtgagccattatcacaccactgcactccagcctggacaacaaagtgaaaacctgtctccattaaaaaataaaaatatctcttccagggacgttgtctacaggcactcagaatgatccagcatgtgacaataccatcatagacttccctacaatacagtctctaacaaaactaggctgtcatgagcccttggtaatagaattgtcgacctttataccaagaaggttgggaaagcaccgaaatctgcatgtggcgtgtgcccagggagacttagaggggtccatgctgtgaggcctacagttcctgtgagaagatgccattttaggtgatacctgaaccatgaaatgtattcagctgttcatggatgaagaggaagagcataaaccttcccaatagatattgcagagctccaaggccttaaggtgggagcctcctgatgattggtggctcagaaccgtgctgtccagtagagcatttccttttgagcacttgaaacgtggttaatgcaattaaggacctgaattttaaattttatttaattttcattaatttaaatgtgaatagctgcaagggcgtttgaaaatgcccttctagaggctgacaaaatctaggtcatgtaattttgtaagattttgataaagtatttgggttttatctgatgtatagaaggagctgttgaagagtttctactaagggaatgacataatatttaaatcatgaaaatactcatatttattagcagatgaattggagtttataggttacatggggagcagaatgttaagagcagctaagtggctctggaatctgaccaaatgaattcagatcctggcgcttccactagcagctgtgtgtgtcattgggtaagtttcttgcacctcagtttccttcctcatgagtaaaatggagataataatagtgctgatctccaaaggttcttaagaaggttaaatgagacaaatccatttaaacctcctagagcttgatacacagtcatcactcagatatgtaccagcagctgctgccaccatcagtaagtattctattcttacaactacaatgaagaaactattcataccgtttatttgatatgaaatctgaacaagcttagtgtggtgttagataaaacgcttatgactttcatttcaatagtgttgcttttttatttttaaaaaatattaaaggctaggcgtggtggctcacgcctgtaatcccagcactttgggatactgaggcgggcgggtcacgaggtcaggagatcgagaccatcctggctaacacagtgaaaccccgtctctactaaaatacaaacaattagccgggcgtggtggcaggtacctgtagtcccagctgctcaggaggctgaggcaggagaatggcgtgaacctgggaggcagcacttgcagtgagccgagatagcaccactgcactccagccttggcgacagagtgagactccatctcaaaataaataaataaataaataaaataaaaaaattaaatgtctttttctgtatagacatgggatctccctatgttgcccacactggcgtcaaactcctgggctcaaggaatccttgtaccttggcctcccaaagtgttgggattaccggcatgagccactgcacccagccagtggtgttgcttttcaaactttagtatttatcatcaatacttattatatatttgtcatcttggaatgtccaactttattaccttagaaaagtaaactcctttaataaactactagatgtacatgatacaaaacttaggaagttaagggataaaagacttgtagtataattatccatgtgttaaatatattttctcttttgacttaaccgttgccatattattagacccattgttcatttttaataatcccataggaagttgtttgtagaaataatataattttaatagtgttgcctaggtgtagttgtagattattgtcactttatgtttaaaagctacttctctctctctgtctttaacttatttgggaaaatagcatttgggaagtagctgtttaagtgcttttcttcttctttttttttcctctctctctttttttttttttgagacggagcctcgctctgtcacctaggctggagtgcagtggcgcaatcttgactcactgcaatctccgcctcctgggttcaagcgattctcctgcctcagcctcctgagtagctgggattacaggctcgcaccaccatgcctggctaatttttgtattttggtcaagctggtcttcaatgcctgacctcgtgatccaccttccttggcttcccaaagtgctgggatcacaggcgtgagccaccgtgcccggccgtgtaagtgcttttcaaatgccagtttttgcagatggtagtagtggatacagtttttatttatggaaccttctgtggagtgtcaggactgcactggaggattacatggagtggatgtgtttctctttggttttttggagacaggttctcaccctgttgtccaggctggagcatggtagcatgatcatagttcactgtaattaactttgaactcctgggctcaagcaatcttcctgcctcagcctcccaagtagctgggactacaggtgcatgtcgtcatgcccggctaattttgttttgtttcattttctgtagtgacaggatctcactatgttgcccaggctggtctagaactcctggcctcagatgatcctcctgccttagcctttcaaggttttgagattacaggcacgagccatgccacctggctaacatgtttcttatattagatcaatcatttattttggctactaaagctaatgtgaattttcaatttattctttatatctgatatgaattgcattagctaatgttgaaaatcagtcatttgcactgaagaacctattgtatgcagggtatgagggggtggtagcggttgtacctactctcaagaaatggaatgaaatataataaaatgaacttactagacaacaatatcaattagtccactttcaagttctttggaagtttctttttacacttacaaaaagattcagtctattattactagttaagaattattattgtgctgtcaagaatgtttatggaatgtcagtttacctttgatattctaaaactgccctctcttcagtttttgggtggttccaatttatattaattgacatatctgaaacttagcaaaaagaaggtagtttgttttttattttatgtttgcacatacatgtttggctcttaaaatgttagtaggttatatagttcttttcattaaggagttttaaaaaattaatagttaagaagaatgtagttatatctacaccatgaagtactacttaaacatttagaacaagaatgaagtaggtatgtttattgacttggaaagatctctaatgttttgataagtggagaggaaaacatgtcattgaatatttattattgtgttgttgctattatttttacacatttgtaagtgtatagaaaggtttgtaataatgtgcttcagagtattaatcattttgccatagggagtggagtgggatttgaagggtaaagagggcactactttttcttttttttaacaaaaatcatgtttatacattattgtagcaattagagaaagtaagcatcaaactttttttttccacagtcttagttgccactgcctgatatgcaaattggtaataattctatcctgattcaatcactagatgcaaatggttttccacagtggccttaaaattttcctagattattgaaaaataatattgtattagcagtaataagttgtggcttgccgttttcctttgtggtcttaaatttatttttccaaaattttaatataggacagttagctgagttcaagtcttgcattactttgaaagatcatctttgactgaattctataatgatttataagataaccatgattgagtatatttcatttctctattcttcctgtgctcaccttttacgtaaaacaacaaaaaaaatctcattcttacccatgattagctcatcctcttttctttcgacaaacctcacagtcagtgtcatcaaatatttgtgaaatccagatgctgctgctgctttcctaccccctcctctcccccggtaaaaattcctacgagttagactcagtcttttttctgtttggcctttctttctaaatagagaacagcctttcctgttgtgacagcctaaaatgtgtttgaagttacttttctgtgttttcctaagtacaaaataactgaaagatcctctggcctcttggagcttgcttttccaggggactaaacattggagatgttgcagagcttttaagaatattgagataaacttaatttagaaaacatatattgaatgagagctatatgcaaggttttgtgcctggtaatgtgagaaagcagtggtggacactatgatccttgtctttaagagtgctcattttaccaggcaagatggtgatacgttgttttaagtacatgtgggaatgtgaggaagagacattaatgattatgtaaatgagaacaaaaatatgtaaataagtagtaacatttactggtatagtttttctgggttctcattaagcaaaagtacttggaggagtgaagcatggttaaacagagaaagatggtatctagatgaactctaagaagccataaaatgtaggtgggcagcaagtttggactgcatcttacaagatattggaatgagtgtacatacatcagttaaagcctttgaggtggaggataaggttacagctacatagtgtaatgagccatgaaatagataacaaaaattgaccaaacctaggcagaggagttaactggtgaaaaactcaacagaacagtttatacaggttgagcatctctaatcaaaacattcaaaatctgatatgttctaaaacctgaaactttttgtgtaccagcattattctcaaaggaaatgctcaatggagcagttcagattttggattttcagattgggggtgctgaactggtaactgtttgcaggtgttccaaaatctgaaatctgaaacatttctggttccaaatttttcagatagggatactcaatctgtagaacattttctttattactataagtaacacttactgtgtaacagttacttttctaagcattttatgtgtattaactcaatccttatgacaactgtatgaggtaggtataattacattccccattgttagttggcaaatagacacagaggtgacgtatcctgcccaaagttatccaggtagtgtgtggtagaggttggatttgaactttggtggatcttttaacatttattgagtgactacagtgtcccagacactgtgctaaatgctttacattcatgatattatttaatacttatgacaacctttatttacaacaaaggaaaatgggacttggagacatgtaatttgaatacaggtctgttttgaatctacaagttcatgtgaagtattctgtttttttttttttttttttttttttaaagacagagtttcactctgtcgcccagactggagtgcaggtgcagtggtacgatctcggctcactgcaacctccacctcctaggttcaagcgatactcatgcctcagcctcccgagtagctgggattacaggtgccttatgcccggctaattttttgtatttttagtagagacagggtttcaccatgttggccaggctggtcttgaactcctgacctcaggtgatacacccacctcggcctcccaaagtgctgggattataggcatgagccactgtgcccggacccttctttttgttaagatcacaaataaggtcaaaagcaatactcaatttttgggggattagggcccttttgaaaatctgatgaaaggtatgaatctactttgcagaacagtaaacatacaaacataggggttttctttttttattttattttttgtttatttatttattttttttgagatggagtctcgctctgtcactcaggctggagtgcagtggcgtgagccactgtgcctggcctctttttttattttttaactgcagttttaagagagttcaataactctcactgataagattccttattctagtctagacagattttccccttgcagtggtgctgtgttgcactttgaacctgattcctaggatttggaaatagctcaacttcgactttacggtgtattaaatggagaggtatcttattaagattttatttacccttctattttgaagtatttttcttaaaaagcatttatacatgtggtactcagttgtattctggttattaaaaattttatgtctttttctacccatcatggtatctgcttgctgattaataacatttatgaaagttaggattccttgttgttaatatttaatgtgaatttgctcattaaatgttaaatcagataccttgttaaaatattatttaataaaagccagacgtggtggctcatgcctgtaatcctagcactttaggaggctatggtgggcagatcacctgaggttgggagttcgagaccagcctggccaacacggtgaaaacccgtctctactaaaaatacaaaaattagccaggcatggtggtgggcacctgtaatcccagctgttcgggaggctgaggcaggagaatcccttaaaccccagaagcagaggttgcagttagccaagatcatgccattgcaatccaccctaggtgataagaatgaaactccgtctcaaaaaaaaaaaaaaaaaagaaaagaaaaaaattacttaatatgtatttacctgattacttttcttcaaaagaaggattaaccttaaagatacaagggtatgttattttgttaaatgccagttataaatgtcttttgaatttctgggataagaaaacagtagaaataataataaagttctttaatgtttgaaaactgaaaatgtgtttctttgaactgtgggatattcccttcacagcaattttacaaagtatatgtactgtttttaaaaataaaacaactgatatggaccacgtttaactaaaatgagtcataggaaattagattttaataactagttgtgtggtaaatggagttttaattattttaaggaaaaggaaagaaagaccattagtatctccaggcatggatttattattgccatgaagttgttgtcatgaatagaacgatcagtttttactgtaaactttgatagacactggagcatttaacttcaactttatacagttccctttttatcttttaaaagcacatctggctgtcgggaattctgtaggcaagaaattgtgaaggattagaaactgttctttgtgcatttaaactgtcattctgtggttgcttaattgccatatagaatgcagaatactagattagaaaggtgtttagtttctttagctgttacagatcccaaagaacttttgactctgttaatttcttatggctataacatttctatgttaattttttacatatctaatgtaaaatcaatggtatattgttattctttgttcaataagcatttgtttagtaactttattttttttaatgtttttatattttttactttttttttttttcctccaggagtggactgagtctgatgaggctgcagggcctggcccctcatccctccccctcccgccataactctttaaaaaattcagaaaaatcaattaggatgaggtgtcaagtatttagttatttgttattattaattttcttttgagacagagtctcgctctgttgcccagtggtatgatcatggctcactgcagccttgacctcctgggctcagttggccctctcccacttcagcctcttgagtagccacaacctctggctaatttttgtatttttattagagacagggttttgccatgtttcctaggctggtcaagtatttattttaaacttgcttaaaggattagactttgcaaaccacagctttaggtttattgtaacactctcacccccatttgtataaatgaaaatcaagcaggaatcatttcaccccaaaactgtcttacacttactggcttaatattaggattttaaaccaacagtttaaatatttgtaaataattaaacacactttttatatactaggcattatgataaatattatcttaatgtgttgaataaatcagcatgataagtccttacttttcacttttacagaagaggaaactaaacttaagtaatttgcttatatagtttctgtatagtagagccagaattcaaacttaggtctctgacaccaaaacccattctcatttttttctttttttcttccccccgccgccccaccactgttttttttttaagatagagtttcagtctgtctcccaggctggagtgcagtagcatgatcatagcttgctgcaacttctgggcttaatccttctctcccagcctccctagagctaggactacaagtgcacaccaccatgctaaatttttttttttttttttttggtagaaacaaccccatgctcttttattgatgctgtttagcctacttggatgccttgaatctgtttaccttctgtttatgttccttctttcaagtttgtgtttggaaagtgataattcgtgactcagcctcagaatggaggcatatatcacacatcttacatgatttggatctgtgtcagaggaacttaatattgtggttttgataatataattgaatttatgcttatagttgaatactaaaatctgagatttattaataccttggaattaaaatagaattcacttaccttggatcagttaaataactagttgattagcaactgactgaagatcaacaggaaaatagtaaggcattagttttaaaaaattaagttgtaagttggtaaatgactaattccattgcagtcactgaatgtatatcagtaatctccagactcgcatacaaccttgtcttggtggaaagctctgactatggattttgaacataagaaagagaatgtgagtgtctgttaaaagccatcactcctcagatgatgttaaaagtcttcactccacatcttctgaggagttgtcaagtgttcctgcttctgaccacaaggacagcaattggcctgtaatatatgtattccttgaaaaagtaaggagttaatttgttatgcttgtgtagactgttactaattttgtgtagttttactaaatgattggatttagtagaatagacaaaccttaccactctttttttttattcaagacagtcattcctaactgatcaaggttttgctgttgaactgggaaaggaccttggaatcataatatagtgctacacgattctattagcagtgaaagaaataaaaatgtttttactatcttggcttcctccctttacgctgtaaagcagccctggctacctgatgtcttcatgagttgatattctaaataattttaccctcaaatagccatataatagtaagatttggttgaattagtaacagagaaaatatttatagttaaacatctgagtggccacttgtctgcaagtactgtcataagtactcattaaatcctattcctgtccacaaggattgcaagggcgcaaacagatgataagaatcagtgatcactcactgattgtgtccttgcagtctctgggtggctgcagggcacaaaggatagcatgaacctcgccattggctgcagggcacaaaggatagcatgaacctcgccatcctcaactacatcattggcttaagcaggattttataagacagtctggatacctcactgccaagttccaaatagcagattttgctcactataaaattaatgtgtctgctagaaaaatggaaacacagagaaaagtatgacaggaggctgggcatggtggctcatgcctgtaatcccagcactttgggaggctgaggcaggtgaatcacttgaggtcaggtcaggagttgcagaccagcctggccaaggtggcaaaaccccatctgtgataaaaataccaaaaaaaaaaaaaaaaattagctgggtgtgatggcatgcgcctgtaatcccagctacttgggaggccgaggcaggagaattgcttgaacccgggaggcggaggttgcagtgagccaagattgcaccactgcactccagtctgggcaacagagtgagactgcgtccccccccccaacacccccccccccaaaatgaaaagtatgacaggaaaaacatccgtgatgttgttaacaaaagactcacaccacccattttaacgtgatccttcaagttgttttgctgtgcacttaaaaaaaaaagttattagtgcaccaccgatttctgtcctgctttctttacttaaaattataccataagcaacttctcatttttaaaacacatttttctaaatatatattttaagaatgtatttacttgttctctaatgagttagtattttttactcttacagtgttcaaacaactgtcacatagtttcttggcatccataaattttctattttttttaacgctctctcagcagaatcaatattcttttcaaaatactgcctctaacttttgatctgaacccttgttgttctcaaagtgtaagtcaggtgccaccaaacccttccagattcttctcagacctggttacttttgatttttcagcagtactttaaatacatctcctattagccgggcgtcgtagcatgtgcctgtagtcccagctattcaggaggctgaggtgagaggattgattgagcttgggaggtggaggcgccactgagttgtgattgtgccactgcattctagcttgggtgacaaagtgagacccagcctcaaaaaaattaaaaaaataaatatatattctatggtatttatcacataattcatttatgatgacagagtaggtgaaattaggaatcatatcaaactggtttggattgctgtgtggtatcctgcctatcctttatattctgtcccagcatcagcagacccattatttaaaatatatatatattggctgggcaccgtggctcacgcctgtaatcctagcactttgggaggccaaggtgggcagatcatctgaggtcaggagttcaagaccagcctggctaacatggtaaaaccctgtttctactaaaaatagaaaaaattagccaggcgtggtggcacgcacctgtaatcccagctacttgggaggctgaggcaggagaatcgcttgaacccgggaggcagtggttgcagtgagccaagattgcaccgttgcactccagcttgggcaacgagtaaaactccatctcaaaaaaataggtatatctatatctgtatctatatctatatctgtggatatatctactgcttacgtcttctccgtggtgctagatccatatcaatcctgagactactgacattggtttgattgttccttagtcaccttttgcctatattttgaaattctgagattctgactttgatttaattttagtttaggatattactgatttattctctgatgatcttgtttattttcttttagaattataagcagaggctaggagtagtggctcatgcctgtaatcccagtactttgggaggctgaggtgggaggattgcttgagcccaggagtttgaagccagcctgggcaacatagtgaggccctgtctcaccaaaaaataaaacaaattagcccagtgtagtggcacacacatgtagttttaactacttgggaggctgaaacgagaggattgcttgagccctggagtttgaggttgcagtgggctatgatcgcactactatgcttcagcctgagtgacagagcaagaccctgcctcagaaacaaacaaacaaaaagcaagcagagagactgggtgcggtggctcacgcctgtaatctcagcactttgggagtccaaggtggatggatcacttgaggtcaggtatttgagaccagcctggccaacatggtgaaatcttgtcctattaaaaatacaaaaattagccaggcatggtggcatgtgcctgtagtcccagctacttgggaggctaaggcaggagaattgcttgaaaccaggaggtgaaggttacagtgagccgagatcgcgccactgtactgcagcctgggtgacagagtgagactctgtctcaaaaaagaaaaaaaaaaaaaaaaacaagcagagaaataaaccatattgattacataatgagagtgagcacaaccttgagtatgtaacaattgacattgacaaaattgatccagaaataaattttagctttgccttttgccatcttcctctcataagtttcagactttttcatctgaaatttgctagttttgataattagcttagatgctatgtggaatgttggtaatgaacctacctctagatttacttgcttggccctgactgctctcctgagcttagattcatgtattcaacacactacttattatttccatttgaatctctgataggcatctaaaactacttgtggttatccctttccctttgtctattctgcctctaatcctgtctcacagtaataacaggttgaacatcccgatccaaaaatatacaatgcttcacaatctgaatgttttggagtgccaacatgatgctcaaggaaaatgatcattagagcatttggattttggatttttggattagggctgctgaagtggtacagtgcatatattcaaaaattaaaaaaaaaacctgaaatacttctggtaccaagcattttggattaggaatactttcccttcttcccacctaatctttcaagccataaacttaaaatccatccctgatatccataatctatcactttcaagtatactatataatttatttaagtattatggctgttagtatttcagctagaccataaactccaggaatgcagggattttagtctcttttactgatgtattccatgcacctagtacaatgcttggtataaagttctcaataaatatatgttaaatgaatgaatgaatcaatcagtctacattcctttctgttccacctgctcaaacaaagtatcttgttactaccgtgttctaagccaccattagttgtggccaagatgattgcagtagctttgttttttttttttttttttttttcttaagagacaggatcttgctgtgttgaccaggctgtgatgcagtggcttttcacaggcatgatcatggtgccttacagcgccgaactgttgggcctcttgccttacgctcccaagtagctgggactgcagatgtgagccactgtggcctggcatgatagcttttaactaatctctgcttctattcttgtactcttcagttcttattcttacaaagcaaccaaaatgatctttggaaaacattcgatcttttcacactcctgcttttaaaacttccagtaggttcccagtcatgttagaataaaaccctaagtccttaccatgccaacaaggacttaaatgtgtgttgttttaagctgttaagtttgtgatttgtctcttgattaattcagataactgataaattacctagccagatcagtgttaccctattatattcactggcaccccttattcttcagaggagggaattattcagggtgtgtacaccaagtacaggaatactgagagccatcttagatttgagtccaccctggctggatgcagtgacgcacgcctgtaatttcagcactttggagggccaaggcaggcggaccccttgagcctagaagttaagaccagcctgggcaccatggtgaaatcttgtctctacaaaaaataaaaaattagccgggcatggtagtgcatgcctgtagtcccagctactcaggaggctgaagtgggaggatcacttgagcctgggaggtaggtggaacctgcagtgagccgagatcgggccactatacacctgcctaggtgatacagaccctgtcttaataaaaagagtttgccctgtggccctcaaggattcacatagggtccactttcgttaacctttgatacctagacatttttggaagtgcttctttcttattcgtttattttttcatttgttagcattgttactgaccctccaattttaacaacattttcttgtttctattggatagttactaaataagaaaagcaaccctcagaattaaacccagtgctgacaaagtccatagtagaacatacatggtatgtgtttgcttgagtttttaagtattacttgaatcatataaaattatttttcttttttaaggttaaaatatacttgaatatctgtaaatctggaatttcatgtaattcaacctattaagtataggtaagagtagagcaaggaggaatgccattttctttttctttctctttttttcttggtggttggggattggcaatgatattaacagaattcaaatggtgtcatgtataagtaaaacttccttcctcatatccactgtagtgctccttttagttgagcagaccagcttttatttagttctcaatatctgtagatttggggaaataaatgacctgaaggaagaactaggatgatacaaaatattaatgaagggaaaaatacttgacttatctattctgctgcttgaggagcataaagtatagaaattacccacataagaaaagctttgggatctttcaaaactacccagaattgaactttgttatttctgtgtatgagttgcagctgctgaaatgttttgagatgacctcactaaataaactttatcttgggatttagaaaataagggatgtcacacatataaaccatgtgccttttacctttataggaatcatttgttgctgaaaaattaatttacttgataggaatcctggagtttcctgttattcttttagtaactgattaattactatactttttaaagcagtatgttttcattcatattatataaaatatatagaataaaaacagtggtttgtgtgtgtgttatatttaacaatatatctattcagtcaatgcctgtttgtgtagaatccagtcacaagtctatatctgagtatttatagaaagtttggccaggtgtggtggctcatacctataatcctggcactttgggaagcggaggtaggaggatcacttgagtttcagagtttgagaccagcctgggcaacacagtgagaacttgtctctacaaaaaaaaaaaaaaaaaaaaaaaaaaaaaagagagagagagagaagaagaagaaaaattactgggcatggtggcatgtacgtgtagtcccagctactgtggaggctgaggtgggtggattacttaagcctgggagatggaggctgcaatgagctgtgatcacaccaatgcaccccagcctgggcaacacagtgagacccgatttcattaaaaaaaaaatgaaaaagcaagtttatatttgatgatgatcatgagatacccctagagccatgtccacactctggctgcctgtgtttttaatataccaatatatggtttatttggcttgtagtgtgtatgggaagtcaggacaatttcatgcagaaagccttatttttggttactcttgaaaattttgaagaagtagcactgcttatctggaattcctgcatgccagtacttgactacaggagagtatctcagtatctgctgccctctggggagtggccattctcttatcgttttccatagtccctaatctctgttgtttacatctggccagttttttcccattttgtttcctccagggggtatttctcttgctctggagtcatgtaagaatgatcatgttaaggaaactttgttttccatattttatttattatttgaaaattgtggtttatgtatgatagctcttaattggccagaatataatcaaatccaataagttagtgctagataaataaactttatacctaatgactaatcctaatttgcatgatctttatggtctaccttaaatttttaaaaaactctgtcaagttaatattggtcaccaaccaccaaatatcattaattttataggagattattttttggtggaaatcttgaatgaaaattcactagctacctgaagtttccactgagtcaaaattttagagcttttctttcttgcagcagtatttctttttaaattttctttcttctatgcagagtaacagtataataccaatgtaagtgatattttatcacaggtgttagtagtttgcttgtttttgtctttaatcttgtttttgaggtaggtggtgtggaagaggattaaaatacacgttcatataagtacataaaacttaaaggtagagtttaacaaataattttaaagcaaaaaaaaaattttaaaccagctttaaaaaaatcacatgccctttctgtcataatttcctctctccccagaaataatactatctgccttttaaaagtcattttcctgcttctctttatagtgttgctaaacatgtgtacatctattgactaatacggtcaagttttgccggttttggatatttggataaatggaatcatactttatatattcttcttaatcttttactcagtaccatttgtgagggtcatctaaattgtgttatggtagttttttattctgtttctgtataggaaaattttcagtgtatgaaaatttcattattgatcaattctgttaatgaacagttgggttgtttccaatttttggttattaaaacaatacaactatgaacatttttgttcatgtaccctggtgcacgttttcattgttttcaaccagaggtatacctaggagtggaatggctgggtcatagggcatgactgtttccaagcttaccagctactgccaaattgcttcccaaagtggttgtaccagtttacatttctaccagcaagagaatgagaattttggaagccccacattgttaccaatgcaaaaatataatatctgtaagaagcaaaaatgtttctcgggcatattttcttttaaatgcaataagcagtacacacaaacatatattgcactacaagaaatggttgatgtattttgcttaggattaatattatagaaaagacaacagtctgtttagctttggaggtagttaagtagttgctgttttcagctgttctacacctctgctccctcccagccttcataattgagaaggtagcaatatctttcaaataatgggaaaacgtacttgttttctttgtatgagaacttgttgctactccctttaaagaagatggatttcaacagtatgacctgaaattgaacagtttaccaagagagaagaacccttagctagataatagaggattcagtaatcattaatttaggaatattttgcaagaggtatttaaattttagtgtaaatttgatttttatctatgacaattttattagcctttgtgccatttctttgggataggattgtgctatttctgttctgtataatttctagtaaaagatggtatacctttttccctggcagagacattaagccctgtaacaaatacactaaaagcgaatatggaatgcctaatgcagtgtgacatatgtaatagaggatcttatttgaattgaatagagcacagtgaagctgagagatttttattatatgtaacagcctgtttctaggaagaatttcttagaaattctagttcttctattattttgatacagacttattttctttggcctgcttttattagtagacatccccaaatttaggaggaagtgcctttttagaatatctgataccaaaggattaccagtttggcagaactatttagagttgcaaaggatgcataccatagggatatacccctgaaagttgtttttcattggtgtttcctttaaggaagctttttatgtagaaagaacagcactttaggctttggcacaatgctttttctctttctctcaaacatttgtgttttatggggcaatataatagttttctgacaaaccaatggatactaattttatgtgtaataatttaaattgttctttcagtattctttagtatatgtcagtacctctttacagttctgtaagaaacatagcttacagtctttacaactctgcagatgtatttttcctttattattcctaattatttcatatatttctgttgatactagtgtacaggtttatattttttatgtatttagttcagttgtgttacttcattttctcattggttgctatttctacctgtttttgccatcatatgaaatgcactggatatatctttaagttcctaatttttgaggtgagattttctttagggtatgtactctaaagtgaaataattttggggtgatggttttgaagcacttggtgacacattgctctgtaatcctgggaagatagtaaagtaacccattcacagtattttatctgtgtcctgtttccttagatccctgccaataatggggcaaagattttattttaacttacttttgttagtttaattgataaacatacaatgtattttaatattttttatcaatagtattttaaaaatttactatgatttaattgtcatgggcaaatttggtatttaatttttatcagaataaatcataaaactggtctaagatagattttatatagttaacttctttgctctctttttattttcactttatttcactgtacagaatttttcccgtgttaaaaatgtgtattcatattgaggtttttactttagcaaaatatcaaaataattaattctaaaacatgggaaataatataaattcataagctttgttgtaagaaattttcttataagagctcttcatttctgattattaattttctaaagtagatgtttaaatagcaatccaacttttctcctttgaaaaatttccttggtgagatttatatatgctgttacatttcatggtaaactttatgcctttataaatgtaatagtcactcaaaattggaaacaaaattttcccaagaaaatcataatcaaagttatttaaaaaacaaggatgaaactagatacaattattttaagtgttaatctttggtcatatggtagcatcatttatgtgtcttttaactcgtaagcttttggttctagttagttctgtgtgagtccatttgatttcagtattgggatcaggtagctgatcctgaagatgtttatatctgtttagagagttataagtgatttgaaggttagagtaccagggactagattttcttcagaccttttgactgagtgaattccaggccattttcctttttccctgagcagagtttttaactttatgataaaattcagaagacctatgaactgaaaatagagaatatgtctaatgatgaattttagcatttctttgcattatgaatatagacaacaattgccattagttattatttttaacgcaccactgaagaacatatattactatgtcaggaatttgtttttgtttttttctttttcttttctttttttttttattgatcattcttgggtgtttctcgcagagggggatttggcagggtcacaggacaatagtggagggaaggtcagcagataaacaagtgaacaaaggtctctggttttcctaggcagaggaccctgcggccttccgcagtgtttgtgtccctgggtacttgagattagggagtggtgatgactcttaacgggcatgctgccttcaagcatctgtttaacaaagcacatcttgcaccacccttaatccattcaaccctgagtggacacagcacatgtttcagagagcacagggttgggggtaaggtcacagatcaacaggatcccaaggcagaagaatttttcttagtacagaacaaaataaaaagtctcccatgtctacctctttctacacagacatggcaaccatccgatttctcaatcttttccccacctttcccccctttctattccacaaaaccgccattgtcatcgtggcccgttctcaatgagctgttgagtacacctcccagacggggtggtggccgggcagaggggctcctcacttcccagtaggggcggccgggcagaggcgcccctcacctcgcagacggggcggctggccgggcggggggctgacccccccacctccctcccggatggggcggctggccgggcagaggggctcctctcttcccagtaggggcagccgggcagaggtgcccctcacctcccggatggggcggctggccgggcgggggctgaccccccaacatccttcccggacggggcggctggctgggcagaggggctcctcacttcccagtaggggcggccgggcagaggcgcccctcacctcccggacggggcgggtggccgggcggggggctgaccccccaacctccctcccggacagggcggctggccgggcggggggctgacccccccacctccttcccggacggggcggctggccgggcagagggactcctcacttcccagtaggggcggccgggcagaggcgcccctcacctcccggacggggcggctggccggggggtgggctaacccccccacctcccttccagacggggcggctgtccgggcggggggctgacccccacctccctcccagacggggtggctgctgggcggagacgctcctcacttcccagacggagtggctgccgggcggaggggctcctcacttctcagacggggcggttgccaggcagagggtctcctcacttctcagacggggcggccgggcagagacgctcctcacatcccagacggggtggcagggcagaggtgctccccacatctcagacgatgggcggcctggcagagacgctcctcacttcctagatgggatggcggccgggcagagacgctcctcactttccagactgggcagccaggcagagaggctcctcacatcccagacgatgggcggccaggcagagacgctcctcacttcccagacggggtggcggccgggcagaggctgcaatctcggcactttgcggggccaaggcaggcagctgggaggtggaggttgtagcgagccgagatcacgccactgcactccagcctgggcaccattgagcactgagtgaacgagactccgtctgccatcccggcacctcgggaggccgaggctggcggatcactcgcggttaggagctggagaccagcccggccaacacagcgaaaccccgtctccaccaaaaaaatacgagaaccagtcaggcgtggcggcgcgcgcctgcaatcgcaggcactcggcaggctgaggcaggagaatcaggcagggaggttgcagtgagccgagatggcagcagtacagtccagctttggctcggcatcagggggagaccgtggaaagagagggagagggagaccgtggggagagggagagggagagggagaggagggagagggagaggagggagctaggaatttgttttaatatttttatacctgtatttcaatatagatcatttgttgtcataatcctatgtattttatgtatttaataacacgattctgagaagtctgtattttatgctagattggcaaagggtttgtgttcctctcaaatttaagaactattccttaaggagaatgacttctttcattttagcagaggacagaactgcccataattcatgaaagtttgcaaaaccatcagtgttaagtctgcattagtgtatgagagggaagagctggctaggattgattggtagacacttccactaggggtctgagtaaagtggtttcatatccgtaatgggctgatgagcaatttattgcctgcaaaaaacggagaaaatgaaatttttggttacgtaaaaacatgctgattatttttcagttgtataaatttgtgattattgtattatattagaaaatataaatgagaaaataaatacctgtaatgctttctgttaagattttggtatatctctttacagatctttaaaaatattacatatacatgtttttagatgtatgtgtgtgtattatatgcatacgtaaacaaataatgtatatagaaatattcctacacatgtgtatgtatatgtatatttagatgtcctttttaaaaatttttttgtatttaaagagatagggttttcctctgtcactcaggttgtagtacagtggtgtgatcatagctcactgtaagccttgaactcctgggcccaagcagtccttttgcctcagcttcccaagtaactatttctacaggtggatgccaccatgcctagctaatgaaaaaaaaatttttttttataaaatacagttgaagtcttgctatgttgcacaggctggtctgaaacttctgttcttaagcagtcttcctgtgttggcctcccaaagtgctgggattacaggcataagccacagcatctggccagatatatgtttttaaagacaaaaatgagattatgtcgtataagtaacttgccatttttggagtttagatttattgagatgtaatttagtaaaattcaccctttttagtgtatacgtccataagtcttgacaagcagagacattcaattctcactataagcatgatacagaacagttctgtcaccctcaaaaatctccttgttcctcttctgtagtcatctccttcctctttcaaccatttatttcttttctgttccttttacaaaatggtatcatacagtttgtagtttgaagtattgtttctttcctgtagcatgtgttttcctttatgatttttggttttgagatcatgcttcaagaatcttttatcaaattgatgagaatattcatgtatatatttttaaagaattctgtttttttcaattttaaaaattttaagtgtttgttcagtctcgtgcttattttagtgtaagttgtgaggtaggaaatccaattaaaaatcagatagttcagctgtatttattaagattgatttactaatataatgttcttactaaatattgatttcctcacaggtaacacaagtggcaagacagccgggaacccctaccccatccccttattcagcacatgaaataaacaaggggcatccaaatcttgcggcaacgcccccgggacatgcatcgtcccctggactctctcaagtaagataaaccttttttaaaaaaataagaaatgtccctgtaaaggcatcatttttgtttttctaaagagactcctaagcagtaacataaaacattacttgtatagtaatttcaagtttgtctttggcatcttttcagacttaaccgttcataaagatggctactaacaaatttcacacatttcattttgaagtcattaaaaattaactgttggtgatatttagttttcattttcattgtttaagaagttagagttttattctaaagtttactggaaaacccccccacaaagcactgatttgcttttcgatgcttaatctgctaccgtctcgcacccctttcgggtgaagcattaatggttattttctacttatgtgaaaacttggtgtcttcccctcttgagtagcatcagtgggattttttgtttgttggtttggttgttttgtaagtcgattattgtaatttgataggcttaagtttttgttgaactgttagaagaattgtgaactccttagtgtatttctacttaatagtaacaacagacgttcagacactgtttaaggaggatgttcctatgtgttccttgcacttaagctgtttgccaagatatattgtttagcttgcaccgacctactgttgcaagcttgtttggatttccttgtggttaaaagttggctagagttataaagtcccttacagaatgtggactgagtcaagccaataacgttgatctaactgtgtgagattatcagtatttacatgtaacagctactcttttgataatgaaaatcatttttataacattatttgtgattttagcctccatattttaggccttttagagattgaataataggagagatcaggaattactaaaaataatgctaaaggtggtgattataagttaagggctgattttattttttattcttcattattttttagggacaatttttattccttattatttttttaaagacagggtcttgctccgtggccaaggctggggtacagtggcatgatcatagctcactgtaacctctaactcctgggctcaagtgatcttcttgcctcagcttcccagttagctgagaccacaggctcatgccaccatgcccggctaatttttttcttttggttaaattttttgtagagatggggtcttgctatgttgctcagattggccttgatctcctggccatgtgctgattaattatattttagactatagaatgtttggaaaaggaatgtacagtttgccaaaccatgactgaaatagccctattaatgaatataagtttgtcaagaacttagtgctatacctaaacttagtctaaatcattcctatataatttggagttttaaacattgaaaacaaaacaaaatgagctcctgattgtttaaatgaggttcctgtgttgggtttcttagactgaacacaacctctcaacttactattaaggtgtattaatctgagtctaatcaggagagaaaaactatgcactctcaagaatataagatataaagagcaaacgcttaccttagggctgagtagaggctcagatagggagcctttctctgtagggttgagccaaaggctgtggtagaagagccactgtggtgctgttcagaacttgctgaaactctttgttctggaacttgctggaaatgtgccctatgaagtattggggaaagctttcttctccagcaccaatctcttatagccaagagctgatgcagggcacaatggctaaaaggctccttactgcatatctgtttcccacagacaattcaaaacattagatccactggatcagaagtcccaagtggtagagcagcttgcactgcccatcccaaatttgctgtataaccttcgtatattgtgttccctactcaaaattggaaacttcctaggtgactctgtagtcggttaaggtggcacattcagatgtagtatatatgttgcctctacatccaaaaaaggcctaccaaacctacgtcttattttttgtggtagttttaggtgagagactgctacccctaccctgggctaagatcttgaccttgttggagagggcacggtgtggctttctgaatgggagtggtgccatttcagtggaagttactgaaaatccaccctcagaacttgtgagaattctgccctctagggtgccgagggaaagctgttcgcagggaggtttcttagaaaagccactgtgctgcgtgtcttcctgagggaataccaggggtagctcttggctgctgggtactgttgcttgctgtgcactgaagcagaaatcttgctctgatgaagctatgtccatgaggggagctagtcactagagaagccatcttttggagaagctatctgggctgcaggagcaaccaggaaccaggaaccaggaaccagggagcaaaaccctttccttctacatatctctagagccttctactgacaaaacttaatgttgtgtcagctgaaatgttaaaatatttatagagctcagatccattttcttattacaggcaaacagtgaattttgatatgaaagacaagcagttgataactggcatgtaagggaaatagcttagttttccatttgaaattcttactgtttcaagttgtgatttgacccaagcagttggcccaaaggacttaagttttctgaaagataggctgctcgcaaatgcatagtttgcatttaagaaaagatggtctcctagcatctcacttgttaaatcctcaagtgctgttctatatgccattttaccaggtgcctttagaaaccagagtacatgaataccagggagaatggccaccaaatattgtgttgcattcttttgtggtctgttttgccaccattttgcctaatctaatgaatgaacccagtaaatcacacctggttcaatgcccttttttcccctccatcctttcagacagagggaagcctctatggattcatctgtctcctagcaatatgttaacacttgttgatatggtgaggaagtttttctaaactagcatacctggaaaaatgaagagttccatgggaaactcaagttttttttaggtttcacagttgaaacagtttgtaggggcagatgcaaagcttcccttctgcccactctgagggtttgctgaaatgctgatgatagattaataggagaaaaaggcatacagatttatcaatgtgcgtggacacatgagagtcctacacatatgaaacacgaagaagggagagaaggttgagggcttgagtaccctcttcatagggaagagggaagcagggtggggaatgggctatcgggagttttagaggggaagtaaatggtttttaggtgaaatgaatgagtccaaattacaatagtcttagacaaagttcctctgagctcctgggaggtggcgggaaggtgaggaatgagacttcagtgtgaacaaaggttgtcttattatgaaggttaaatctcctaagagttacccccaaaagtaaaatgaaaagtctgtcttgatgtggtgatggctttagtctcttctgttttccatgattaatcttttgtgattatttgatgagcttccatgggagggtggtcttaagacaattgtgtttcttttggaaagacattttcttagtcatatctctgtgccccaccaagttcatggatggtaatggaaagaagagcgttcaaaatagaggggaagggattataggcttgaagtcaaaccataggttctagggctggctttgttactttctggttatatgatattggataaattatttaatatctctggaacttcgtttcttcatctgtcatatagggggaaattagaattctactgccctgtaagagcgttgttatgatggttgtgtaaattcctgcctcagaacaggatttcctaaatttagtaagtgcatttattatttgtattcctgccagacttggttctcctcaagatttatatatatgtatgtgtgtgtgtgcatgtatccttgcctgctaattcttttatttggctacctgtcgagatttagtgtgaaacttagaagctatctccaagagtttgaaatgtcttccatgtcttttctgatgttcggataaaagtaggatattaggcttggttattttctgttggcggtaatttgttttattcttctatacaaaacagattcagtcaactgaggataagatcaaagaaactattttttagctacatgtcctttttgatgtgacagtctccccttcttctgtgaattaaatctttttgtccaaagtaactacctatgtctgtgactcaatgtttgaccctcaatctactaaggtctaagtgaaagaagctaagctgaagaaaagtgaacttcataactttgaaacgtgaaagagggaaaatgaagaatattgtttccaatgtcctctgcaatctcattacctgcttctttgttaagacaggattttacacatccacaggtgcttcaccacacctgtgtatgtgccaagttttaaggcgtaatgtgcatttcccttttttacatgagctgtagttctttctagcttcgtcctctctggagattttgtttaattagtcaaagactttagactatgacatttcagacaatggtaaattggtgagacagagtctttataggcatagattcttttcagtttccctgaaatggcaacacttttgaacaatcttgaaacccagcatgtctgttctctgggaagagtaaatagtttggaatttaaaagtaccttttggtggcagattgcaaagtaaatctccctggggaagtgcactctagggagtcaggagaagagactctctaatttagagttccaaccctcctaccactgttttataatttaacctatggaagttcctattaatgcccagttttcttctttgtgaatgagcagcttttgttagatgagatcagaattttctttaagacttccgtgggttttggacactaacttgaaagtagccagttgttgttatggaaaattataaaactattttagatttaaaattacccaaactttgccttgtttcattctgtttttttttttaagagaagtttgaattatttaaaattacttctcaagataagtaaaaacaaaagagactcctacttattgcttaattggtgatgcacatttgctttaacttagttaattttcacgaagtagcaattacaaaacagaccaaactggcgctgattaactaggatcaaaatctaggtcttttttctcttggcatcattgtctagacttccaggcttttggagctatattcacagtaattaagtgagaagacatgctcaaaatgatgccaaagaagtgaggtaataggtgttatctgcctgctgtttctggatttcatttggctctctgtttttttctgggagaggaactccttctatagcatataatatatagtagctgagatggtgatggtatatgatccactggttagatactttattgtctctggaaatactaagcagagttcttcactgaggagtattgcttgatcgtgatgcttattgttacaccacaattttcatcattagtaaaggatgagtttcaaatgatgaatggtcccaacacccatttttgctttatccagcttccgggaatcttgttttatttactaaggagaatttctctgtgttgtctcataattgttcattgactgactgctccagcctttgtaagctgtttttttatttattttttatttttagagacaggacctcactctgtcacccaggctggagtgcagcagtgtgatcatagctcactgcagccttgaccccctggactcaagcagttcttcaggtagctgggactgtatgcgagctccatgatggctgactaattttttaattttttgcagagatgggacttgctttgttgccaaggcaggttttgtttctaaatcctggcctcatacagtcctccagcctcagcctcacaaagtagtgggattataggcttgagccatggtgcccttctgagaccctgtctctacaaaagatgtaaaaaatactagctaggtgtgatggcacacacttgtagtcccagctacttgggaggctgaggtgagaggatcgcttgagactgggatgttaaggctgcagtgagctgggatcacaccattacactccagcctgggtggcagagtgagaccctgtctcaaaggaaaaaaaaaaacaaaaaaaaaaacgaatgaagtttaatagtgatttttccttactacatatgcttttttttctttttgttaccttttgtgaagaatataaattctgagtttgatgcacacttgttaaccatgataaagtagaggaagctgtgaaaatttgctttaagaaaacatcacatttcattgttgaaatagatgagtatggaatttaatttaaaaaaagcaaaatgtatagtttttacactccccatggcccccactttgaaacacatcatgtccatctaaggcagtatttgagcttaccaggattctttagcatatcacaaatataaatatgaatattttataggcctttgtaacttttaatgacatttgcaaagtcatgttatttgtaaagtgtttaatgacaatatttgttgacacttttaaaaaaaagtagatttttaagaacttacacatattatcaacttaaaaaaaccaaatggaggatttgtcaccaaggggaccaactcagtgcagtcagtactgcaggtgtccaaacccacaccaagtccccatgtaccatgaatgcagcttccaaagaatcatggtaggcttttctaattgttgagatttattttaatgtgatacttgattggaagagtgttcagctcttttggtcattttttgtttttatttaaaaaattagttgcaaccatatttataaagcaaccttgaccaaatgtttttctaataggtgtttcatctctctctctctctctttctttccatccttcctttttttttttttgcgccaaggtttcactctgtcacccaaactggagtgcagtgtgttttctgctcactgcagtctccacctcccaggctcaagctatcctcctgccttagcctcctgagagtagctgggactaactgactttttgtatttctttgtagaaactgggtttcctcatgttgctcaggctggtctcgaactcctgagttcaagcaacccacctgccttggcctcacagagtgctaggattacaggtgtgagccaccgtgcctggcctaggtgtttaatcttttatgcagtcctgtaacttaccttgaaatgtgcctaaagcagcttttatatgtttgattatacttctctttgtattgcctgtagccgaaaagaattccatttattttcttttgacatttctgtggttagtttttaaatgttgctgcaagagtgatggttaagtacaattatttttcagacttctcaccctaagttttacattctgtttggcaaattcacatggctggaacccacattttatctaagtattaattcagcactattacagcaagctaaagaattttgtaagaaccaaactgattgtgattttgtaagcatttctttacttctgttttatgtaggctcagtcttttgttgatgatgttcattttcacttaaatcctgtcaaaggcaaaaggtttaggattttgtcttttacatttgaacagctgtttcttttggatgcatcctgggagactcttgtttatttctctggctacctctcatctgttttaagaagtcatgaaaaactctgtcagcgtttttcttgccagtttacctcttgggaatatcacacttcatttatttcccacagatttgggggaaaaactcactttagtgccactaatttattttttatctggttgtgacattcagatttttagatttttatggttctgaaaattgctaattcagttcagctgcagagattagcatgtgtcagtaaattttaggatgagaaacagaacaggtaagttttaagaataatgaagaaattgtgcagtttgactcttcaatttaaagtgcttgtgatagttcctgcaaaaatgtatatgtgattcagagcgtgttgtgggggaagtgagcagacagaactctgagggaaagctcagcagagaggttaagtaccatagtagacatgtataatattgtcttgagtttagtcaggcaaatgggtatatatgtcttttcagatttattgtagtggacgggagcatgctgattgctgggagagaaatgagaagacaagcttgattcaggactgtttttataagggatcaaatgaaaaaatttacttaaaagtcacaaactataaaatgtagtgtacaaaggctagctatctttatagaactaagaactgtgaatttcagtgactcagcaatcaataaaaagtcaataacacacacatcttgtagatgatggtcattttaaattttctcaatgaatagtaaagagagattaacttagttatatttaaagcaaatagaatcaattaagtataaagaatgaatattataaattgatatatagaacgactattagaaaataaaaatgttgggctgggtgaggtggctcttgcttataatcccagcactttgggaggctgaggtgggcagttcacttgcgctcaggagtttcagaccagtctgggcaatgtggggaaaccccatctctacaaaaattagccgggtatggcggcgtgggcctctcgtctcacctgattgggaggctaaagtgggagcatcccctgagtccagaaggtcaaggctgcagtgagccatgcttgtgccactgcactccagctttggcggcagagtgagaccctgtctccaaaaaaaaaaaaaagaaaagaaaagaaatttgttataatttactcactaaaccaacaaactttttttctcagtgcatacatttatttacgtttttttccctctaatgtctagtcatgcttataatgtaacacgaagggctaagtctgatttccaagcttttcatcagttgatggacccttttctctgtgaagaatgatgaactctcaagctatctaaattctgtctcccttgtgtgtgtgttctctgtaaagtagtttgtttcatagaaaacccctaagtaggtgacatattgcagaaaccatgttgccaacattttgttatacttttcatgtaaaacatatttccatttctcttcactgccagtgtttctccagtttcaagtactacactatattattcaaaattctgtttattactccacatcttactactcttaatcaccatgaaaattgcccatcttcttttatagttcagtttcaaattttcacatgcctgtttagtgcagttgtcatagtcttagtaagaaataaattacactaaactatttcaaatggagaggatttttaatacatgaatttgttatactggctgaatgattaataagggggatgctgaggctgggcattgtggttcacacctgtaatcctagcactttgggagcctgaggtggaaggatagcttgagcccaagagttcgagatgagcctgggcaacatagtgagacttggtctctacaaaaaataaaaataaaaaggaggatgcggaggtaatctagagattaataactgcagaaagcagctgacatccctgagagaaagtcaggaaaggggaaatacaaagtaaatgtgataagacatctggactgtgaaacatattcataactgttaaaattaaaatgtagtcgaattaaatttaaaggagtttaattgagcagtgaatgactggtgcaggcatcccccagaatcacggcaaattcatagagactctaggggtaccttctgatcagaacaaatttatagaccaaaaaaagggaaagtgttaaaaaaaaaaatcagaagtgaggtacagaaacacctgaattggttacagggtgacgtttgccttgtttgaacactcagcagtctatgattggttgaagtatggctgctgggattggccaagactcagctgtttttacagctgcatactctttaggttttcagtcttgtctgccttttaagctgagttagggttcatccacagggactcagatttaaaagtacggagtccttctcagaccatatttagttcgctttaacagaactgtaataacaacacagttaaattatctcaattcattggtcaaatctcaactcaaattggtcaaaaaccaaaatctaggaatatgcatttaaacttgacacagaaagattaaaaacattcctctagactgccttcccaccccttcagataccagccatacgtcccggcctctggaacttttgactgactggcttcaatttggggatctcatgatcccctctttgggtttgataaatttgctggagcagcttacagatctcaggaaaacatgtttacttgtttattataaaggatatcacaaaggatacagttgaagagatgcctatggtaaggtatgggggaaggggcacagagcttctctgcccttccttggtgcaccaccctccagcaacttccatgtgtttggttacgtagaagctcacttaaccgtgtcctaggttttttggagacttcattatgtgcatgattggttaaactgttggccactggtgatcaacttgacctttagcccctctccttcccctgaggttgggggtccgactgaaagtcccaaccctctaatcatgcccttgtgatgatcaactctagctgtcagtcaacattagcatacaaaaagacagacgttggcgattctaaggtttttagaagttgtgtgacaggaatcaggatgaagaccaaatatgtatttcataatatcactgtggtggtgtcagaaactttacatgctgaggtgtgagcagagagagtgtatctataaaatgtttgcatgtcactaacgattattgatttagaacatcttttaaagtgcttattggccatttgtctatttttggagaaatgtctattcaaagccctttgcccattttttaattgggttgcttctttcgttgttgttgagttgtaggagttctttatatgttctggatatcaattccttatcagttatgtgatttatatatattttatcctatcctgtcaggtgccttttcactttgttgatagtgttctttacagaaagtttttaatttttggatttttttgagacaggtctcattctgtacaccagtctggagttcagggtgttggaaataactcactgtagcttccgtctctgggatacaagggatccccccagcttatcctcccaagtagctgggacgacaggcatgtgccaccatgcctcgctcacaagtttttaattttgataaagtctaatttatcttttgttgtctgtgcttttggtgtcatatctaagaaaacattgccaaatttgatgttctgaaagtttccccctatgttcctttgttggaattgtatacttttagctcttacatttagatctatgattcattttaaaaattttgtttttctgtgttctctcacagaatggaactatgattcatttgatttaatttttatgtatggtttaagataaaggcctggcttcgtttttttggcatgtggctatccagtttttctagcaccattggttgaaaagactgtcctttacccgttgaatagtcttggcacctttgtcaaaaatcatttgaccacgtatgtgaaggtttatttccgggctcttttcttttcattgctctgtatgtctgtctgtatgccagtaccatactgacttgattcttgtagctttgtagtaagttttgaaatccaggtttgagacgtttaggtttgtcctcctttttcgagattgttttggctattgggggacccttgagattccatatgaattttagaatgggcttttctattttcccaaaatttgtttttgggatttttataggattctgtgtatttaaaaaaaaatatgtttcataatggacacaacattctttttctaagtaggtgaagaaagcatcattgcttgagagtggaattaagatgtagtattcaccttaataaagaacttatacataacttttatagacactcccaagaactgggaatgttctagttaatgattcccttcgtaggtacttaaaaatctaatttgaagtcctagttctaagagaaacagagagagagaagaaagaaagaaattagtggagtaggaggtggtctgaattaggggtatatcaggacctagagtgaagattatgtctagtggtctcgtgtgacaaatgaatgagaactctggctagggatgttttagctgagatgtagaagaagaaactgacaggaaaccagagactatgtaaaggtgggagaaatgaggggaagaaattagtagagataatcgtggtggctatcagtagtaggtccagagagggtcctaaatagcagccattgaagtaggaagtggagagccagcattgcagacattgtagaatacttttgttgggaattcagtgaaccaacagcatctctttatcagtacactggtgcttttagcccacagtcttgggggaactggtcctgggattggagagaaaactgagttgtcatgctgtataagtaaaagctaagctttgaatagtatagttgcttttgagagaacacaagtagcctgtgatcaagctatcctattatgtgagtctattattgtcttctgaggggcagaaagccatagcatttcaatgttgaactaattataaagagtacaaaaatggtgatgatttcagtagtgtttccctgctccatatagtatcactgctcagaagtgagaaagagtttgatcagtggttttcatttctgccttcccacttagaatcacctgatgcctgggtccccttctccagagattctcatttaattgcttgggatgagcctaggtaatgctaatgtgcacccagcattgagacaaagctgtggaacagtgccttttccctcctctaatcccacagccgattaggaacagtgccttttgatacatattgcccaaatgatactttataggctttgtttgctgaggatggttttcactgaaaggagcaagatgcccccattttcagatcttatacaagcaaagtgaattgggctagtcttaatttagggaaagtagctctggtgattgagaagacatttctgttcagtagctaaaacagactgttacagcttttttacagataatatgctttgcatcgtggtctgtactcagaaggtttttacggtattgattttatatgccaatttattttggtgatagaaccaaattataccctgccaggtactatgtaattgactcttctgattcacccagaataagagtgggtgttttttgcttccatacaatcagatacgcctagatttaaagttatactatagtgttttcaaactgttaaaagcagccaaactgcttccccccatatgacgagcagtgcctgatccatagtaagcccctaaatagttgaatgaaaactagctgtaaatgaaattttccagaagtgtcactttttggctgtttgcagtgtggatgctttatttggcgcaatagcttttttttttttttttcctttttctgactggtactgttaattttgtacagttcagtaaaagtttaccagtacaagcttaacttaaaaagagccaaatactctaagccacccttagagaccttattctgtgagggtctgggaatcttaatattccagctgttctgtcattgtgaatcaaataattaagacttaattgctaagctggaaaagtcttttttaggatgccatgacagagatttaggtcttttaaaccagttcagtactatactgaatagagaatttcttactttttctgagtaggtgatctcattgtttagtatgaatatttctagaatgtaactcataaataagcttttattttattatttttttagaggtggagtctcactctgtctctaggttggagtgcagtggcacgatcttggctcattgcaacctctacctcctgggctcaaaccatcctcccacctcagcctctcaagtagctaagactataggtgcatgccaccacacctggctaatttttgtatttttttgtagagacggggttttgccatgttgcccaggctggccttgacctcctgagctcaagcaatccacctgcctcagcctcccaaagtgttgggattacaggtgtgagccactgcgcccagcccacaaataagcatttatatagagacatggtatggtggctaggtataaagaaataccatctctgtgtaactgattttaaatattaaggtgtttaaagaaaggtaatgagagatgatgattcatgctcttttttttgtactaacattacgggatctttggggtgtcacttttctggccagaaacctctgtggcctgtggcacctttgcctgagttcttgtcctgcgtccaggaagattgaggtatgcagacaagtgtagagtgtacaagatgaagaggagctttactgagtgtcagagcagctcagaggagacctgcagtgggcagttcctctctgtaggcaggtcatcttgttgagtgttcgactctcggcagagaggaggccctagagtgggtggctcctctcgtcagccaggttgtcccattgtctctgcagctctcagcagagaggaggcctgcagtgggtggctcctctctgcctttggtcgtcctgatgtctgttgctctcagccagagaggaggccctggagcaggtggcttctctctgtaggcaggtcattccagtgtttgcagctctcagcagagaggaggccctagagagggtagctcctctctacagctggtcatcctgatgtctctccttcctctgccctgctctggttgagcctgaggcttttatgggccttacaggggaggtggtgcatgccagttggtccgtgggcagcccagaaaaggcaccacaagtccccactctggtccatgggatgggtagcccacccctagccttcagaacctccctggcaaaaggtggggcctcactgaggactcgccccttctggcacaggagcccatttgcctcccaccactgcctatggcccccaggttacttgtgccaagggatgcccacaggctatcgctgaactgcccccctgccctatcttggccactctcctgtggtctttggcacccaaagtttggaggggccaagctggaagggacccagcgggtcagtgctgccctgagcctatgcatacctggctgggctgcaacagtgcccgggcttggccccaaccccaattggagaccagagcagatgctgggagtggggagaggccaggcagcaggagcagacacccctgagcctgtggtgacaggggctctcccaggcccctgagagcattgagaggcctgggcccacagccatgacctgagtggctggagctgtgcctggggagctcctgccctgccaactcaggaggggtgggactcctgcctgtccccggctgcagagtacacagccttagctgtgctccttctctgtgtcttcccatagccacggcaggtaaggtgcaggtggcatggtggccctggccagccctgcacaaatgaacctttggctcccaggacacggccagaagtgaggttgaggctgcagtggcctcaggcctgggagtgggtcctacccagctgtgccagggtgggggtggcacagttggcttccttggggacatgggcacaggggtcctactgctgctcctacagccactcctgctgccctgtcccgcctccttgccacctggggtggggctccaggccctcaccgggcctggactggcatccagggcaggggtgatgtcgttgcagggtccccctgcagccccagggctcccccttgcctggcttacgaccctgccagggtggcgcctctgggagcagattctgggcccaggcccagccaccaggagtgccaggctcagcagacaccctgacatggggcagatcctggggacacgatctccggtggtgccaatctgagcctactgccgaagtacgggaacctggtaccatcccagggccacaggccccatgtaccattcgccttggtgtctatacctgagcacctgtggcctgcggccgcaccccacctctgccagtgccatgtcagcagccactttgtatggtccatcactgcaatcactaagatagtatttcagtttacagagtattatgtgaaattggtttacttggcaaaattgtctcatactataattctgttttatagtgataaatatttttagagtttggttgatagaatggcatcacaaatacagctgttgaatgggtgatgaataatattaaagtgtacttcaatttgtgtagagtactgctcattaaatatctgtttttgaagtaacagagtaagaataattggatggtcgtaatgtagaataaaacacatactgtgacttaaatgaatgttttgagttgcttaaaacattcattaaaaaatttccaaaagttacaattaagtaagagcaatatttgtggtagataacatttaaaatacagccttttttattttcaagtactaatgtccctggtgttgaaaagagatcccattcagaaataaataatctctctactggagctcttcttgaagagtcctcaagtacagcccaacaattgaactgtgataaattcccagaaaaaaattttctttgttactttcagacagtctccctctgtcatccaggctggagtgtgttgtcataatcatagttcttgaactcctgggctcaagggatcctcccatctcagccaccctcacctcagcctcccaagtagttagtactacaggcacataccagcacacccagctaatttgtaaaatttttttttatagaggcagggtctcactgtattgcccaggctggtcttgaactcaccttagtctatcctccctccttggcctcctgaagcgctgggattacaggcataagctatcacgcgtggcctttttattcttattgatctaactagaaagattgatcatacagtattcccgatgttctcttcatcaccaccttcaaactataaactgtggaaaagaattttcagtttgctatagtataaaggctgcattacataaagtgaagtatgttttcaaaacagagacctggctgtgaatcacagttctatcacttactaattgtgagatctttcataaattgaaccttattccacgtggaagtcctgccatttgttcaatagaaataacagtgcctgcatcataggatgctaaataaatgttccttgcctgtcttttgttgcagtagctttggcgtatttaacttttttttttttaagttcagaattctagagaatgaattctttatctgctctgctgttaggtttcaatatcatgtttctggaactttttcttaactctttcatatcagtttatgatactttaatcatcattactgaaaaccagatgttactaataggtatttatatcatgaaatattatttcctaatattgttaaaagatttcattagtttgactcttaccgtatttattatgtgtgatttatttttcctgcattgttgtttaaaaaataaaaacaacaaaaacttacacatcaggtaaaactgatatatagagtagtttagaaatcccaggataaccactcagaaagtcatggtgattaccttgatgtcatctagaaacatagtgaggttactgtgtaaagttttccagaaatcattcagcagtgttagctgttaagcaaatattagagcacatgaaaaggaaaaattctgacttagtaggcatatctgttactagtttctttgagaagcagtccgtcattgtattatgatggatttgggaaagagttcaagtgctaaaatagttcataaggaaaagaattcatttctggtttatgtatgccagcttttattttgtgaggtggattatggcctcttgatcgttattctgtaccatattttcactcccttttttcactccgttttttttaaaagctatttttgttcataaactctgtagaattgtaggcagaagaaattacacatgacatctgatccattggtattgctttttgttagtaactcttcataaatagaattcaagatgaaaacatttgaagaacataacctgaaataatggtttggcctttctgaaaagtctggttttgcccagtcttattgtaaatcagtataagactttttttttttaatggctgaaacattttttcctaactaaatcaaataaaacaataatttttcatcttcaaggtagatatgaggaagaagatgaagagaggatgcactatctattaatatttggctagattaattgtatttgtttacattgaagtttgattcacatttatcccaagtcatccattagaaccatgctgaggattagatagactttgaattgtaatgtacattttttaatttattagatgagcagtgtcatgaggaatgaatagttctgccaaagataactaataattactatttttcacctttcatgcctatccttttgctggattttatgaggataaaaaattataagcaatcggcttgtctgcagggaaacatctgtgctataatttccagcgttaatggatatagtagaaaagttggaaatgatttaaaaagatgaagtccatggaggtttattttggtaaataggatttatgtgttttgatttctctttaaacctgtttttaaagctattttattgaatacgttttcttcctctccacctgaagcaacaaatagcaagattcttttagaggtccattcttaatacaactatttggatgcctggtatttgtagagtacatactgtatgttagatgtaaattgatttatttgggaaagaccaccacacaaagttattattttccttatgaactgccacttgtatatttaagtcatttgtttctctgagaagaatattctaaagtttatgtgactttgtattctaaatttcagaagaattaggagcttagtcctagaatcaagaaattctgcttctgctatttattagttatctggatatactttttattttataggggtgagattgcttgtagaatctctctctgctaacatcctgttactggactttttggcaagtcctttttgttgtcatattttttccttacacactttctttgaactcttcctccatctccttactctgtggaaatttatgtaacactactttccttagaaatccttccacttcaacattgttagtgttcttatattctttatatcttggaaggcaactcagcaacctcctggcccttcaccgctttctgtaggttgtttgcctgcaacccttgtgccgaaaatgcataaacagctctctctccctcttttttttttttttttttgccatcattcctcatttttctggacccattttctcattgtttgagaattttagtgtctggctcataatttacttttctgttttgctttctgccatccacaaagatgacttgtgacattcattgttgtgctgtccaaccattgcctgtgggctcctggatctaccctgtttgttgttgttgttgttgttgtgttttttttttgagacagtctcactctgctgcacaggctggagtgcagtggtgtgatcttggctcactgcggcccacacctcctgggttcaagtgattctcctgcctcagccacccaaatagctgggattacaggcatgtgccacgctgcctggctaatttttgtatttttagtaggggtggagtttcaccatgttggccaggctgatcttgaactcctgacctcaagtgatccacccacttcagcctcccaaattgctgggattacaggcatgagccaccacacccggctgatccttttttcttcccattctttgcctcccaatagcaactgtatatagacacatattcagcaatctatatggacacagtctagatctgcactgtccaatgtggtcgctattagagccactgtggcttttgagcacttgaaacatagtttctgcaaattgagatgttttgtaagtgtaaaacacaaaattaatttcaccagttttaagtttttctaatctggtgacctagaaaattttaaattacttacttgtgtggtttgtattgtattttttatatttttgttacgagcactggcctggacctggtctctactgatgtattagtccattttcagggtgctggtaaagatatacttgacactgggcaatttacaaaagaaagaggtttgttggacttgggctccacatggctggggaggcctcacaatcatggcagaaggcaagggagagcaagtcacatcttacatggatggcagcaggcaaaaagggagcttgtgtagggcaactcccatttctaaaaccatcagatcacgtgacacccattcactatcaagagaacagcacaggaaaagacctgcctccataattcagtcatctctcactgggttccccccataacacatgggaattatgggagcttacaagatgagatttgggtggagacacagagccaaaccatatcagctgagaactgctctgcctttgaattcttgaagtctaaaatttctccaaccagcccagtggctcatacctgtaattccagcactttgggaggttgaggcaggatgatcacttgaagcgaggagtttgaggccatcctgggcctcaaacatctggtccagcaaagcaagaccctgtctccacaaaaaatttttaaaaattagttgggcatggtgttttacacctgtagtctcagctacttgggaggctgaggtaggaggatcccctgagcccaggagttcatggctcactgcagcatgattgtgccactgtgctccagcctggcaacaaagtgagaccctgtctcaagaataaaaaataaaataataaataaataacatttttctgaccatagtctttgttcctttttcctatcccatgccagtcctgttatacctatttcacagcctacaaccttttaattctttaatccatttcttttctcaagatggcagcccctttctgccttcactttctcttatttacccttgatcctatcactaactactataactttatttttataaaaccactagttctctttgttttaaaaaaatcaaactaatggtttattttgtagtgatgaggtcttgctatgttgtgcaggcttgtctcaaactcctggcttcaagtgatccttctgccttggcctcccaaagtgttaggattacaggcgtgagccactgcacctggcccactagttcccttcccccccccgactcaatttctctttcttcccagttctcgtccctgaatctaactcagcaggtcttttcctctgttcttgctcccaggatggatggctctgctttggaaattccattacctgtgttcgtggagtctaattaaaactttatgattggggccaggcatggtggctcatgcctgtaattccagcactttgggaggctgaggcaggcggatcacgtgaggccaggagttcaagaccagcctagccaaagtggtgaaaccttgtctctactaaaaaatataaaacattagctgggtgtggttgtgtgcacctgtggtttcagctactcgggaggctgaggcatgagaatcgcttggacctagggggtggaggttgcagtgagccgggatcacgccactgtaccccagagcgagactttgtttgggccaggcgcattggctcaagccagtaattccagcactttgggaagctgaggctggagattcacttgcggcatccaggagtgagaggttacgatgagctgtgatcatgaactcccgcttgggcaacagcaagactgtatctcaaacaaaaaattaatgatttattaatacagctggtctaaactctatttaggtataatatagctacaacttagctgcttgataatctttttagtaatcactaattgactttcagtcatatcctgaactgtgcttacttcagtactaggttggtcaccaacagctcgacaggccatacactgtatatagcttgtgaagttatgtatcatgagtagctctgcttcaccttgtctaattctgctgcttactgtttgttgaaacacctgtgttttacaatttattatgacatgtttaagcttataaaagtatattgtaacgtgtttggtttgaaaggataatcataacacaaccaaccaccactcaccttaagtcgattatcaatatctttgaagccactctgtattcctcctttatctcagctgcctctttctccctagtggtaacaattatcctgagttttgtataagtagatatttgttttataatttcactggtgtctgcattttgaggtttacattttgaattagccatcatgtgtgaccttgggcaacttactttattatctctgaacctttctcttttttttcccaatttaaaaaattgtgttaaaatgcaaatagcacaaagtttaaaatcttaaccccatttttaagtgtacattttaagtatacattgataatatgcagtgatcacacgatccatctttataactcttttctttcatcttgtaaaactgaaagtctatacccattaaacaataacttccctttgacccctccctttgcaccctggcaacagccattctcctgtctgtctgtggctttggctattctttaactacatcatataactgttatcatacagtagttgtttgtgcctggcttatttcacttagcatattgtcctcaagttccatccattttgtaggatatgtcagaattccctttctttttaaggctaatgtttcactttatctatggtaccatattgtgcttatctattcatttgctgatgcatacttggttggctttcatgttttaccagttatgaataatagtgatatgaatgtggatgtacaaagaactcccttaagacctcgttttcatttatttagagtggatacttggaagtggaattgcagaactgtatggttattcctattttttgtgaaaatgccatactgttttccacaatggctgtacctattttacattcctaccaacagtgtgcaagagttccactttctccacatcttttacaacacttttccttttttttgagatggagtcttgctgtgttgcccaagttgaagtgcagtggggcgatctcggctcactgcaacctctgcctcctgagttcaagcgattctcctgcctcagcctcccaagtatctgggactacaggcccgtgccaccatgcccggctaattttttgtatttttagtagacacaggctttcactgggttagccaggatggtctcgaactcctgaccttgtgatctgcatgccttggcctaccaaagtgctgggattacaggcacgagccactgtgctgagcatggtggcacgcacctgtagtctcagctacttgggaagctgaggcaggagaatcacttgaacccgggaggtggaggttgcagggagctgagatcttgccactgcactccagcctgggcgacagagcgagactctgtctcaaaaaaaaaaaaaaaaattgtatgtgtgtatgtacacatatatatactagccatcttggtgtgaggaggtgatatataccaatatagtattgatttgtatttccttaggattagcatattttcatgggcttgttggccatttgtgtatgtctttttaatagaaatgtctattcgtgtcctttgcccatttctgaatctgattgtttgcttttttgtgattgagttttaggagttctatatattcaggatattaactttttttttttttttttttgagacagtgtctccctctgtcacgcaggctggagtgcagtggtgcgatctcagctcactgcaacctccgcctcctgggtttaaatgattatcgtgcctcagccacctgagtatctgggattgccattcctggctcatttttgtatttttagtagagacagggttttgccatgatggtcaggttggtctcgaactcctggcctcaagtgatttccccaccttggcctcccaaagtgctgggattacaaacaggccatggtgcccagcccaggatattaactttttaacaggtgtacagtttacaaatattttctcttcttctgtaggttgcctcttgactctcttggtgtaatatctttcgatgcacaaaaattttaaattgttaatatgcccaagttgtctacttttttttttttttgcttctgcctttggtattgtatctaagaagtcattgccaaatccagtgtttcagagcgttttctctctgatttcttctcagatttttttacttttagctcttacattttggtcttaatctattttgacttaatttttgtatttggtgttaagtgagggtctaacttcattcttttgcatatgtatatctaatttctcccagaaccatttgttgaaaatgtcctttccccattgaatggttttggtacccttttcaaaaatcgtttgaacatatatttgtgggtttatttctgggccattttttcccatttctaattacttttggtttatttttacaccagtactgcacttttcatttttgcagatttgtaattttgaaatctggaattgtgaggcctccagcttttttcttttcagctattgttttggctatccagacttccttgagaatacatatgaatatcaggatggggagtttttctgtttttgtagaacacaccattgggattttgatagagattgcattgaatctgtaagtcactttgggttgtattggtatattaacaatattaaatcttccagttcatgaacaggggataattttttgttattgggtttttaggttatctcatccactctcatggcaaggactgttggttatgtttgctgattcttagttcattctgggttgactctgctctcttcatgcctaattactctgtagacttttgtacctagagatctctttgacattaaaactctccataatataaatgaattcatcacttttttattcaaagcagagaaaacaactattgcagaagccttgagagaaaaaaaagttgatatatttgagagaataaaataaggccagtatggctggacagtaatggtatgtgaagtgaagtcaatgatagcctgggacccaatcattttgggttctgtaagcattcttcaccatctaatcctcaaaccttggagaagcagctttcttccccttatatttaggtgctcagaaaatcctgctgtttctataatatatgaattaactcccaaatctgccttttttttttctgtcgagatccactgctgttatcaggcccttatcactatgtacctgggctgtcggaatagatccctgtttgatatcttgacaccagtatcttcactaagagttcatattgttgtaatggctctcttttttaaacaaattggatgatatttctgccctgttcaacatctcctaggattaccttcatggcgaagtccttacttgacccgtctttttagtctggccctaatctaatcctctgatgtcacctcctctcactctacctcatgcacttctattctctggcattactgacgtgtttatggttcagcagacgtgccctagtttttcaggtctttgtgcttctgtttaaaatattccttgttttgcctacacatgatctcctctgctttttatggctgactgcaagctcaccatctatcactgttgatctgccacctttggaggctccctggaactcttctcccaggaagaattaatcacattctgctctgtacttcttgatatattattcatactccttacaccactttctttttttttttttaaatttatttttttattgataattattgggtgtttctcacagagggggatttggcagggtcatgggacaatagtggagggaaggtcagcagataaacaagtgaacaaaggtctctggttttcctaggcagaggaccctgcggccttctgcagtgtttgtgtccctgattacttgagattagggattggtgatgactcttaacgagcatgctgccttcaggcatctgtttaacaaagcacatcttgcaccgcccttaatccatttaaccctgagtggacacagcacatgtttcagagagcacagggttgggggtaaggtcacagatcaacaggatcccaagggagaagaatttttcttagtgcagaacaaaatgaaaagtctcccatgtctacttctttctacacagacacggcaaccatccgatttctcaatcttttccccacctttcccccctttctattccacaaagccgccattgtcatcctggcccattctcaatgagctgttgggcacacctcccagacggggtggctggctgggcagggggctgacccccccacctccctcacggtcggggcggctggccgggcagaggggctcttcacttcccagtaggggcggccgggcagaggcgcccctcacctcccggacggggcggctggccgggcggggggctgaacccccacctccctcccggatggggcggctggccgggcggggggctgacccccccccacctccctcccggacggggtgactgccgggcggagacgctcctcacttcccagatggggtggctgctgggcggagaggctcctcacttctcagacggggcagctgccgggcggagggtctcctcacttctcagacggggtggttgccaggcagagggtctcctcacttctcagactgggcggccgggcagagacgctcctcacctcccagatggggtcgtggccgggcagaggcgctcctcacatcccagatggggcggcggggcagaggcgctccccacatctcagacgatgggcggccgggcagagacgctcctcacttcgtagatgtgatggcggccgggaagaggcgctcctcacttcctagatgggatggcggccgggcggagacgctcctcactttccagactgggcagccaggcagaggggctcctcacatcccagacgatgggcggccaggcagagacactcctcacttcccagacggggtggcggctgggcagaggctgcaatctcggcactttgggaggccaaggcagacggctgggaggtgtaggttgtagcgagccgagatcacgccactgcactccagcctgggcaccattgagcactgagtgaacaagactccgtctgccatcccggcacctcgggaggccgaggctggcggatcactcgcggttaggggctggagactggcccggccaacacagcgaaaccctgtctccaccaaaaccagtcaggcatggcggcgcgtgcctgcaatcgcaggcactcggcaggctgaggcaggagaatcaggcagggaggttgcagtgagccgagatggcagcagtacagtccagctttggctccgcatgagagggagacgtggaaagagagggagaccgtggggagagggagagggagggggagggggggagggggaggggagggggagggagagggagagcccttacaccactttctatgtcatttttactgttgttaggtaaattgtaaatccctgtgcataggaatcgtgtctttttcaacttgatttccatgacttagaattgctactgcaaacaaaaaagaaaaactcacaaacttgttagattgctacatctgaagtcaagtatagtttgagagtttttttcattctaatgtgagtaaaagtttttgcgtgcctaatgtttttaactgagggtactactaattagcatcctcgaaggaaagaaaactgaaagtgattttgctttaaagcttgttattcatagtaaaagaacatttaccatgtaattcagggaagctttagaaagaaaacctaggggatctgttggccatatcaaaaaagtacaagctacatggacagtgaggtgatactgtaatacttccacctgtaggtcaactggagagacttggttttttccaaatagacctagcttaattgtgatgacgcatgccaacctaattaacctcctaatgttacttgtctttgtttttgtattgtcaggaacttggtgtgtgggttgggaatattagaacataatagaactatgtgatgtctaaattgagctttaacacaaactggttggtgttattgagggaaagtataacttattagtgggaatgggaaaagaagcctgatgttgtggtgaggtagaaatttccactgtgttactgtgaacaggaagtaaagggctaatggtcggtgactcagctgttttctgaacctgtctcatatgattcagtgtgcatgatgtctgtttattctcgacagagtaagtactacgggagtcacattacacaggcagacataatgtttatttaaccaactcagtgatgacctaaaaataacttgtggggtttttgtactacatttagcataatcagatagaaaaatcataatggacacccatcattgagtgctttcccttataaataactggatatatagtcagccagtactatttcatttcttacattgttaaggtgcaatctttggtatttaaatgaaaggtagcaaaagaagatagcctttaaattatccataaaataattctgtaccattttagattatactttggacagatatgcattttcggtgcttagtgccatcgttgaggtatttttgcaccaaaattttcatataggaacctttttgtgaggctatagcaaatgttgttttgaaatagaaatttacgtatttgctggattttatgttaatattaaattatagtagcaatagttttactttgattttcttgatttattcatcttgtactgaaggtttgtgcctaccatgtactgtaattgagtcttaaatatgtcagagccgggcacggtggttcatggctgtaatcccagcactttgggaggctgaggcaagtggatcacctgagttcaggagttcgagaccagcctgcccaacatggtgaaatcctgtctctactaaaaatacaaaaattagccaggcattgtgctgcgcgcctgtagtcccagctacttggaaggctgaggtaggagaatcgcttgaacccaggaggcagaggttgcagtgagccgagattgcacccctgcactccagcctggatgacagagcaagactctgtctccacataaagaaaaaaaaagaaagaaagaatcttaagtatgtcagagtatggttactgttatgctgtatacctgttacatgcttggctttgaaggagagagcacttggaagcctgagcttacataataatcataatctgctcattgtctgagaaattgtgagttgttatggtttattctttttgacatttgagtattcttgctctcagaggtgcagcatttgtagcatgtaaactttaatcagagattatttcaaaagggaaagggaagctagagtcactaagaagaaataggctgggcacagtggtttatgactataatcccagcactttggggggctgaggtgggcggatcacttgaggccaggagtttgagaccaatctggccaacatggcaaaacactgtgtctactaaaaattcaaaaattaactgggggtggtggtgcatacccatagtcccaggtattcgggaggctgaagtatgaggatggcttgaacctgagaggtgaaggttgccgtgaacaaaggtctcaccactgcactccagcctggctgatagagggagactctgtctcaaaattaaaataaatacataaataagaaataaatgccagcattctttttacaataatgctttatgtagtgggaatgtgtgatcaatctaatagtcagtagaactacccagtggttgatgctatatataaagtaggaaatacgtaccctttctataattgattttaaaagtttctgcattaagcttacactcttttatttcactccatgtttcagtaaaaatcacaggacttgtttttatttacaatattataccattgtttgaatatttaatgggatttatattttaaaatgttttagttggtatagttattagatattctgtattaacctagaatggaaaattaaagtatgtatcttctgattcactgcatgtaaataggacctgacttggacatcgtttgaaatgtattccagtaatcgcgctggctatacatggtcccatacctgcccttatcccaacagataaatggtattcttctttatttattcatttatttatttatttatttttgagacagggtctcactctgttgcccaggctggagtgcagtgacatgatcttggctcactgcaacctcctcctcctaggctgaagcagttcttccacctcagccttgcaagtagctcagaccacaggcatgcaccaccatgcctgggtaatttttaaattttttttgtagagacggagtcttgctgtgttacccaggctggtcttgaacttttaagctcaagcaatcttctcacctccgcctcccaaagtgctaagattacagatatgatcactgtgcctggccccgcaaattggtcatttctgatggttgtctgggcctcaaagcctgagttcagcatagtgttttggcacgttgcaaagaataagtaagaaaatgttgttaagtggacgcaactattccacatgggatgatgttagatttgaagaaggaaaaagtggttcctcaattcctttcagattggcagttgcaatagtaacagaaccctcattgacatgaagagccaatgttttcctgtagtagaggaattattttcttgttttatttaattatttatagtgtttcttgattatgttcatgggggcattttgttttgttttgttttgttttgagacggcgtcttgctctgttgccaggctggagtgcagtggtgcagtctcggctcactgcaagctctgcctcctgggttcaagcgattctcctgcctcagcctccctagttgctgggactacaggcatgtgccaccacgcccagctaattttttgtatttttagtagagacagggtttcaccatgttggtcaggatggtctcgatctcttgaccttgtgatccgtctgccttggcctcccatggcatgttgtttttaaataacttctcttgctctatgagatgagaaaatatgtattctgtttgggactttcttactctccctcgataataaaagataaaaatttttatttttcattcactgaaacataaaaaaggcatcatgttttgtgcagactattaaatgttgattttaagatctgtgttggatggttttatatagctgtctaccatttatgagtttcatgtggaatatactaccatatcaagttttcattgtttaaacagctctactttgtcaagtattgtttacaattcaacaagaaacaagcaagcatttacaaatatacgtgcaaatatgtattcgtctgacaaccaattagtgaaattgaataagtgctcttgaaacaaacttgtttgatatcaagcttttgtgctagagtaatattgttgttttgactactttaaaagtgtttttatctggatgtggtgactcgtgcctctagtcccagctacttgtgaggctgaggcaggggaagatcacttaaacccaggagttctaggctgcagtgagctatgattgtgccactgtactccaccctgggcaacagagtgagacctgttctcttaaaaaaactttttttcagttgtggtaaaatacacaaaatttaccatctttctgagatcatttgctataaaggaatacctaagtctggattatttgggggtaaaaaaaaaaaaagagctttattagtctcatggttctgtaggctatacaagaagcatattgccagaccaacacctgcttcagataagggcctcaggaagcttctactcatggcaaaaggtgagggggaggtgtgttcagagatcacatgatgagagaaccaggtgacaggctcttctaaataaccagttcttaagggaactaagtgagaactcactccagcaaggatggcagcaactcattcatgagagatcaactcccttaatccaaacacttcccattagactccagctccaacattgggggtcacatttcaatatgagatttggaggggtcagtattcaaccatagtaccaccttaatttttttttttttttaagagaaggagtctagctctgttgcccaggctggagtgcagtggcgtgatctcagctcactgcaacctccacctcctgggttcaagcgattctcctgcctcaacctcccgagtagctgggattacaggcatccaccaccatgccctgtatttttagtagagactgtgttggccaggctggtcttgaactactgaccttgtgatccgcccgcctcggcctcccaaagggctaggattacaagcatgagccactgtgcccggctcaccttaaccatttttaagtttatagttccgtggcattaagaacatttacatttgactgggcacattggcccatacctgtaatcccagtatttagggatgtcagtacaggggcattgattgagcccaggaatttgagaccagcctgggtgacatagcaagaatgtgtctctataaaagattttttttttttttaattactgggcatggtggcacatgcctgtagtcacaactacttgggaggcagaggtgggaggatcgcttgagcctgggagatcaaggctgtggtgagctatggttatgccactgcactccagcctgggtaacagagtgagaccttgtctcaaggaaaaaaaaatatgtaattgtcaacactgtgtatcttcatacctcttttcatcttgcaaaactgaaactttttgtccattaaatacagatctagtgtcccttatccagaatgcttgggaccagaagagttttggatttcagatttttctgaattttggagaattacattatttacaggttcagcattcctagtctgaaaatctcaagtgctccaatgagctttttaaatttttttgtttcatgccaactctcacaaatttacagattttggagcatttggattaaggacactaaacttctttttttttttttttttttttttttttgagacggagtcttgctctgtcatccaggctggagtgcagtggcacgatcttggctcactgcaagctccacctcctgggttcacgccattctcctgcctcagcctcccgagtagctggaactacaggtgcccgccaccacgcccagctaattttttgcatttttagtagagacggagttttgccatgttggccaggatggtctcgatctcttgacctcgtgatccacccacctcggcctcccaaagtgctgggattacaggcgtgagccactgcgcccggccaaggacactaaacttctaactccccattatctcctctccccatcccttgccaaccacaattttattttctttctctgtgatttgccatggtgtcggtacctcatagaagtggaatcaaacagtatttgttttcttgtgactggcttatttcatttagaataatgtcctcaaagctcatccatgttgtaatgtgtgagaactcgcttctttttaaaggatgaataatatttttttgtatgtatgtgccacattttgcttgtccattcatctgtcagtgaacacttgggctgctcctacctttttagctattgtgaataatgctgatatgaacatgggtgtggaaatatttattgttttgtttcgttttgttttgttttttaaatgagagtctcgctctgtcaccaggctggagtgcagtggcgtgatctcggctcactgcaacctccgcctcctgggttcaaatgattctcctgtctcaggcccccgagtagctaggactacaggtgcacaccaccatgcccagctaatttttatattttttagtagagatggagtttcaccgtattggtcaggctggtcttgaactcctgacctcaggtcttgaactcttgaccacctatctcgggctcccagagtgctgggattacaggcatgagccaccgtgcccgtccttttattgtttttttttaagacagggtctcatactgtcacccatgctggagtgcagtgacgcgatcatggctcactgtagccttgaccttcagcctctggagtagctgagactacaggagtacatcaccacacccaactaattatttatttttggtagagttgagtctcacagtgttgaccaagttggtctccaattcctgggctcaagtaatccttccacctccacctctcaaagtgttgggattacaggtatgagccaccacacctggccacaagtatcttttttaagagtctgcctcatttcctcccttactgccttttgttgtgcttagttgagtttttgtagtgacacattttgattctctttttgtttcattttatgtgtagtctacagaatttgtttgggatgattatcagagggatttcatgtaaaatcatgaagttataaatatgtattttaaggtgataataatttaacatcagttggttacaaaaaccgtacttcttttcacctcaggcctctccaactttgttattgatgtcacaaatcgcatctttatatagtgtgtgcccttagatttttatgcttttgtctgttaaaatcctgtaaaagaataaaaactggacttatgaaccaaaattttaataatagaggcttatatatttgtccatgtatttatctttgctggagaactttatattttcatacggtttttagttactgtctagttccctttcttctcaatttgaagaatctttggtcatttcttgtagggcatgtcttatggtaatgaactttctcagcttattaatttcattaatttaaaatttgggaatgtcttaattcttccctcatttttgaattaaaattttgctggatatagaattctcatgtgatagggttttttttttttttttctttcctttcagcatgttgaataatgtcattctactaccttctggtctgcaagtttctgctgataatcttattgaggatcccttgcttgtcatgattcagtttgatcttgctgctctcgaaattcttttccattgttttttaccttaaaaatttgttttttgtatagacaggttcttgctgtgttccccaggctgttcttgaactcctgtcttgatccctccaaagtggtgcaattacaagcatgagccactgtacctagcctgtcttttacttttgacattttgaatatgtgtttccatgtgggtctctttggttttttttcctatgtggggttcattgagtatcttgctatcatatatccatgtcttcaaatgtgggaagttttcccccattattttttttgaaataatctttctgttccttttcctctctcttcttctgtaatgtgaatattgatttgcttgatggtgtctcataagtcccttcggttctgttaccttttctttattctttttaatttttgcttctcagactggattatttcaaataacttttcattaagttcactaattctttgttctgttattagagactgcttttgtactcttctagtgaatttttcaattcagttattttttcagctccagaatttgtttcttttcttccccccctccttttttttttaaactatttctatctctttgttaatattctctatttatgtatcttttttctgatttcatttaggtctctcctcccccccaccacctttctttagcttattgagtgtatttaggacagtttaaaagtctttgtctagaggctgggcatggtggctcacgcctataatcccagcactttgggaggccaaggcaggcagatcacttgagatcaggagttcaagaccagcctggccaacatggcaaaaaccccgtctctactaaaaatactaaaactagccgggtgtggtagtgcatgcctcttatcccagctactagggaggctgggcaggagaattgcttgaacccaggggacagaggttgcagtgagccaagattgtgccactgcactccagccagggtgacagcataggactccataccaaaaaaaaaaaaaaaaaggtgtttgtctggagctgaaagccattatcctaactgaactaacacaggaactgaaaacgaaatactgcatcttgtcacttacaagtgggagctaaacactgagtacacatggatgcaaagaaaggaacaacagaccttggggcctacttgacgatggatggtgggaggagggtgagaatcaaaaaattgcctaccagatactgtgcttattacccaagtgacaaaatatctgtacacacgcaacccctgtgacacacaatttacctgtttaacaaagctgcacatgcactcctgaacctaaaataagagttaaaaagaaataaaaaccaaataccccaggaacttgtctttaacttttgaactgggccagacaaccacaatcacaacatccttgaaaacagctgaattatgccagcgcctccaccggtgataattctttcagaacaacaacaacttgttttgttttgagatggagtctcgctttgtcacccaggctggagtgcagtggcatgatctcggctcactgcagcctccacctcccaggttcaagcaattctcttgcctcagctcccaagtagctgggattataggcacccaccaccatgcccagctaatttttatatttgtagtagagacggagtttcaccatgtaggccaggctggtctcgaactcctgatctcaggtgatccacccacctcagcctcccaaagtgctgggattacaggcatgagctactgtgcccagcctatttctatactttatgatatttgttcaaagtcgagcacttaaatagccagctgttctaatctttgtggactgattccatgatgggtaacatcaggagtatcagcctggtgtgaaggcttaaggtcttgttgaccttttctgtgtttgtatattcactgggcctatgtgaacacttttccccagattcctgggatgtatcagtgcttttagctgccttgatctaagagtggcatgttagatgttctgttgtgttcctctgccctttgtcttttgtccctctagcactggcagatcggtgacatccctgtagctctcaactaagccactcttcccatccgaactttgcatcaggtgaaacagtaatcagtcccatgagcagcacccccagacaagccagaacgatgcaaacaagttccactcttttccttctgtcatgatggagcatcttagaattaggtggattcctcccaacttggcctcaatgaggagggattggagcaagggcaacctctaaatatacatacatatatacattaaaaaaattttttctgtggctgccttacaaattattgttctttattttaatattttaaaaaatttcctatattgttttgagtgtggctttttctcgatggggcatttagttggctgccgcagattcttaactgcttgagagagtttgcgtctggttgaaattattacacagttgagttggcagcttctttcacactgtgatccctcccagattctgccggcttccttccctgagggcccctctgagatatagtcagggatagcttccctggactctagctggagaatgtgagtgcttacaaagctcttcttgctactgcttctactttcatattccgcactaaatctgctttagttctaggtaaggttaaatccttctcctgtaatctggattttcagttttttcagtgggaatgtgtgttcggaggcgggttttcctgcttttacacttggggaactcacggtttctcacctgtcttgtggaatttacagcggcgtgccacttcttttagaggatctgtggattctttctgttttcccgatatgttcctatggtggttcttggcacaaaagtccatggtgtgaatctccacatgttgttctgtccatccaagtgggagctgcacgttaatcctgtctcctatccgccatcttcctccctactttttgttggtctggacagggagcttgtttgttcagtcacaaaagtttattctttgtgaatcctattggcttctgttctccagttctccaggttcttaccggtttcttgagtttttacaaaggtactttggtcggtatgttgttcacttggtgttttcattgggtgatgtggacctggatcatcgtagtctgttatcttggtgatgtcctgtgtttttgaagcagatacacatgtttttgaagcaaaaagtgtcctgctttatgaagcagatatgcatcaatagaatttttgctacttctcttatttcaagcattttattgcagtgggatttgaaatgtgcactaattatacagacttggggaaaaaatttctcatgaggttgcaggtgcctctaagcaatgtgaatggaaaaccattttagggtcacaataaaataatgtgccatacctgtggaaatatggaatagtaaacgactgtcccgaaacccttaggaatgagaatgttggatttttttttaagacaaaaacttaaggatggataatgtaaatgtttaataattaaatagcaagaggtaaaggaggaaaacttttagttctaatatcaatataggccagtgttctcaaacttttatacttcaggatccctttatactcttaaatagaactctttgggcttctcaatcctatgtgcattgtatctactaataaaaatgtctgccacatacccatgtgtataagcatagtttatccttctttcaagtaaaatggcattgcaagaaaaagtggctagttcagtttataactctaatggtgttacaagtgcttttccttagtactactaatttacctctgaactgttttatgtcttctcacttgatcaatacagtatactaaaaagacatgctaaattttgttagtttactgttttatttatataacattctttaaatgaccaaattatagagatggaggataaatttgtggttgtcaagggagaggagtgaggcaagaaggaagatatttgtggctattaatagggtaggtagggtagggtaataccacagatccttgtcaaggaatattttgtattttgactgtaatggtggttatatgaatttatacatgtgataaaattgcatagaactaaatatacacacagatgtgcatgcatctgtagtgaaactcaggaaatctgaataaggttgatggattgtatcgatgtggtttttctggctgttgtactgtactgtagttagatattaccattagggaaactagatgaagagtatatgggagctctgttttatttctcaaattccgtgtaaatctataattatttcaacttaaaaagtgatacattctgttacagaagtgacattcttttgtcaattacctgtagaataagaaaaattgaaaagttaaataaagaagtgacattcttaagaactggcttttttttttctttcctttttttttttttaaaaaaaagtttaatttgtcgtgaaggcttagggatgaagaatacaatgactatcattgccttggttttcactaagtatatgtaagatttacttagtgaaatctcagatttcctgagtatatatttaagatttactagtagctacatccaccttgcttttctatcattgttgaaaatatcagcacaggcctgtgacatcttagtatttattttacgaaaatatttcacctcccacacctgctttaatagcattacagagatgcccaggactctgtggaccacactgtgataatcagtagcttaaagcttcagtctttattagctgaggaaaacaagtgctatgcttaagactgtgtaggaaattcagtgataggtctctgtcactgtctccagcgttttatattgtggtcttgtttgttggatattattgtacttctatgaaagtagagttgcagaagtttagagtgatataaaatatagaactcataaaagcaaaacatgggaattaacagtttgctatacctgtgttgtgcagtatgttagccatgggctatgtatgtggctatttacattctaaggattaaaatgtatataaatacaatttaaatggaaatcagtggttatagagtttgttttttgcaagaagaaaaagttctagacatctgttgtactatgtgcatatagttaacagtactgtatacttagtggttaagatagtaaattttgttacatgttttcttttttcttttctttttctttctttttctttttcttttttttttttttttttgagacagagtcttgctctgtcacccagactggagtgcagtggcactatctcagcttactgcaaccttcgcctcctgggttcaactgattcttctgcctcagcctcccgagtagcagggactatgggcgcaagccaccatgcctggctaatttttgtatattggccaggctggtctcgaactcctagacctcgtgatccgcctgccttaactttccaaagtgctgggattacaggtgtgagccatcgtgccaggccttgttacatgttttctaccacaaaatttaaattgaataaaattcatttaaataaacatttattttttcagtttcatcagtcacatttcaagtgttcagtagccacatgtggctaatagctaccattttagagagagtaaatatggaacatttataattatcccagaaagttctatttgcattggttgtgtagcacttaagaagacagttttcagctgggtggggtggctcacgtctgtaatcccagcactttgggaggccgaggcgggcagatcacaaggtcaggagtttgagaccagccttgccaatatggtgaaaccccgtctctactaaaaatagaaaaattagcagggtgtggtggcacgcacctgtagtcccagctacttgggaggctgaggcagaagaatcccttgaacccgggaggtggaggttgcagtgagccgagatcgtgccactgcactccagcctgggcgacagagcaaaactccgtccccccactacccccccagcaccccccaaaaaaagaagaagaagacagttctcaagaggttgaaggtacttggtctggactttaaggtgctatttttgtttctctggccagatttaagtgtcaaacatttgttaggtgaacgagtttctctcaattaatttgtaccctataatatctactaatgagaatgaacggggctggatgtggtggctcacccctataatcccaacactttgggaggctgaggcaggaggattgctagaagccaggaatttgagaccagactgggcaacattggcaagaccctatctccacgaaaaattcaaaaattagtcaggcattgtggtatgtgcctatagtcctagctacttggaggctgaggcaggaagatggcttaagcccaagaggctgaggctgcagtgagctgtgttggtagcactgcactttagcgtaggtgacagagcgagaccctgtctccaaggaaaaaagaagaaaaatgaataaacacacttatatatgcataaagagaagtttataaagagaaattttaaagcaaaattaagaacttgtataaattaataggaatagcctattttaaaacttattggtatagctatgtagtcttattcagattttaagattttaagtctttaccagctctaagatgatagagatagatttgcatctagcccctttacaatttcaaattttacattccaacattgtaatcaatctggaatttcttttggtataatgagttgaggatggttaaccacctttcttctaaatgattatttagttttctcaacacaatttattaattttggtatttttctattaatttgaaatgtttctaatacattctgcatatatgtgggattatttcagcattctctgtattactcattccatgtcattaaatgttcttctgtatcttttttaatgactgcaaaggattatacactgtggctgagtaagtgcttcttacatctatatctctttattgatttaataataaatttcttaaagattaagtagccagggcgcagtggctcacgcctataatcccagcactttgggaggctgagcccggtggatcacctgaggtcaggagtttgagaccagcctgaccaacatgatgaaaccccatctgtactaaaaatataaaaaaattagccgggcgtggtggcatgcatctgtaatcccagctactcgggaggctgaggcaggagaattgcttggacccaggagggggaggttgcagtgagccaagattatgccattgcactccagtctgggtgacagagtgagactccgtctcaaagaagaaaaaaaaaaagattaaaataagtgaaacagtcatctatcttaggccttatttacgcacatagcccacagcacagtgttttctttgtgctagatttctgctaatgctgttgatttaatttttattatcaaaaattatttagaactctataaaatagcagacttcctactggatattctggtttgctttgtattttgtttgtttgtttgagacaggttctcactctgtcgcccaggctgaagtacagtggcacaattacagctcactacagcctggggtcaagtgatcctccagtcttggcctcccaaagtgggattacaggcatgagccactgcacccagcttgcttggcatatttgtatttcatgcaggagaagctggaggacagaggttttctttattaaatttttattataaaataatcctactgaacattggaaagtaaaaacataatacagaagtatataaaataaaacctataagttgtatcctgtacactctttataaccgtctctgaagtagtcaatttaaaatttgctacatattttcttaagacatttatcttccttggttgttgtgtgtactatgtgcatatatatagtttttaaagttaagacagagtctttttatacttaaaaattctacaatttgcttttgtcacttaatattattatggacatctttccatgatgtatgttgacttgattcattctaaagattattctaaattctctcagtgactaagtacataatctcaccttttttatatatagacatttagaatatttccagtttttttgtttttgagtgtgttttttttttttttttttttttaaggaggggcccattgtgaatatattcacatagtgagctccctgaagtggaatcatagaatcaaagggataagcatgtttaaaatgtggtcagtattaccttacagttttttgttttgagatgaagtttcgcttttatcatctaggttggattgcagtggtgcgatcttgtttcactgcaacctctgcctcccgagttcaagcaattctcctgcctcagcctcccaagtagctgggattacaggtgcccaccaccacacccatctaatttttgtatttttagtagagacgaggtttcaccatgttggccaggctggtctcgagctcctgacctcaggtgatctgcctgtctctatctcccaaagtgctgggattacaggcgtgagccaccacacctggtaccttatacctctttgaaaatttggcagcttagttttttagtcagatttatgtttgttcacatacagtgtgtacaatattgagtttaatctttatggctgaatttagtttaggtgatggcagaatcttaaaacgagaaatggcatttcatctctgacttatatgtaaagtacttagaatagtacctgaaacctagtaaaagctgtataaatgttttatgttataattatttttgttagcttatgtccattgtactacattgtgaaaataggaaatacagattaattttttcacatgtctatggtttgaaaaccatcacatctggagtcttgttatacttgatatgctgtgtttgttttgtcttataatggaattcaccatttctgcctgtggttgactgtccaaatcactgtttttaacatcatcattagagatttaagggttatatgtacaccataaggactgttctcattggcttttcttcagtaacattattaatttacatcatttgcttggtttgctgtcactattgtgttcttatctccccaacaaataaaaagcattcaaaaaggtttattgaaacataaaattaataatgaaagtgagaacagatgtctgtaactcatcaacttggacagtatactggattgcagagtaaattctgtatgttcacccatatgtccttgaagaagtaaatatttgggatgactttgaaattattcgaaaagggaaagtacaaacagatgctctgattattattgaaatgatccttcattgatctgtccctagttttctgtgcatttgacatgaaacatggtcaaagtatgttcccactgaaattttgcattgtttttcaacaaagcatggtagtaaattaaggaaattattctagaataagtcattaaatgcagagaagagatcaaaagagtagaggcatcttttacagttgcactgcttacagcaatgataggtaacaagtcatactgttcctaagaagtttctaaaggcatccacagagaatggaaaaatgctctgaacgatcgttgaatgatctattggcaaaatttctttgtcatgtgccaccgttaagcattccatattgctagtggtataatggcatacattgtgacagaacaattacttgcatatgtggctgcattagagattgtgctttccatttgatgaaagtacttgtgtacagagtctgaattagctcttggcatatgtgcaatgtaaatataaaaagaagtactagatttttattttttaagtctgtttagagtagaaagcctatatagaaaataattctttgttttttttagtaatcactttcagagcaatgatataatctggaaaaaggcacattgggaacattgttgacagagccccagcaatatctgtgatcaggaagggtgttctttctgaacaaaagaactttatctttgaatgccaattcacatattgcattttcagttggctctatgttcccttatttggcttgagtgttgaaaatgttgttaaaattttgagtgaagtcaaataaggttgtcatgtatatttttagcatcttcaatgaaatacagtggattccctttctatttcaatagtacgacagctatgagagaacaaagtgttcctctaattgaagtatagaaagaggtaacatttctttatgtttttgtaagtgatatatttcagtgttatatttagtatcttgacagctagaaactcctgcttcagaataccaccaaattaaatgtgaatagtgtcaaaatatatcctaagatcaaagagcctcattactgagaaatgaccttatgaatacttgatttttttaaatttaatgaagaattaaattggtgctctcttttaaaactatattcagattctcaaatagaagttgaagaaatactttccctatctcagtggagccagaattaataagaaattcattccctgtgttttcttaagttaaaatagtcaaactttcagcctttcagatttcggatgtgatacatacacataaacgttgtgtctgaaacagtgctgaaactaatccatgataagaaaactttatttttagatcctgtttgacccatttattaattatttgatagacatgagatactttgctgccatatttttaggttagtggctagatttagtagaactagagtaggaaaggaaatcaatctgatgttgaaccttagtgtcagctacagagatggctatattaagattaccacgttgaaagattgccggatagcctctgtgtctaatatgaagccattaattttgttttttataactcattaaaaaaaagaaaaagaaattttgttttgttatttggaacgtatgatgaatcctgtcaagtatttcctttaaaattggtgatcccagctaaacgttaaatggtcaacagatgctaatactttctagatatattatttactttgttatcttaggtaagatacttaaatttttcagtccttggtttcctcattcatagacgtgggatagtgataaataaaggtgatttgggaatattttatctcatttaatcttcacaaactgccttgagaggtaggtgtgttgttcctttttacattcgtgggaaagataaatgagttgcccaaactaacaacagtgttcagtagcaattgttaggatttcagtccaagtcttgtggatatgtccattgttcttggtggcatttcattttaaatacgttacaagcaatttttttattcagtagcacacagtatattagtctataacatttggcatggatttacaatgaaaagcttatgtttttatcttcagaaaatatatggtaaatgagccgtgtgtattacattatcacttattctaaggttttatataaggttcttattggttattgatttttatgggatcatgtaaaaggattaaggtatgtaagctttggcaagattacagcaatatataacagttaactgtgtggactgctaattgtggctctgagatgtcttcctcaaggaaagcacaccgtagcaatagcaagttttctcatccatgtttgattttgtttgtggtttgggctatccatttcagaactagatgaattcacagtaggtcctcttagcattgataatttcaaataattgtacctagtctttccttcatctttttgtgctgccataatcgtgtatatgaatgttctggttgatgctctcaggagcgtcagcaatactgaatagagaggtaaccaccagagtcttactaggtcatgctttcctgtttctaaccatgatgatgaggcatgataaggcaatttacattggcaaatttgaaatcattgatgatcagagagcagggaaaattgttgtgaacctcacaggcaggttaaacaagtgtggagtgatcagcctgagatatgatgtgcaactcaaagatctagaaaaaaaatggcagaataatctgctctcatcctgtcagttttgtttcattgtactgacaaccttagctggcatcatggaccttgaagaggcaaggtgaaacacataggagggaaagttctgggattctttttctagcaacataatacatacttgtaaataaaatgccttaatgcacaaaaaaggaaaaatggttacacctagattttggattgctaatgtccttttatcaggagatttatggtaacttaaaaagtgttgcattagctggtaaagaagctcttgcctgtagtcccagctactcaagaggatgaggcgagaggatctctttgagcccaggagtttgagaccagcttgggcaaatatcaagactctgtctcttaaaaaaaattaaaaagttgttcaggtgctttgggaagccaaggcaggagtattgcttgaggcctggagtttgagcccagcctgggcaacaaagtgagaccctgtctctgaaaaaaaaaaaaaaaaaagaaaaaaattagtccggcacagtgctgcgtgccggtagtcccagctactccagaggctgaggtgggaggatccacttaaaaccatgagtttgaggctgcagtgagccgtgattgtgccactgcactctagcccgggtgacagagcaagaccccagttcattaatttaaaaaaaaaaaaaaagaaagaaaaggaactgtactgattttgagttactggatattgtaataaagttaaatttttaaaaagtagaatataaaccacattaataaccacttctgtaaacttttataaaacatcttgaactagaattgccatgccatattttttcaaaatattatattgttcttgccattttttgacagaccccttatccctctggacagaatgcaggtccaaccacgctggtataccctcaaacccctcagacaatgaattcacaacctcaaacccgttctccggtaagtaagcagaagcttgaaccaaattacattctctacctgtgtttgtgtgtgtagtggcttgggtttctttggcaaatatttttactggattttggaagtttgttccaaagatgatttattattatgactcctactattatttgttagctttgtattttcagaccttacctatagcaataattaaatttattgagaaaaagaagaggtggagcttttaaccctccactcccttttaatacttttctatagcatgatttttaagtctggttgcattcaagtttactttatttcagcttataatttttgttagttgtactgttcaaaattcaggtaagagtaaaatacaatgattttaggagtaaattgaatttcactaattaaattctcaaattccagtggttttgggaagcaggacttttgaatcagtgttattagatctgttctaaccatttaacagtgtgggtatatgcatgacatataccagtgagtgtattcatttattcaaatgagaaataaattgtgatacaaatgtaaatgctatcatcctctttgttcatcctttacatgaattgcaataagtactgccaagactgagaatttacacaaggttcatcctttgtttcacaaaagtatacagtggcttcagctctccattccttagaacatcgtttcctgccctgcatgattagctttggctagaaggtgcttctgtaacatctcacattgtgtatctcacatccctctttgtacctcagctctgtgtattcttcagaattcagggatatctttttgttccctgcccctgcctttttgcctggagtgcaggaatacctcattgcattagctcctattcatttcattttatgcatgaacttacaattgtttaaatataccaaagacttacttaaagaactaggagagcatagactgcaccaaaatgtaatctctttcttatcctttttctattttccttttccctgttgccctgttctccaatacctgttcttagatcctggttctccccagtgggtggaggaaccattctaaagaggtgggactttggtcctagttgcctgtttgcttgtctctttttttgctgaaatggtcaataagatgtctgatacaagttttgttatgagagtggtttggggatgtgtacacttgacttacttgggcctgagatctcaccagatcaatttagataggccctggttctaataattaaacatggaacattatggtaagctcctattgcaaagaattctttggccctctttctgtatacccccaaccctaatttctgattatcaaaaaagaaaatgaattaaatttacatggttagaactggcgcagaacctgactgaagagctgcatctctaaaccagtttttttgacagcccagcagaacagtgccaatacattgcacagacaactggaagaggaggaaggttttggaacagactcccgtttacaggtccttggctggaagaggctggataaaatactgcattgtaagcaatataacaaactgtacttcttgcaggcagtggtgcctctggcacttagtatttttgaccacatccatttattggctgatgaacagaaatgcattgattgcttcctctctgaaagtctaacctagcatggcagtttctgccaggcatagtggggaaaagaataacaaattgggtgggtgttctctattgggaattagtcaggaagaatttgggggtttagatttttctttattttaaacttgaagtgagatatccctttcagataaatttgaatttaaaagataaatttcgaggcttctttttactccctttcaattttataattgaatattaaggaggaaattgtctgtagttgtcagccatttttctgtggtcataaactcttcagatactatcctctatacaatttttgccatctgctctgctagtgaccattacccaccccattactaaaaatcacacacataacattccattacataccctaaaacaagtgcaagactagcagaccccagactactcttgcttcttgttttaggtttgattttctttattttgttatggggtttttttttgtttttgttttttgttttttttttgtgctgggagggtgaagttggggtctgaaatttggcaggattgcattttctgtttacgtcccaagttgtcatagtctagtctcatccatctcacagctgtcccatctggtgaggagaggtaagctgttacattgaggcagggcctcttcctgtggctttgtagagcagctaaagcttactccattctatttctgcattaataggccattggcaattgcgcagttttaggcttttctgttcttccctggacagctgcctttgcaatccaactggcttcaagtggcctctgtccttccttcaggttatctttgtgcctgtctttctacttgatgcttagaatcttagttaaattcatactgtggaaagaaaatcttttttaaaaataataacaacactgataagctatctgttccattttctcgttttactggaacttttaaacagcagtagttgttttttttttttaatagcctgtctaaagtagtgaagctattaaatacttaatttggagagggagacagtttggcttttgtagtaacgtaaccattgattatttttatattttgtggtgttaagtttcaaaattacatcaatgttatgttggccatgctcagttaccaactgtgcccagaaggggtgagtaagtgggtgggtggcattaacactggatccaagttcacagaaggctgctttcctttatatcaacagtcctcaccatcttaaagacccttctttaacaaaaagaaaagaaaaaagaaagaaaaatttctagttttaatatgagccagcagcgactacagtttgttctgttgcttacagctacccataggattaagactattgtcatttcaaatgaaaaactcaatagccaatggtgactagtgcaaaatagactagggtactttcctagggcactttcctactaacttaagttggggttttctttttcgcttttgtttttatatatatgtaattttataagatactcttcttgttcatagaaaattctcttttgactggaacattcaaaatgtacaaagttttagcttttattttagagccttgaaaatgggacattttctgtggaacagtgataagacaggtactgccatactcaggttaattttgtaacatggcccctctcttccattttcttcaaaagtgtcataaagaaacatttcactccactccctactttcataccacatgggtggtattgcctgttcttgtccatagtagaagtatgatgttttcttctcctaattggaaaactgaaaatacaagacctcaatttctttgaagagaaaattttctgcaagaactgtaactgccagttatcatcattctgaaaaactatattatattgattagccaagtatgatggctgacctaacataacccaagcttgtaggtcattaatgcacttttcattacttgaacaaaaggtgacattttagcttctgaggtgaattcttgacagagctgttttcagctgtctcctacattgtggccatgtgttctactgtaatttgttgaaattttaaaatgtgaactaatggtagttggggaagtaattccaaatgttttgcaaatcactattgcacataacttaaatgctgagcatgagagattgtttcttaatcttcaatctaattcatctgtagtgttaagctgacagaaggaagtctctatagaggaaataagagagccaaagacatatatttttgctccttaaatatattagataaaaaccctgtatatggtttacattaaacactgctttctaaatattttcttttactattaaagggagtggttaacattacaatagctaacgtattagtatccacaatatggctctacataccccggttaatattacaatagttaatgtattagtatccagaatatggctctacataccccaatatttttgtctgttcctttcagttaaaatgtattcaaacccaaatttggcctggtgaattgtttgatcctagaggtttagcagttaaaatttgcataggtgaaaaaactttttattttcttctgagttagtagaagagttggaatatatattagccactttcaagtactctatgatttagctgaggaattacatttctttgtgctttattcttaggtaacaataggtacatatacacagtgctttgctgttgtctatagtaattaagagatttgacttatttactcttttttcttatcaagcctataagaataccacttggattaatcatgttagagactgatgttctttactagctgtttgccttgacatgccttgtattaaattatattagttaaccgcatttaaacttaaacttgtgtgtgtgtgtgtgtgtgtgtgtgtgtgtgtgtgtaaagtcataaaagatttttctttaactccaagaaattaagatactgaaacttccatttcatggataagatatcccatttaacttaagaaaatttgcagttaattgtgttacgttttttacttcctgctggactttataattatctcctggctaggtcttgtaatgtaaaagctttctcatttcctccagctgtatcagttacatacagcatacttgattttcatgtttgtcttaatataaccacttaatttttcaaacttgcttttgccttattttagggtttttttttttttttaaataatcctatcagagagtaccttacatgcctaacagcatagcctgtttctctcccagttgataaatgacaaactattctgatagtgctgttaacctgttgaatcttagtacctgtctgtcactgtcctgcagcaaagctttgactgttttgtgtgttgttttttatttccccactgtgggttttttttcttttggcatattgtgtgaaattttggtttttgttgtggtgtttctgactctttgtgcctttccttttgtgtttgttttccctccttttctcagtttgcagcggggcctcgacctccccatcatcaggtactgtacccttgccccttcactatcacccttaactaatagatgggggctttagtagctgctgactcttagaatgctgccatcccatagaactactcaaattactcatttcaagagtagcttttatctgatataattcagctttctttgtccttcattaatctcactgcattttgttattaacaaatccatttgcctctgtttatggcacatttaaaaaatgctacagttttttttttcttgccaagcattgtttttaaattttacaattttgaaaaatttagatactaagtgtttatagattttgtggatatttgtagtaagttaaatttaactgaatgaagcaggcagcattctatgggttttctgttaacattccgatataacctgtattgatgtgtataaaatagcattagtatttctaaaaccacttaaactcagttactaacttagatctagtaataaattgattaaaaatcatgtacatccatttgctggatagaattatttttattattagaacacatagaaaatagatatcttaattaatttaaataactttatcctattggttttttaaatgaaataattttaattttttaaatgaaataatattaattctatcctattggtttcatacttctatcctattggaatctatttagaggtggcaagacagaaggacttgcagggttctccctccaaccccccagtagctttttatggggtattctgaaacattttcttctgctgaaagagctttggtttagtctgttcatattacaagctttactatgtaaccagctggttaggcaagtctttttctgcatctttgtttcctcatatgtaaaatggagataaataacctctgccttagaaatagtgtaagcatctgacacaaaacaagcagtcagtaagtggtaactgtctttaatatgattgttatggaacaaagtctggttggataaagtaaatgttaccagtatttgcctgtgttatcatatttacaattcttattactgagtaaatggatattgtttagttgaaggcttccagtgatttaatacctgactctgtttttcaaaatgtattccttccaatctggaggatgtaaaggcaaagcaaatctgagttattaaaggtactttgcaggaggatggctatatggggtggatggctattgtttgggtttcatagtgaaataaaacctcagggtattttttttaattcagagataatattgtaaagtattaatactttaagagcttggacttcgccatcagctagatctaggtttgattcttccatgttaaccaagtgttcttggataaatcatttactgctctccaccttagttttctcacctgtaaaacggagacagtaataccatgttgaaactattatgaaaagtaaattagataatgaaaataaaatgattagcggggtgtttggcacatagtaactaggacatagaattagtattactactactaataataaaaatattagtttcttatgtaaaagagtgtttataattgaaaatttagtccagtgccatagaagcatggcttaaattttaatccagggacaaggcaaatactcctaaaagagagagacgttggggatctttactcaagaagcagagtgaaaagaaactatttatttgagaaataactgcaaaggaattagggcaaaaacgttttctgatctcctttatgtaaggcacctgttaatttctttgttcacatgcttgtgtttttcaaaccttggtttattttcataagtcatttcagataagctagcctaaggtaaactgttagtagagggaattaacgttaccattgaccacaattattttggtggattttatacactgtagattgatggaatgatgagtgaattttgaaacaaaaacagtattgctgaataggccaggtacggttgctcaaacctgtaatcccaacactttgggaggctgaggtgggtggatcacttgaggtcacgagttcaagaccagcctggccaacatggtgaaattccgtctctactaaaaatgcaaaaagtagccgggcgtggtggtgggcacctgtaatcccagttacttgggaggctgaggcaagcgatcacttgaaccctggaggcagagtttgcagtgagccaagatcacaccactgcactccagcctgggcgacagagcaagactcccatctcaaaacacaaaaacaaacaaaaagaaccatgttactaaatagcctgggcctttcttattaagactagtaactcttttaaagactgttgatcaaaaaatttaagttcttaatgaaaatagaagaaactttaaggttatgtttctgctacttgggttcgataatagtggttctaaaattaggatattgtatttaagcatttgtagtgagctttgggaaattctgttctctaagaaaacttttatgagctttaaagttatgtggtacattttgtctttctttaattccaacaatcggggaaaatgttcagaaatctctgtgagaaaaggttgatttcagcccacattttcatgtgcagtaggactcagtaaagtgttagcagattagtcgtttaactgtatgatactgctcatgaatttatggctagttttgattattttaaaaatagaagtataagctggatgcggtgtttgatgcctgcaatcccagcaatttgggaggctgaggcaggtggatcgcttgagccccagagttagagatcagcctgagcaacatggcgaaacctcatctctgcaaaataaaaataaaaatacaaaaattagttgggtgtggttgtgcatgcctgtagtcccagctactctgggaggctgaggtaggagaatcacctgagcccaggtggtcaaagttgcagtgaggtgtgattgtgccactgtactcagcctgggtgaaagagtgagactttatctcaaaaaaaaaaaaaaaaaagtatatatgtttattatatttattatttatttcttaccaagaaacataattatcatctaacaatagttcttggaggtaagttcctaagatacagtataaattcagagcaatgatttttaattcagaaaattcaggtagctggcacttttttctttgttatcctttttttcctgaacaccagttaaattcttttcatcatatcacagagaattgaataaggatgtctgtacccttgcctcaggcagcaacagtaattaccttgaatagaggagaagaaagacatggggttggagtggcatagctgagcagggctaactgaaccggcattatgtgtggtataggataaattgttagaaagagtttgctattttgcatccacaggagatgtggggtcaatttggtttgtttcactatgggataggtattggcatttgggtgggataaccagttatcaaagctgccgtatataatacaattaatttagcatcgtttgggctttaaatgccagtagaatttccctagtgacaattagaaaacaaagcaaaacaaaagaaaaccaccactgtacatttccaaataccctccatggaaatgacagcatttcccatttgagaatcgcttactgaatctgtatttcacagtatcttctcttcagatctaaagtcaggtagcacctaaaccctgaaagatttacagaggagttgctcataatacagaacaagacatagagacttgcataatgaaatgaaagctgttggaggaaacaaacattgagtggtatacagagaatatacttttaaagggaagacactcatgtcctgggatattttgggttttacatacttaagacttaaagtggaattgaaggcagaaatggttttttcatcggtggtagtttgctttggccagtgaatagatttcttttttgtcctttattgcattattcatcagtggctgcctttctgatcactttacgtcctttcatgctttgatctcaatttattttttgaaggaatttgttgttggatgatgtttttaatgattgttgtttctaaagtccaatagcaaatatagtaactttttgttgatgcttagtaaaaattgcaaagtatgttctatagctgttgcaaagaaaaaatacaattatttaggtaggctttttggaattaattgcttgtgaaaagaaaacatcatccagtttagtaatcttagaacttaaatattttttctgtgtaagatggagttacttgaattcaagtaaacaaaaaataacaagattttaaatggtaaacattttctttgttcttaatggaatcaagaaactgctttgagtgtattccttggaacttcttttatttaaaaggtcttttaactctgtttggagggctagagctctttttgagtccccacaaatcaagtgcgccatgctccagttaggattatttcagccacatcttcttcctgatattactattagtttttgtcttttgtggagattcttcagattaataaggatgtgctattcttttggcattttataacctgaagagcttttagaattacagttttcttcaaagataaaacaagaaatactaagtcattttatatgcaaaacactcttggctttagaaatatgtcaactatttttgcactgatgcttgaaaatcccaaggtaattagaaactgaaagaacagaaagtacactcagaattatagcaagccacttggtataatttggattctggcctgtgttgtttattttgtgtatttggtcattaaaatctgtgtagttctggtttaaagttacttatgttcctgtccttattttactttggggtttcacaatagagatcaagtgttggttatatactatgactaagtagtcttttcattatgagaaagaccagggaaatagtattttaaagtgttcataggacaaaacactgtgcagttttttgatatatgattttggttcacatacttttcacaaatgctgaaaaatatgctgtattcaaagcagtgggatttagtgtaaacaaataatgagcttcataaaaccagcgtacactatcagcaggaggaggaggaggaggagtatgtgccataaagaaatgtcttacttggtggcaagcgttgaaattgtgcatgttttcctcttgtggtttggttctttttgtgaaaaagaaacttttgaaaagaactgctgatttatgtagatttctttttcattatgatccctaaaggtttctttactgaaagtttgtgatgttatatattcctagttgagatatatttgtgttactataggcaatttattagatttggaaagtaaaataaatgggccagacctggcacaacagagttaaatggatatgaatagcaagccatctcaagcatctatacgaccttatgacatcttaaattatgatcttatgaactttttgttttttggagcttggtacaagtgagtgatgggtggttttatctggtatctcattcacaaggagttgtatagtagcagcataaataatgaagaaaatatatgttgggagtcagtaaaactgggattcaatttcagcttcactacaaattatctttgggcctcaagtttctgatcttcaaaatgggtaaaatatgctaataaatgatataatactgagatgttttaataactgcatatatttcctatgggtgtggtgaggataaagtacctgcctatcacagtgtctgaaatgaaataagtccttggtaggtgtcagtttcctttagcagtgagactacctgcctttccccttttcccaagctattttttagcatgagtgaagtattttataaggatgctcatttccaagactctcccttatgatctgacagaacacctcctgttcctgacataaacctctagggtagcactgtgtaatagaatttctgtgatgatgaaaatgttctgtacttgtgcttttcactgctgtagctctactagctatatacatggctatagagcactttaaatgtggctaatgcagctaaagaactgaattttttctttttttttttttatgagacagagtctcactctgtcacctaggctggagtgcagtggcacgatctcagctctctgcaacctcctcctcccaggttcaagtgatttttgtgcctccgcctcctgagtagctggaactacaggtgtgagctaccacaccctactaacttttgtattttttgtagagtcaggattttgccatgttggtcaggccagtcttgagctcctgagcttaagcgatccgcccatcttagcctcccaaagtgctgggtttaaaggcgtgagccactgtgcttgacccggaactgaatttttagtacaagtagttaagtatggcttgtggctcctgtattgaacaactcagctctagggcttccatatcccgattcttagtgaaacctaaattatataatattgaccacatgccgggaaatatagaaaaaatttagaatggaataatctccattataaattaccatggattaacagattatcaaattgacacctgagtgatgtcccattatgtggactctttaaagcttgtccctttctaacttgccagcaaatcatagcactgttcttcaagagtacttcagacttttaaaagatattcaccaaggaaatttctaattgcagatgttagtttttcatcttctagtaggctgacctatatactgaagcatattttgtattgctttgcaagttaataaatataggcatgcctcggagatattgcagacttggtttcagaccacgacaatcaagcaaataactgcaataaagcaagtcgtgaattttttggtttcccagtgtatatatgttatgtttccactgtgctgtagtctactaactgaacagtagaattatgtgtaagaaaatgatgtacatatagtaattaaatactttctcttttttttgagatggagtcttgctctgtcgcccaggctggagtacagtggcgcgatctcagctcaccgcagcctctgcctcccgggttcaagcaattctgcctcagcctcccgagtagctgagattacaggcatgtgccactacactggctaatttttgtatttctggtagagacggggtttcaccatgttggccaggctggtcttgaactcctgacctcgtgatccgcccacctcagcctcctaaagtgctgggattacaggtgtgtgccaccgcacccggctggtaattaaatactttctggctaaaaaatgctaatgattttctcagtcttcagtgagttgtaatctttttgctggtgaagtgtcttcaatgtagatgggtgctgactgatcagggtagtggttgctgaggattgagatggctgtggcaatttcttgaaataagacaaagtttgtcacattgatggactcttcttttttttaatttatttgtttgtttttgagatggagtcttgctctgtcacccatgctggagtggagtggcataatctctgctcactgcaatctccacctcctgggttcagttctcctgcatcagcctcctgagttgcggggactttaggcacatgccaccacatctggctaattttttgtatttttagtacagctgaggtttcaccatattggccagagtggtcttaaactcctgacctcaggtgatccgcccgtttcggcctcccaaagtgctgggattacaggcgtgagctactgcacccggccagtggactctttatttcatgaaagatttctctgcagcatgtgatgctgtttaacagcattttacgcaaagtagaactttcttttatcattggagtcaatctcaaactctgctgctgctttatcaactaggtttatgtaatattctaaatcttttgttgtcctttcaacaatgttcacagctccttaccgggagtagattccatctcaggaaatcactttttttttgctcctccatatgaagccagtcctcatttgttcaggttttatcatgagattctcatgataaagtcagtcacatcttcaggctctacttttttttttttttttttttttttttgagttggagttttgctcttgttatccaggctgcagtgcagtggcatgatctcggctcactgcaacctccacctcccaggttcaagtgattctcctggctcaccctcccgagtagctgggattacaggcatctcccaccatgcgcagctaattttttgtatttttagtagagatagggtttcaccatgttgggcaggctggtctcgaactcgggacctcaggtgatccacccgcctccacttcccgaagtgttgggattacaagcgtgagccactgtgcccggcccaggcactacttctaattctagttcttttgccatttccaccgtatcagcacttactccttccattgaagtcttgaatccctcatagtaatccatgagtattggaatcagcttcttccaaatgcttgtgaatgttgatattttggccttctcccatgaatcacaaatctctcctctcctctcctctcctctcccctcccctcccctcccctcccctcctctcctctcctctctttttgggggaatagggtctcacgatgttacctgggctagcctcaaactcctgggctagaacaattctgcaacctcagcctcctaagtagctgggactccagtcgtacaccactgcacccaggaatattcttaatggcatcagcaatggtgaatcctttccaggaagttttttatgtagtttgcccagaaccatcagagaaatcagtatgtgtggcagctgtagccttacaaaatatacttcttaaataataaggcttgaaaatcaaaactactccttgatccataggctgcagagtggatgttgtgttagcaggcatgaaagcaacattaatctctgtatacatctccctcagagctcttgggtgactaggtgttttcccagtaagcagtaatattttgaaaggaatctaagctctctacaatggccttaaaatagccagcaaaccatgctgcaaacagatgtgctatcattctggctttgttattttatttatagggcatagtctgagtagatttagcataattcttaagggccctaggattttccagatagtaaataagtattggcttcaaattaaagtcaccagctacattagcccctaacagtagagtcagcctgttgaagctttgaagctttgatgccaggcattgacttctcactagctgtgaaagtcctagctaaagagaagtcaatgcatgacatcttgtttcaatagatggctgtttcatctacactgaaaatcatgtgtttagtgtaggcacttttatcagttttcttggctggatcttctggataacttgaagcagtttctccataagtacttgctgcttcaccttgcactttcatgttatggagacagctgctttcactaaacctcatgagctaaactttgctagcttcaacttttcttctgtagctttcttacctctcagccttcacagaattgaaatgagagttaggactttgctttggattacattttggcttaagggaatgttgtggctggtttgatcttctatccaaactgctctttctccatatcagcaataaggctgttttgctttatcatttgtgtgttcactggagtagcactttaaatttcctccaagaacttattctttgcatttacaacttggcttttgaagtagctttcagcctatctcagcttttaacatgccttcctcactaagtttagtcatttatagtttttatttaaagtgagagatgtgacacaagaccatatagaggccactgttcagttattaatttccatataatggcctaacttcaatattattgtgtctgctgaataggaaggtctaaggagaggagaaaaatgggagaggcggggggacaacagacagtaggtggagcagttagaacacacaactttcttaagtttgctgtcttctatgggtgcagttcatggcgctcccagttacaatgataacataaaaggtcagtgatcacacatcaccataacagatataataataatgaaaaaattgaaatattgggagaattaccaaaatgtgacaaacacgaaatgagcacatgctgttggaaaaatggtgctgatagactttctcaacacaaggatttcacaaactttcaatttgtaaagaatgcaatatctataatgcacaataaagcaaagcagaataaaatgagctatgcttgtactcagagcttttccccacatgggaatatctaatgtgattaaataggatttttctagttgctgaaaatgaaaagatgtttttcagagaatttctgttatataatttgttagaggtgtttttgtcttttcatgcttttactgagcaaagtcatgaaaaacgatatttcataattgccagcacgttcaaacaccatttgttagacgtttttgatgaggaagctttgggtaatgatatgaattattgcatctttagaaggatttttcgagaggaaacattttttattctggcttctagagtgtttctgggaaagtaagcaattataagtatgctaagttcagcctctgttttaaaagtatcctatcttgttggatctgcccaaaatactgcctcaaatgagagttttcaccttcctctgccatccttctggtgtattaataataaatccttgaaagatgaaagaagtaaaacagattgaaatgaagtttaggaggtgaattttatgttgtacatggctctcttttctgtgcctagctctttgcagcatttttatcagttacttggataagtgacatttatgtcaagttttctttttttttttttttttttttttttttggagacagagctctgtcgcccaggctggagtgcagtggcatgatcttggctcactgcaagctctgcctcccgggttcacgccattctcctgcttcagcctcccaagtagctgggactacaggcgcatgccaccacgcccagctaattttttttgtatttttttagtggagacggggtttcaccttgttagccaggatgggtcaggttttctaatgatcctgtagtttgacactgtcatgcagtcggtacaatctgaaatgatggcttgtttagccagataaattttcatagttacaaactacaaaatcctctatatgagcttcaaaacacaattgtaagagtacacactgaagtgaagaacacagcttatttagccaggttatgtataaagaggatttaaatgctttaaatgagtgtcagtaccaatcagtagtaaaatatcaaaactgctcctgtgattcttggtttcattaatggaattggagctggcaggaataagagaggtatattgccttttcactcagcaacaaatatttttttagtgagtgccaggtacattctgggcagaccccacctcgatacctttgtgttggaacaagattgaaagaaaagatcaagctcatttgggaattaaaaatcttggttggagggacaggatgctagggagagggttatgattgacttgaaacaaaaaatagtggtgtgaaaattggcagtaatggcagcgttcacataacttagtggtctgttgctgatggagaaggatttgacatctgtgtggttttagggatggacacgagacaagtggataggtgatatagggagaaaaattgggggccagtagaaggaagagttttacagtattagaactccatttaattatgaaaagaatttgtatcttaagttgctgaagtttcttatccctagtggtatattataaaagatattcagactttaggtggatggtgagactaaatggctccttccattcaggagagtttgactcttaatgattgttcatcactcagttgagaagaaaagaaatttgaaggattgcaagcagtttgggaaatcccatttatatattccttttaataacctatggattactgctatgcttgcccaactgagaatctgaatttcttgcattactattaaatctaattatgcatttgtaattgaatggtttggaaggagtacaaaaaggatatatatttttttttttttttgcatttctagtcattacggcttttctagaatctcttctggtgcacgtgtgtgtgtgtaagtgatcctgtacttttaagtggaaaacacaagctccagatagactattgttgtaaaaagtattaatgcagtgaagttgagcaaaagtaagtctgtaaaatggtatgccaaggatacgcttttagcatatgaacaagtttcagtcactttttgggagatagagaattggagttgtgtaggtagaagaaatttgttttcgtgagtaagcatgtgttttgtgaagtaacttgatggaaaatttttcttaccaggaatcagtcatgattgagggacatgccacccgttagtatagttggataaagatcctgctacatcctttcagtgtttgtaaagaaaagatttctgctggtttatgtgaaaatatgggggtattccatttcatgagaggtaatatgtgtaacagttaaaagtacatgcctataatctgactgtgttttagttacagatgggggaggcttccagcaagttatttaatctccctgttcctcagtttttacatatatcttatgacctgttaataatagtacttgccttcaaggtcatttatgagcatgagttaacatatatgttgactgggcacggtggctcacgcctgtaatcccagcactttgggaggccgaggcgggcggatcacgaggtcaggagattgagaccatcttggctaacacggtgaaaccctgtctgtactaaaaatacaaaaattagctgggcgtggtggcatgtggctgtagtcccagctactcaggaggctgaggcaggagaatcacttgaacctgggaggtggaggttgcagtgagccaagatcacgccactgcactccagcctgggagacagagcaagactccgtctcaaaaaaaaaaaaaagtgtatatatgtgtgtgtgtgtgtgtgtgtgtgtatatatatatatataatgcttaggttggtgctttacaaatacatttctctttagcttcaaagctgaattcttagtgtataaaaattagtatattggccaagcgcagtggctcatgtttgtaatcccagcactttgggggaggccaaggtgggcggatcccaaggtcaggtattcgagaccagcctggccaatatggtgaaaccccgtctctactaaaaatacaaaaattatccaggtgtggtggtgggcacccatagtcccagctagtcaggaggctgaggcaggagaatcgcttgaacccaggaagtggaggttgcagtgagccaagatcagccactgcactccagcctgggcgacagagcaagactccatctccccccgacaaaagaaaaaaaaattagtatatcaatataactacatatttagtggctttttttggttcagctatatgttaatattaggaatatcattagaaacactgtttttacttcaaagttactgaggaaattagtttcatactgttcagaaacctcattgaataagatgtaacctcagttattctggacaggctggttaaaagttttatcagaacagctggaaaatagtggtaagaaaatatttcacatacagactgttaaaatttttggaaaacattgcccgtatctatttttcttactctgcataagttaatggattcattttctttctcctctccttaccaccccgtaacaccctatttcttcaggcaacataggagtattttgacattatttgatgatagtgttaccataatagatgatcacctgtgttcatttgatacgccctttatcttggctgggctgccctctacagttgatttcaaaggatctttcagtattaagatttttatcctctgcctgtgttatttagcaatgcccagtaagttgaacagataatgactcttctctacttgaggcttgtatcattcttgtggctcctgatattaactacattataaaaatacttaagtttgttcctgaagtgttgtttacagatcacatgcattgatgcatgatagattctgtttgctttgtaattacgagaaatgcagtccagtaatgggaggtttactgctttattgttccttttagcagccaacaaaaaaatgttgtcaccaaaactgtgtcagtggagataactagaagatggttcctgtagttgtattgcatcccaggttcctatgttaccaactttgcctcctgtgctttcttttcatctccatcacctactctctgtggcctgcccctttggtttcccccatttattccgttctcctgctatacctttctggctgttgtttttctgtgacttaatttctttagggctatctttgccatggggtaggaaggctgaatggggatgagccttggacactagatcccagttcttccttttgagcacaagatcaagttacttataccatctgtgggtggtttgatgcctaagagtaggacaaaataagaccagagtgggcccaaaggtcgaagcttggctttatttggactgatagcaacgaatattttgctgctttatttattttggtgcaagaccacattttaagattgttattatagttctccattttagagctataagtgccctcttatatacctgattagttaaaaagagcaagcaagtctctgtcattaagagtctgatatatattgaaaagtttatttcttaggacttttacaaaaataacaaatgacacagatggcaagtagatcacagagatgctagacaatgccagatcatgaaatgggtgatcatgagatccaagagtaagaaccagtagtcacaactgtacttgtgccaccaagcagacatttccttgcacactactataacttgtggctattaataatcatagaggatttttgccactggatttcagttaaatgtaacttgattctttgattctatgtgtggttaaattctcaagtgaagaactgtcattctgattttctagtcttctttcttctcctattattactaaatagaaagatatttttgttgagctgcatgctatttcctgtcccttccaactgatctgtaagcttttccattggctttctttctgtttcctgctgctttcttgcttcatatttgaagggaggattcagacctatccaggtaacaaactactggttctgcatggcctctttataactcagtctgcttattattacattgagattgattgctaatgaatggatacattcacattggaaatttactattggtatattgtttcaaggcttttaatcttgcagtgaaaattataactacaggtactggttgccattttgagaaatttgaactctgctgattccagaccattcttaggcctgtctagattgtccacttttattgcaaactattctagaaggctcagtttagtatgggattgtgccaccttttggagaggaaaaaaactgcttagttcagcatgtgacaaccctacagatggtttaatttagcttgaccctgatggactgggtaaatattttatgatcaaagagattccttgttcttctaagtattttataaattacttgaacagcagtcttttaggaggctacttttaatttttaatgatttgataatgaaccacttactctttatcagagtcagttcttttatataatagagaaatatcaatattagctaccccttttgttatactttattatacatatatgtatgtatatatacagtatgtgtgtatacatatatgtatgtatatatacagtatgtgtgtatacatatatgtatgtgtatatacagtatgtgcgtatacatgtatgtatacatacagtatgtgcgtatacatgtatgtatacatacagtatgtgcgtatacatgtatgtatacatacagtatgtgcgtatacatgtatgtatacatacagtatgtgcgtatacatgtatgtatacatacagtatgtgcgtatacatgtatgtatgtatacatacagtatgtgcgtatacatgtatgtatgtatatatacagtatgtgcgtatacatgtatgtatgcatatatacatacgtatatatacagtcgggtcgaaaccaccctactgttttcaaatatgtgatgatactgataagagcttgccctagtgtggtatatttttgggaacccagcaataggtaatttattctttttatgcatattgtatttgtaattcaagttgaccagatttttattagtgaagaaaaggagacagtaaaatttatatattcccctgtgttaaaaaaaaaaaaaaattttttttttctccccttcccagtttttccagaggcctcaaatacagcctcctagagctaccatcccgaacagcagtccttccattcgtcctggtgcacagacacccactgcagtgtaccaggctaatcagcacatcatgatggttaaccatctgcccatgccgtacccagtgccccaggggcctcagtactgtataccacaggtaaagtatctttgaggcctaggtggtccagcaatagagtggaaattaacccggattcacatcagagggagctgggtggatgaattgtggtattagttttcggtgacgtgtgaactgttttgttggttacaaatctagcccttttgtgatttttcattatgctgtgtgaagatatttctacatctgtttacttaaaattttttaaaatgataaattgtttttatctacttgctttctcccatccctttgccacaaccaactgctctaaaatggactcagtgattatgctgttcctgaaatcctttaatgtcattgaaaagctactagcctgagattattttacagtgagctgatgtctgcctgtgcactgatatgttgtatggctttactaagctgcacctttctcttcattctcattgtatcttgatggcaagcaagcatttttaatgtgtttgacccaatcgctttacctcatttaaatgattctcttacacagagaactttactttctgtagtaagctactttcttattattttattatgtttttcgcccccagataccatattatttataaatattcatactttctcttttctagtaccgtcatagtggccctccttatgttgggcccccccaacaatatccagttcaaccaccggggccaggtcctttttatcctggaccaggacctggggacttccccaatgcttatggtaagtaggaaaagtcaagacatttctgctagttttttgtgtttatttaattttgttgcttggtgggttggtttatacaatgaggtttagtggtaagaaggatttttaaataacatgctgctaacagttctttcttgaaagctacttttttttttttcttccagaaatgggagtctcattatgttagtcaggctggtcttaaactcctgggctcaagtgatcatcctgccttagcttcccaagtagctggacctactggcacatgccactctgcccagctttaaaagtaattttttggctgggcgcggtggctcacgcctgtaatcccagcactttaggaggccgaggcgggcgaggagattgagaccatccaggctaacatggtgaaaccccgtctctactaaaaatacaaaaaattagccgggcatggtggcgggtgcctgtagtcccagatattcgggaggctgaggcaggagaatggcttgaacccgggaggcagagcttgcagtgagccgagatcacgccactgcactcagcctgggtgacagagcgagactccatctcaaaaaaaaaaaaagacagaaaagttactttttagagagtggcttacaagaggagtattatagaaatatatttagttaatgacatcttctttacaagctgataattctactggaaagaatcatgtttcagagttctgacatcttccaccagttcactgttacctagatttttactggatttttgccagtggcatgaatataccttatcctcctttcacaatctctttttctccaaacatttcctaccaccttacaccttaaagattttgttaatgtctttcttagtagaatgcaatttccatgaaagtagagatttttgttttgttcactgctatatccccagcccctagaacagtgactggcaggcacttggagaatatacatgccataactaaatataactcagtgaacctgtgattctccgcaaaattgtgataagatctatggcatgggggaggttttgggtattagttccaatgaaaatgccttgaaaaattaaaagtgtttttaatttagagagagctgggttgccaagattattggcatatgcgccaatgctgaactaaaaatgataaaaattacttacttcattcaacaaatttttacttcatattacatttctcttattccatggaaggtgaataataagggataaaattagtagatactagaaaaattaagttttgagattcagtaagcattgatctgttatataaccaacaaagcaaaaacttattaaataatcttaatataacaggataacttatccattaaccagtttcctaaaattgggattgtctcagttaagattacagcagaattgatttgattcaagtagcccaagaaggtttttttttttcagttttgaggtgaagtaggcaaagcaaccaaatgttacgtggctttacttcttttagagaagggaaaagttttctgttaccttggttgatattgtcttgggaaactgctatttcaaagtgatacgcaatacccttcacttatcctcagggaatacattccaagacccccagtgggcatctgaaacctcacatagtaccctatacataccatgggtttttttttttttttttttgatctgataaaagggctactaagtgactaattggcatgtagcgtgtacagcatggatacactggataaagggatgattcacatccctggtgacatgaagcaggacagtgcaagattttatcatgctattcagaatggcttgcaatttaaatcttatgaattgttaatttctggaatcttttgtttagtattttcagactggttgactgcaggtaactgaaattgcagaaaagggattaatactacattttatataacctcactaaatgtctcaaatatgtttatttaactcagctttattaagttgtatcattactatgaaatttgatattttcagaacaataatgtgttacatatatgtgagtttaaaagttacacaatatatatatatatcacccaatttttgacagcatattgcaagtgctgttgaagtattccttgtgtaatccttggacttacctttgtcaccatttttatgtaattctagtgcctttattctaggtccttattctgaaaacttaaatccaagtaattatttttgagagtaacaatggttgttactatctagaattttttaaatagaaaacaatgggattattaatcagcatgaacatgctgaaatagacagtgtctcccgttaatttctgtgttgcaaagggaatacaattagtcttctaatttacaacatcatttttaaagatgtcttactgaattgtaatctgcttttttacttagtgattatgccaatcactttactcagaaaatgtcatcattaaatttcctgctgtaagtctgtgccagccctctttattgcttttaatactattgtacaatatgtatagaaacagtaatgatgaatttactagtagagacataatgtgcagatttgaatgtacaatattataacattttggctttatttctattagatatataccatttttattcatttttatgaaaaagcagtatgttgaggtataattgtatctcagatattattgatgtctgttccctttcatagatatgctttcttccccagtaaattctcatgcagatccagtagacatcaagtgggcagttaatcatctagattaaaatattgtttctctagttttcttaatattagaaaaacaatcttaaaataatttatttcattatgaaagtaactaaattaatgataaaaatttaaaaaggccgggtgtggtggctcatgcctgtaatcccagcactttgggagaccaaggtgggtggatcacccgaggtcaggagttctaaaccagcctggccaacatgatgaaaccccatctctacttaaaatacaaaaattagcagggtgtggtggcgggcgcctgtaatcccagctactcgggaggctgaggcagaagaattgcttgaacccaggaggcggaggttgcagtgggcagagatcatgcccctgcactccaacctgggtgacagagcgagactccatctaaaaaaaaaaaaaatttcaataatatagagtgcataaagttgaaatagccagtttctctcccttcccatcctttaaagcaataacatttaacagtttgatacgtattttttttttcatttatatttaacaagtttttttaacttaaattaacatggaatatttatagtagtgtaaataataaaacttcctggttattgttttcctttcatactatattcatgggcatctttctatttcattatctatagaacttctctcatttcttttaaaatatacataatctatttttggaatgaatcacaatttatgatacctaatttttagtactttagtagagatggtgtttcaccgtgtaccaaggctggtcttgaactcctgagctcaggcattctgcctgccttggccttccaaagtgctaggattacaggcatgagccactgcgcctggccatgtttattattgtttctatggaaaattcaaggttttgaattttttttagaagacaggcagtgtgctagttattttgtggaatacaggtgttaagatactcttcctgccattcagtttcttatagtaagtctgttagatattgtgctgaggtttaaacagtgagaagaaatctaaatattgactgcaccattggtttcacattatagacaagtaaaatgaataaaaagtagagtaaaataaagtagaaaacatacatgactattaaatttataatttggccaagaagacctttaaagaaaactgccgtttactgccagtatcatttcatgttttaacaacaaaaatcatcaaataggagcagtcctttatacaaattttaagttgttaaacctctgtgtgacactggggcctgttgtggggtggggggaagggggagggatagcattaggagatatacctaatgttaaatgacgagttgatgggtgcagcacactaacatggcacatgtatacatatgtaactaacctgcacgttgtgcacatgtaccctaaaacttaaagtataataaaaataaataaataaataaaataaaaatacaaaccaaggttcacataaaaaaaaaaacctctgtgtgtgtgtttgtatttcatgattgttattgtattcattttgcaatacatcattgacactttttatatagactgaggtttgggaaccactgatttagaactgggatcagtaaactttttttttcagtaaagggctagatagtaaatatctcaggttttgcaggctgtatggtctctgttgcagctgttcagctgtgccactgtgatgtaaaatcagccatagacagttgataaactactgtacgtgggtgtcttccaataaaactttatttaaaaaaataaatagtggtggactagatttggctcttagactgtagttgacagatctttgatctatacaaatgtacttcattccatgcataagaaatttgaggtccagagacattaattaacttaactaattaataaatggtatgtaaaaattactcatttctagtggaataaaaatgtttttaaatgtttctgactagcttattataaatattatatatttataataatatactattatattagtagtataggcagtagtatattagtagtagtagggcagattttctactctgctagagctcacagttaagaagacttaatgttttgctaattgcatttaatcccactatattgagattatcttgttctgtcacatttattggattaatgtgatataccaggctcttccccaatcatgtaggctcaaaaatgtttcatgagaagaatccaggttttttttttttttgttttttgttttttttaagagatcaccttttggatcttatttcacttacctcaaaaaatatggtgaagtgagcagattgtgttgcttgcctggcagcatttgaaaccaattttggggatttgttttctgagttaatttctgagccagtgacataataaagtagcacataattgctaatttgagttctgctttgagaatagtttactcattgttagaggatgactgagattttttttttggtctttttacattgaacttactgaaatcatagtcatgccctctgcttagatcttttccaaatctgattcagcaaacctgattgatacctacagaattctggtactgcaaatcatggtgcttccaacaactttacacttgaaaagtgttatggtggtagtggggatgttgatggtgataatgaaagtgggccagccttatttgactgtttgcttagtaccaaggattttacctgtgtgaactaccctcgtacatatttttttccttcttgttacggtgaatcaattatccatgttctatggaaagccaatcttttatgtgtgtactggatcccatcctgtacccatttaaggctattactctagcaattctttctttcccacattgacaattttccccccttcctctgctggattagtgtcatctgtatataggaataggcacactgtttcattgacatattaaggaaagtttttctgattccatatttttgtccagctatagctcaatttttctgcttttcttttacggcaaaatttttaaggaaaatatttgtactcatggttttcattttccgtcttctctttcactattgaacccactcaaatcaggcttcacactcttcacctctctgcccaaacaacttttgtcaaggtcactggtgatttgtactttgaaaaatcttatttgacctcttcagcaccatttgatgtggttaagcacagccctcattcttgaataattttcttgatttcaaccactgccttggttttcatctctttggctggagttttcccaatttctgtgacctctaatagacatggaatgccccaagatttaaccactgggcttcttttctatctgtattcatttcctgagttatctagtcttgtttaaatgttgtttatattctgtgaattccagaatggataactgtaactcatacctatcctctgactccagatttgtgtcactttctaactacttgatctgtatttgaagatctggtaagcacccgaaacttgacctgtctaaaactgaactcttgatttttctgccccaaactctattccttcagcattcctcatcttagcaagtagtacctctgttctttcacttgctcaggcataaaactgaaagagttttccttgagtcttctttctctcacaccagtatccaattcatcagcaaatctataggctctaccctcaaaccatccagtatttgaccccttctccacacctctactccaaacaatttggcttgatagtaattataataatagtcttaagttttgaaagttaaaaacagctcattgggagtacaaggagtgggggaagaagataatttcaggcagatgggcagtacagtcaaaagttgaagagattggtgtactcaaaggataggagttaggagtaggttatagctagaacaaagatgtggattcaagaatgatagaaaatgtaatttggaacctggattctaagtatctggactttatcttaaggccatatgttctgagccttttttccaccccagtattcggaaatttgctaatcctttatgtacctccctatggcagtagttccccatgagtaaggagaagaattagatcacccctactttccaagatgatcagatatattcccttctgtccctgacaaaacccataaacaaacatacacatacacccttgtgtgagagtcacagttgcatgtggtaagcctcagaataatattttttaaaagcatcactatagcatgatccatgttttagaaagacaactgtggtgtggatctgtaggaaccgagtatttagtggttttcatattggatgtttgtgaatgtttgaagacattacatattttgggaataatttcttgaccacttcagtaactggaggagagctagtggaaaaagatgatgaagaatgcttagtgtttttgtttttacccttttaaggggattgtgcagagacacagtgtcattgctagttctgtagtgtttgacaaaataactgaatgcctatttaattttttccaactttttaggaacgcctttttacccaagtcagccggtgtatcagtcagcacctatcatagtgcctacgcagcaacagccgcctccagccaagagagagaaaaaaactgtaagagatttttattactttttcttattttaaatctaaaatctattcacttatcagataagtttacgtagtcattattcatctcaattcacaaattactgtgccttttttttttttattcttcccttatagtcacaccacttcacctggaggatttgtatgggcatgtaattagaagttgttcataccatttgcataatatcatctttaattattcactgagctaggtttgctacatgacaacatgtactccacctttagaactgggagggtttagtgggctaaggttttactcagtgtgaggaatttaagctcagttctcacatctagactctcctttaacaccagtctttttctttttttttttgagatggagtctcactctgtagcccaagctggagtgcagtggcgcgatctcagctgaactgcaccctctgcttctggggctcaagcgattctcatgcctcagcctcccaagtagttgggactacaggcacaagccaccaggcccggctaattttttgtattttagtagaggtgggatttcgccatgttgcccagggtgatctcgaactcctgagctcaagcaatctgcctaccttggcctcccaaagtgctgggattataggtgtgagccaccgtgcctggccaacaccagttttaatcagctctccattcaagtatgaattgacagaagaaaaaaatagcacaaggaaaaagaactgagatattaaggatagcaagaaaaatccttcctgtgaaatagatatcttttaagaaacaaaaaacagagtttagaaaatgtattctaattgttttttataatttataggggttttgtctttgtctaatgaggcaggcccaagagaattggagtgtagtaatataaaagtcaaatggcagaaaaattgtagaagagtggcttgcaattccttacgcaacagaacagacaaaatgggtgatctttttattcaagagagactcccacattcacacgagtaagataggtggggtgatttatagcaatactcttgaattactctaacttaataaaaattaatgaggttcaggccgggtacagtggctcacacctgtaaccccagcactttggaggccgagatgggtagatcacttgaggtaaggagctcgagaccaacctggccaacatggcgaaaacccatctctactgaaaatacaaaaattagctgggtgtggaggctcgtgcctataattccagctactcgggaggctgaggcacgagaatcacttgaaactgggagggggaggttgcagtgagatcgtgccactgcactccagcctgggcaacagtgtgaactgtatctcaagtaaacaaacaagaaaataatagtgaggttcaagactttggtttaaaacttgtttttatcattagaaacaaattacttgtgcatatatcataatgaacaggacatgacaatgtatcatgacactacagtcaagaaactatatgctttggtaatgttgaatcagcatgatagaagttggacttgaagaacactctcagaatgcagaaaaatgaatagaagaaatgaaaccggaagacagtagttacagatgtttctaaagaagaaagtagaataaatgaattaaagctatacttaaaactttattagaaataattttccatacctaaacaatagctggcattagaagtcttaattgaaggactcccctaaaagcgtccagatccaggtagtttcattagtgaattccttgaaattctcaagaagtgtggactgccttgattaaggtatggtggtaataaacaacagtgggtcctttatatcttagcactctcccagaatagaatgcctagtcgcagacacttacctcctttacagcaccaactccactgacatctttaagcatagggtagcctttaaaaaaattaaaataagaccatacacactttgtgcttattgcattttttcacctaccagcacatcttaatgattattctgtgtcagttcatgtagatctgcctcattctgtttttttgagacaaagtctcgctcttttcccccaggctggagtgcagtggcgtgatctcagctcactgcaacctccgcctcctgggttcaagcgattctcctgcctcaatctcccaagtagctgggattacaggcgcctgccaccgcacccagctaatttttgtatttttagtagagacagggtttcaccatgttggccaggctggtctcaaactcctgacctcaggtcatccgcccacctcagcctcccaaagtggtgggattacaggcatgagccactgcgcccggccagatctgcctcactctttttactggctgttaagtatttaattgtaaggacgtaagataatttttttttttaaatggagtcttgccctgtcgcccaggctggagtgcagtggcgcgatcttggctcactgcaagctccgcctctcaggttcaagtgattctcctgcctcagcctcctgagtagctgagactacaggcatgtgctaccacgcccagctaattttttgtattgttagtagagatggagtttcatcgtgttagccaggctggtcttgatctcctgaccttatgatccgcccgcctcagcctcccaaagtgctgggattacaggcgtgagccaccgcgcctggccgacgtatgataatttttgagctattctgttctcgatcaacctttttccagtctttgctggaaaaggcatgattgcagtcagcattattacatttgtatataaggttgttgtcagaataaattattcctaactcgtagggtatttatattttttattttggtaaagaacttcagagaattatttacagcgtttaaaactttattctacgccaggtaccgtggttcacacctgtaatcctggcacgggaggctgaggcacgagaatcgcttgaacctgggtggcggagattgcagtgagccgagattgcgccactgcactccagcctgggtgatagagcgagactgtctccaaaaaagaaaaaaaaaggaacttttatctatgcagtaactttcatatattaaaagtattttatgaaacttgtatgttaaatatggtaaataaaatcagtcttacaggttcttacaaaacaagtataaatattaatagtttgcctttttgacctagaaatccagccaactaggtttcattttagcttgttattctaattagttcatgtcagagctaatggcctacatttatctgatggatctgtgattgaaataaagtcaaatgtggtgattatcacctttgatatttgacaggtttcccagtttgcacctttaactcacttatatgcctataaatttgctacacagacactcatctgtacatatgtcattttatttaaccttatagataagaattcgggatccaaaccagggaggtaaagacataacagaggagattatgtctggaggtggcagcagaaatcctactccacccataggaagacccacgtccacacctactcctcctcaggtaagacagagtgagctgtaatggatggcactatttgttcactaacctctactgaactcttctttcttctatagccactttctgtacttttcatttccatcagttgtctcgcagcctcgaatatctaaatggtatttaaacagacatgttttttctctttgcaaattataatatttttaaatttttattggtaatatatttatgtattgttttcacaatcagagcacaggtgaggtgctgccactcttcttaatgaactatcgcatgatgccaaaaggagctgcattcttgtagaaacctcatcattaaatgagtatttcacatttcacatggaaccttaggatttaagtgctgcaccttttgttaacgcaaacattaaggttgagaatttaacatttttaccaaacagtgttgcttgagatgatttcctgtgttattgagagcatattaggatgtataacaggtatacttcttaccttttagaactacataaatgagcttcttgagtgcagagtgtcttctttaattacagtcatcccttggtatctacaggggatttgttcaaagatgccccctccacagtaccaaaattcgtggttgttcaagttcattatgtaaaatggcgtagtatttgcatataaacagtgcacatcctcccatatactttaaataatctctaaattacttataatatctaatacagtgtaagtagttgtcatactgtagtattttaaaatttctattgtgtttttatttaaaaatgtttttttctaaatattttttatccaccgttggttgaatctctgaatgtggaacttattaataaattgtcagttaggcacctttttcttcctggtgaagaatgtggttatcataatctcctaagatgttactttcttgtttttagaaatcaagatattgtagaggaaactggagtttagtaaactataatagagattagattccgcaaatctgacaagatttgtatttcaaggccgggcgcgttggctcatgcctgtaatcccaccactttgggaggctgaggtgggccaaatcacccgaggtctggagttcgagaccaatctagccaacatggtgaaaccccatctgtactaaaaatacaaaaattagctgggcgtggtcgcacatgcctgtaatcccaggtactcaggaagctgaggcaggagaatcgtttgaacccaggagacggaggctgtggtgagccgagattgtgctgctgtactcaccagcctgggcaatagagagagagagactctgtcttaaaaaaaaaaaaaaaagatttgtatttcattcctcctatgtcactttgcattttgataaatgatatagagacacgtggttttcagatcttaaaaattatctaaagtgaagccaattgcaggtgcagtggcacatgccgatagtcccagctatttgggaggctaaacaggaggatcccttgattccagcttgggcaacatagcaagatcctgtcccttaaaaaaaattgtctaaagtgaaagcctaatgtctagaaacagataaaaagaaagctattaaggagtagggggctgctctctttgctcttttatgcctggatggtaaaggggttccttggagcccagtttacagacaagtgatatggatgatcacatagaaagcatttcagaatgatagactattgacttcattttagtagtacagacaaaaataaaaagttcataaaaatattcttaaatatcaaaatcacaaacagctggctgagtttagagccccttggaaatctgtggatttgagaaagacttaattttggtcctttgttgtaatgatatgttttctcttggaaatgatggtatctggctgacatttatctcagtctttcattatccagatgagtatatatgtccatctggacatgtgtgttgtaaggtcatgttaataattcttcatcactcctcattattcccctagggacattccaattttggaatgattaagcaggtcttatatttagtctcttccctggaagtgagcatgggataagcaaaattttcaaattgaagtaatctatatatgtgctctgttaggtgggggcacactatagcaaaactttgcaattagttgatcagtgcagtcaaattttagtctgtattttcaaacatattaaaatgttactactgtcaagccagataaaggatagacaatcctttgttgatttctgtttaaattctcaatttggacatgtatgtgtctttttgcacttaaatgccctgtggggtgtgattggttttctgtaactttccaagcttggttcccaccctcttctggtatccctctgtgtttagctacagacatctttttgttctgtgtctttccccagagactgtggttctgaatatgagtgtatatttctctataatcataaagcacatcgaatctacactttcaacagatgaaggccatcagtcaatagtagtaatttggtagttctttttgggaagtgtaacatcagttataaagcataagtttattaggtgaatttcatgcttttaaatccaaatgcatgaaattcatggaatgaacgaatagctttttaacagagacgtgtactagagatatttcattttcctcttaagaaaaacagtagcacaagcataatgatgacaactgacatttgacctcattttctggagcatcatagaaaggatgcagtggctcacacctgtaatcctagcactttgggaggctgaggcgggcagatcacttgaggtcagaagttcgaaaccaccctagccaacatggtgaaaccttgtctctgctaaaagtacaaaaaaactagccaggggtggtggcaggcacctgtaatcccagctactcgggaggctgagacaggagaatcgcttgaacccgggaggcagaggttgcagtgagctgagagcaccactgcattccagcctgggcaacagagagagactgtgtctcaaaaaaaaaaaaaaaatgttgacccattgtttcagaagaagctagaaatgtttagttatgtgtaaaaaagctgcaagttataaatattggcaactaatttccttaacaaaatagcaatctgccagccaaagaagactcattagatttaacttcagttttactagttttcaattttgacatcaatccagataaatacagaatcatatctggttagaagactacagatgagacagccctctgcatcagaatttaggattcaacagtaaatactgtagtattggccttaaagtacctgctttgagttagacataattgcttatgctgtggataaccaagcctttccctatcaccgagggaagtcccagtctctgtaaagggaaacagaagacctgttactaagatctgactggtgcagaggtgaccaagtggggcagaattgtagcacagataccagagacccattaatggtggtggtacatgtgaaatagaacagggaagaggtttaaaactttgacttggaatcagacataactgggtttcatgtgtgggttccactgcttagctttgtaactttagcccaattactttatcccagagcattgctttctacatttaaaaagtaaaacctatcacacagagaggattaaatgagacaaaatacttaaaaattgtttaagttcagtgcctggtgcgcaatgaatattcagcaaatatctattactaatattacaattattattatttcaggaggcacagagaatgactggaagaacgtgggaaggctttaccacagagacaccatttgatctaattttcatgggtattcacaaaatgaaagggaaaggggtattgaggcagaggaacagcatgtgcaaaaatgggaaattagatgaagggaggctattattatcatatttcaggtgagaaattcattgaaggagaggaagccagttggagagatgtttagcaattagttactaactagataaggactctaaaaaggatgaccatataatttaccatctaaattggggtgattgtggaaatgaatggcaatgctattgttaatgccagcacagcaggcgtaatcagtactgcacatgtaaatggggatgcaagttttctccagatgtaagggagagagagagtcagggatgcctcttcatgtttaaaaatacgtcttttgtagtgaaacataatattgagtatacatggggaagtttaaagagcgggatataatgagtttgcttttggcaggtggtcaagccattgtgatttttatctaatttggtcttgaggtttctctgtcaagagtggccataaaccaggatagccactctctaagagagccctgaccagggaaaagttatgtttgggtgtgtttgtcaggtgagacataatgaggaagtgaaaccaaaatgcatgaaacagaaaaaaatttactacttcctaatcccagagaggttagcagtgctgatgggaggctgataggggagctctgaagacagcagggaactcacccagcaggtggagagagagagaaagacgactcgtgggactgtccctttattaaggtccatgtcctcccttaggcttccccactggagttatggatttgctagtttgaagaaaacactttcaaagggtgaacttacttacaggactctggtgttaaccattaggttttatcatggtcagcagctatgggatatgttgtgttttgggtcagtgagatgaggaacaaacggcctctttcacaagcaactacacaggaaggaaatatttgaactaggccaaatgtgaaagggtttcaaaaacatatgctagccctaaaagtggatgccgagggagcaattatattaaatttgtgacacaagctatgagttaattgagggaaactgcattgggtttctgtgaggagaatggagaggagaaacaaatttttgctgctgctgtttttaccctaatgagaagtagacagaatttgaaactgttcttcaaagtcttaaaattttctgtgggttagctagtagagattttgtatctcacatatttaggaaatatgcatatgtgtatatacatgttccctgtatatacacattggatccctgtatatgcacagaggatcacagtgcgtagatggaggtgcatggctggatatcatggctcacgagaacacttgctgctggttttcactgtgttacttagatttatgaccttgggtcagaacattaagttcttaaaacccctattttttcatctgtaaaatgaggaattgtacgaaataatctgagagttcccttttagttcttacctattaaagtgggaaagaaggaagaattttgttactcgctcagtatcaaatctctcaactcctgatgatgacagtaaggcataaggaatatccctgtatttagaaatatgctagctattatgcctaatagtcttcattgaaacccggtagtgtaaaaataaatacatgatgccatgtcaagattgtctacttccaaataggatgaatggtggatcaaaaatcacttaattttttttttttttttttgagatggagtctcactcactctgtcacccaggctagagtgcaagtgcggtggcacaatctcggctcactgcagcctttgcctcctgagtagctggaattacaggcatgtgccaccacgccagctaatttttgtatttttagtagagacagggtttcatcgtgttgacccaggctggtctcgaacacctgacctcaagtgatctgctcgcctcagcctcccaaagctctaggattacaggcatgagccaccatgcccggccaaagatcacttaatttttaaaaatgaattatgtacctttcttccttgatatactctttttcccccctgcttctagaattattattgtaatgaaacacagttatgacatgggagagagtcctatgctatggggctttggggtaggaaattatggattgatagcgtatcttaggaaagatacaatctctcctaccatttgggaaaattactaaagtcagcaggttattcagtcttttgttgagctgcttatgaagttgatacctgcaaaccttaaattccatgaccatttattaattacagttgacccttgaacaaaatgggttcgtttatatgataatttttttcagtaaatacattgggaaattttttggacattgtgataatttgaaaacttccagatgacatattgcctaaaattatcaaaaaaagaaaaatttaggtatgtcatgaatacacaaaatatatgtagatactggtctgtgttttcatttagtgccataaaatatatacaaatctattataaaagttaaaatttatcaaaacttaggtacacaaatacagaccatacagagagaccatacagaccatacagagagaagtgtcaacagacacaaatatgcaatctggacatggtggtgcacgcctgtaatcccagcactttggaaaactgaggtggaagggttgcttcagcccaggagtatgagaccagcctgggcagcatagcaagaccttgtctctcaaaaaaaaaaaaaacaaaaaaaaaacaaaactacaagaggcaatattacatcctaacttcataaaattaactgtagtacatactgtactaatgtaattttatagccacctcctgttgctattttagtaagctcaagggttgagagtatccgcttaaaataccctgtgacactaatcatctccagatgagcagttcatctctcctgtaaattgtgcctcatagtaaaaagtaatttctctttgttgttacatattttttcattgtgcttagtgcattgccataaaccttgaataacaccatgggacccatacagagtgccaccagtgatgctggcagtacttccaagaggcagagaaaagtgctaacattacaagaaaaagttgagttgcttgatatcaactttttgatatcaagatatgcttgatatctaccatagattgagatctgcagctgtggttgaccaccattttagacagatgatttattttataaacagatgatgtaaacttatgatactgataaatacagcatagtattggaaatgtattttctcttcctgatggttttcttaaacacattttcttctagcttacattattgtaagaatatagtatataatatataaaacatacatactgagaaaaaaatatgttttatcggtaaggctttcagtcagcagtaggctgttaccagttaagtttttggggagtcaaaagttatacacagattttcaactgtgtggggtcagttcctctagctcctgaattgttcaagggtcaactgtagttcatttcatggtttagcagtaatagtttcctagaattgggtctatagcttcggttatgatattcatgttatatgttaatatgtgcagtaaatagttacattcctgcatgaagaatttgaaggtgatacctagtataatgtaaacaaatccaatcttttaaaatttcattttgtcatctcagtcataggcactgataaattaatagcattctgtaccttaaagcatacaggtatggtttttgttttagtggtgactacgataaaaatagtggttactaaattaaattatatttttctttatctttaatgaaataacttatcattagtaacctcccttgacttaaatggttcttttcaataatatgtaaagccttgtagactttaaataggtatctaaactggggtggattctctcaaaagtttttaaatgggacatttgaaaagtgtcctattctctgttcgtcatgatgagcagagatccttgctttgttatgctgtttcatagattaaaatgaatttgtatacactatatggtttgatagaggaaataagatctagtgtttggtagatcagtaaggtgactatagtttacgataatccattgtacattttgaaatagctagcagagaagaattcaaatgctcctagcataaagaaaagacaaatatttatctttgaattatgtgaatgtgttaaatttttgtgggtacactgaaactgtgtacatctgttacgcagtaataaaaattattattattatttttttgagacggagtcttgctctgtcaccaggctggagtgcagttgtgcaatcttggctctctgcaacctctgcctccctggttcaagcgattctcctgcctcagcctcccgagtagctgggattacaggcatgcaccaccatgcccagctaatttttgtgtttttagtagagacggggtttcaccacattggccaggatggtcttgatctcctgacctcatgatccgcccacctcggcctcccaaagtgctgggattacaggcgtgagccaccacacctggccaataaaaattatttttaaggaatttgcacacagaccatcaaagacctactcattgcttatctgacagaataaaaaacagtatcttgtttaatttttgtgtattctgtgaagttaagaagttttcgatgttcaccagttatttgtgggtgtatgaattatctgttgtacacgtttcttttgggtgatgatttttgtctgacagatttataagagggctttacatgttaaataaatactttgacatatgttaacatttttttcttgtttgatgattgtgttttagctttgttaatcgtgccttctgtcatacggaattgttaaattttctgtttcatttatttttttgagacagggtcttgtctgttgccctggctggagtgctgtgacacagtcacagctcactgcagccttgacatcctgggctcaagcaatcctcccacctccacctcagccttctgagtagctgggactacatgcacatgccaccatgcctggctaatgttttttattttcagtaaagatgaggtctcgttatgttgcccagactggtctcaaactcctgaattcaagcgataatcctgcctcagcctcccagatttctgctatgagccactgcaccagctgaattttttttttattttgaaacagagtctctgttgcccaggctagagttcagtggcatgatcttggctcactgcaacctccgcctcctgggttcaagtgattcttctgtctcagcctcctgagtagctgggattacaggtgcctgccaccatgcccggctaatttttgtatttttagtagagacagggtttcgcctgttggccaggctggttttgaactcctgacctcagttgatctgcccacctcagcctcccaaagtgctgggattacaggcatgagccaccgtgcccaggcagaatttatttttgatatatacacttatatatcaaaatgcacttagattagttccacatctttgcaattgtgaattgtactgctataaacatacgttttcaaatctctttttcatatgatgacttcgtttcctttgtgtagatacccagtagtggggttgctggatcaaatggtagatctacttttagctctttaaggaatctttgtactgttttccatagaggttatacattcccaccagttttacattcccaccagcagcatataagcattcccttttccccatatccatgccagcatctattgttttttgactttttaataatggtcattcttgcagcagtaagatggtatcgctttgtggtttcaatttgcatttccttgatcattagtgatgttaagcatgctttcatgttgtttgtaggccaatttatgtatctttttttgagaaatgtctattcatgtcctttgcccactttttgatgggattattattattattattattattattattattattattattgctgatttgtttgagttccttgtagatttccttcatcagatgtgtagtttgcatctctatgggttgtctttttactctattgtttcttttgctgtgcaaaaggtttttagtttaattaggttctatttatttgcgtttttgttgcatttgctttggggtcttactcatgaattatttgcctgggctgatgtctagaagagttttttccaatgttatcttctagaatttttacagtttcaggtcttatatttaagtctttgatctatcttgagttgacttttgtacaaggtgagaaatagggatcgtttcattcttttacatgaggtttgccagttttgccagcaccatttgttaaatagggtgtctattcctcaatttatgtttttatatgctttgttgaagatcagttggctgtactttcttggctttacttctgggttctgtattctgttccattagttatttgcctacttttataccagtactacgctgttttgttaactataaccttgtatgatttgaagtaattgtgatgcccccagatttctcctttttgcctaggattgctttggctacttgggcccttttttggttccatatgaattttaggatttttttttctgattctgtgaaacgttggtattttgatgagaattacattgaatctgtagattgcttttagtagtatggccattttcacaacattgattcttccagtctatgattatgggatgcatttccatttgtttgtgtcatctgtgatttctttcagcagcgttttgtatttctccttgtagagattttcacctccttagttaagtatattcctaggtatttcattttatttttgcagctgtggtaaaaggtattgaattcttgatttaattctcagcttggtcgttgttggtgtatagcagtgctactgatttgtgtacatttattttgtaacctgaggctttactgaactcatttatcaaatctaggagtcttttggaggagtctctagggttttctaggtatacagttatatcatctgcaaacagtgatagtttgacttcctcttttccaatttggatgccctttatttctttctcttacctaattgctctagctaggacttccaaaactatgttgaatagaggtggtgaaatgtaggcatccttgtcttgttcctgttgtcagggagaatgctttcaactttttcccattcagtatgatattggctgtggttttgtcatatatggattttactattttgaggtaagtcccttttttgcctacttggttgaggattttatcataaagggatgctggattttgttgaatgctttttcagcgtctattgagatggtcatatggtttttgtttataattctttttatgtgatgtatcacatttattgacttacatatgttaaaccatctctgcatccttgaaataaaacccacttgatcatgataaattatctttttgatgtgctgttgcatttggttagctagtattttgttgacagtttttatatctgtgttcatcatggaaattggtctgtagttttctttttttgtgtgttctttcctggtttaggtatcagggtgatactggcttcatagaatgatttagggaggattctctctttcccagtcacttggaatagtttcagtaggattggtaccagttcttctttgaatgtctggtagaatttagccatgaatccatctggtccaggctttttttgtgtgttggaaattttaaaattactgattcaatcttgctgcttgtcattggtctgttcagggtttgtctttcctctgatttaatgtaggagggtggtatgttccaggaatttatccatttcctttaggttttatagtttgtatgcataaagttgttcatagtagtctcgagtgatgttttttatttctctggtgtttgttgtaatgtctccagtttcatttctaattgagcttatttggatcttctctcttttcttggttattctagtgaatagtctatctattttttcaaagaaccaatgttttgtttcattgatcttttgtaatgctttttttgtttgtttgtttgaatttcatttagttttgctgcaatttctgttatttctttttttttttttttgagacagagtcttgtttagtttgtgcttgtgcttgtttttctaattccttgaggtatgacattaggttgtcagtttgcactctttcagactttttgatgtagacatttagtgctgtaaactttgctcttggcacttcttttgctgtactccagaggttttgataacttgtatcattattatcatttgattcagataatttttccatcttgatttcattattaacccagataccatgtagaaacagattatttaatttccatgtatctgtgtagttttgagggttccttttgcccccaagaactttaaaaatcattttcttaagccctcttaagtctgccttcaagcttttattttgagtgtccgggtttcctctcatcatttctgaccttggcaacctttcattgctttcaaggatgttctctattgcagatgtgtattgtcttgtcaggtcagtgtttaaagaaaaaacaatatttcatcaatctgaatgctgttagcccaagcatacaccctctagtttgttaagttgttctgttattatttactcccttttgcatcacatattaaggtttctgaagggatttgagtttgtgaccccttcgttataaactatttcagggctaggcgcggtggctcatgcctgtaatcccagtactttgggaggccaagctggggggattgcttgagcccaggagttcaccagccctggcaacatatcgataccctgtctctgaggcaggaggattgcttgagcctgggagtttgaggctacagtgagctgtggtcatgctactgcacttcagcctgagtggcagagcgagaccctgtctcaaaaaattgaataaaataaaatatttcaacaggtgtttgatgtgctctccttgttttttttttttttttttttgtaaattatactgtagtctacctaagttgctgaggttctaagcctaggactcacctttaaatcctcttaatttcactctccacagtcattacatcagcaagtcccatttgactcattcccaccaccttcactgctgttattgtagcctaagccactttgctctccttagacaacaggaactttctcactcatctctctgcttctgtcttgcctctcctctgttgattctgtacacaacagcccaagtgagtgatctttttaaaacataaatcatatcacaccgtttccccacaaaatactatccagtgtctcttcactattgactaactgtccatacaaaaacatacaaaagtccatattcatagaatttttgaggtgtgtaatggggattatgggaactacaagatgagatttgggtggggacagtcaaaccatattagtatagaaagaattagtatagaaagaactgatctatgtggttgatgcctattgtagtccttacatcctgtaattcctgcattagaattcagtggaattattgttaccattatattattgctatggtcattatttattgttttttattgcctttgtattaaaggaggtgcttgttatggcatgtcatatattattatattatgagaacacttcagagcttcaggttagatacccaatttttgacttgatctctgtactcagttatttcacaagccctacaacctcaaaactggagttcatggttttcctctaaccaaacccatgacttccaaaccttatgtctcctccagtgttccctttctcagactggcccctatctcagaaaccagaaacctaatgtttttctttttacccctctctcctcatagataccctctctaccatgtgtcatcagttacctaatcaagcccagtcagtttacccccaacctttaagtaaaattaagtaactgccccccattattaccaccaaaattatttcccttggactactgaagtaaccttgaaaattgcattcttgtaactgctgtttccttgctctagttcattctccatgcagtggtcagaattatctttataaaatatcagccaggtgtgatggctcatgcctgtaatctccgcattttaggaggctgaggcgggaggattacttgagcccaggagttcaagactagcccaggcaaaatactgggaccccatctctacaaaagatagaagaaaaaatagctgggcatgttggtacacacctgtggtcctagctgcttaggaggctgaggtggaaggaacacttgaactcaagaggtcgaggctgcagtgagctgtgattgcaccactgcactccagccaaggtgacagagtgagatcctgtctcaaaaaaaaaaactaaaaaataaaacacaaatctgattatatcatattgctgcttaaaacctggccctggcttgccattgctatggggataaagaccaaaaacccttggtctggcctgtaaggcctgtctgcctgactcctgcctgcctcatttcacaccagattcccctgttctttctgcatccctcttaccttttacataagggagttgatcatggaatactcttccttttagaatcttcgtacatgtgttctctctgcatgagatgcatctaactgcccttcctcctacatgccaacattcacattgattttttgaaagtcaacctgaatgttgcttactcagaatatcttcctcacatacgtcacaaagtcagaaccccagattatgggtcatctttgtactcttaactttcccagtaaagcatttatacctatagtgattaaatgattaattttgtggtctataccatatgtttcctttgatagaatataagctctgtgaacccaggaatgttgtcttagccatgagtagattcatagtgttttgtacaagttaaacatcaggaggaaatacacacatattgacacacaccgttctaatgagagaatgggagaaattcctacgtaagaaagaagcatgttttggtagtttttcctggcatcgttaagtatattattgttttgcttctttttttttttttttttttttttttgagacggggtctgactctctcgccaggctggaatgcagtggcgcgatctcggctcactgcaacctccaccccccgagttcaagcaattctcctgcctcagcctcccgagtagctgagattataggtgcctgccactgtgtccagcttatttttgtatttttagtggagatggggtttcaccatcttggccaggctggtcttgaactcttaacgtcgtgatccacccgccttggcctcccaaagtgctgggattagaggcgtgagccaccttgcctggcctttgttttgcttcttagccttcatagtgtttctcagtggaggctatacttgtttatccacagattttatatatgttaaatacatgaggtatttatacaggattattttaaagtcattgaatgggattcttatgatgacagtaaatcaactctttgcttatatttatgtaactatttgaagtctctggctttctctaaatgaattacaatacaggtcagcaaatattttctctagtgggccagatagtaaatattttagactttgcagccatattgtctcttttagcactcttcgattctgccattgtggcacaaaagcagttatagaaaatatgtagatagatgggtgtgtctcttccaataacatgttatttatgggcaccaaaatttgaattttatataattttcatgtgtcaagaaatactgtttgtctcttgttttccccaccaccccgccaacatttgaaattgtagaaacttaccttgtgggcagtacaaaatcaggtatatggccccaggattgtagttgttgacccttgtctataaccacctctgtacttaagtattctgtcatttatgtgattaaaatagaagacaaaagaaggtgaccccttttttgtgcaaaacaatgtgcctatgtaaagaaaaatgaattttgaattgtgcaaagaagtattaaagaacaaatttagattctgttgcctgtttacttaataggtaaacattatgtttttaaaaaatgaattcctccagtatgtgggcctaagcttaccatgatctcttgaggtcaatactttaaatttagtatataaatctttgagtaggttctaaaggagaatttataaagaatttttctcaaacactatcaggaatctaatatcttgccctcccttaaactcttttcactctagtttataagtgagaaacactttattttttttccttgtaccaatcagaaccttgattttgaaaaatttgacaggggagtttaccatttacataattgatgagctgttgcaacagtgtgcgaagacttgctaaatgaccctgaccttttaactctgacttccttagcatctttattgagttattttatattttggtagtgattgcctttccagaatgattttataagttttcattcccaccaatagtgaaagtgactaaaatgcagtggctttgaaattccttaaatatattcttaactgtctagcttaatttcttcatatgtatcaaaatgcatacagcattggatgtgatgttttgtgtcacagtacttggtatgtttcctgatttttctgacttattgattagtaaaatagttcatcattattttttctttgggaagataaggaactcctttgttatagactgtttgtttgtttgtttgtttgtttgcttgttttcgagacggagccttgctcttgttgcctaggctggagtgcagtggcgcgacctcggctcactgcaacctccacctcctgggttcaagcaattctcctgcctcagcctcccgaatagctggaattaacaggcacctgccaccactcctggctaatttttgtatttttggtagagacggggtttcatcatgttggccaggctgatctcgaactcttgacctctggtgatctgtctgccttggcctcccagagtgctgggattacaggcatgagccacaacacctggcctggttgagttacttctttaggagagaagagatgaaattggaggttaaactacaatttgacaagattatcctaaattaaaactaattctgaacaagactaaagtattgaattctggcggggcgcagtggcttacgtctgtaatcccagcactttgggatgtcaaggtaggcggatcacaaggtcaggagatcaagaccaccctggctaacatggtgaaaccctgtctctactaaaatacaaaaaattagtttgggtgtggtggcgcacacctgtagccccagctactcaggaggctgaggcaggggaatcacttgaacctgggaggcagaggtttcagtaagccaaggttgtgccactgcactcctgcctggtgacagagcaagactccgtctcaaaaaaaaaaaaaaaaaaagtgttgaattatatgttaatacgttatgattttattagtactgttggaggcttataaaatgataaagttgaaggagactgtaggatctttagttctacatttcatagctgtgagacctgagaagtactttcccagcatttgtggctatatacctatgtactggatacttggatttcaaattgtaacttaacaaacatattatctcactcctttcttacgactctttatacatagattctttctaggactttgttattttaaaatgtccatcttttatatgattgaaggtattttagatggaaaaatcattgactctagtagccttttactgtcttaaacatcttactttttctttgaatgtcatttttgtgacctacttttagcacttaccctgcccccccctttttatttggttattaatttcccaggcaattggagtagttaatatttttttccttttaggtaaatgatacaatttacaaatctttttttcctgggaaatgtggttaactgcttaatgaatgctaaataacatggagtgtttcctttgttccagatctcttttcagcctatagaactgaaaaatcggtatttttagttttagctgtgaacctttctattgaatttcagtaaggcatttttttcccactgaaactaaggattcagagtaattacagcagtgctattttctttatttgtccccgtgaaaacagtaactctccatttttttatatagaaatataattttagtagtcttcatttagaattgtggaatatgaacattttcttggtctaatgaataggtgaaatgatagcattttccctatttctgtctattattctatataagccttatatagtcaaatataaatttcatgttgtacattctgaaaagcatagttacttaaatgatatctatcatcctaaattgtatgtgtccatttcattttatattcccattttaagtgacacttactgacttgaaaatattttttatcaactctcactttttaagtgtctctgtttgcccacactcacccacatcttaatctccccatccctactccccagaaaaaaaaaaagtaaaaagaaaaatagaattgtgcagggagctctactctgatagcactgatagaattcgttgtaggatattatagataccaaaaaaattgaccttagatctccgaggagagacactgctttgtttcgtggcttgtgtaacctcaaatcctgaatgaatacctgcctagaatgtgatgtagaatgaatgttcatgtcctctcttgtgtaattctgttccctctaagttgagcaatagctgtgatttttctcaacctatcctgcttggattttgatggccatttttcattctaatacaatgcctgagtgaaaatgagtttccttatatctctgaaaaacccaatattttagtcaagatttctgattctgaaaataccatatttgacccagaacctgtagacattttatggtaaaattgctttattacatactttcaaagttgcatttcacctgtatgattacatggataagtagcaggaatcatttttcaatattgttttcttgaatctgtaaccgcttttcagcctcattacattttctgtttgtcctgctttgctaggtaatttatacatgaagttgaccaaatccttcttggtctttgggagggtgttaaattccttctcagatgtgtcgtctattgttaggttgacaagtcggcttgtccttagaaggaacactggggaataaattgtgctaatgattgttgtgctgtcttctcttgctgtggttaatagtaatcatttcttttccttcctctttttctgctgcctctttctttatcttccctgacttcccatgtacttttgaatttattaaattggactatatattttttccttgctttccttttttaattttgtgatctcctgtgctctactgtcttccctacttgcttgggttccatgttgctagtttttatgttcgcacgctcattatcacccttttttgtacttcaaatcccagcagctgcccagccaggtccccgagcacagccctgtggtttatgggactgtggagagcgctcatcttgctgccagcacccctgtcactgcagctagcgaccagaagcaaggtttgtgtatgactgttttcctccctcttatctttagtctcttttttattaattacattgccgtcagcattcaagagtaagagtacagcatccaaggattatttagacacccacctttaaacaaagctttgaggcagaaaattaaagtattctgcctctaggaaactaaagtagggatgattggtaaaattatttcatacatttgtttaatctctcactgttagtatctgtatacagtttaaaggttagctgccttaaactgccctttaaaacaaggtgggaagtggagggagaaatcctagcatatattactttacaagaacaatacagtttagcttatatattcagcatgtccctaggtatcttgctattttaaaaaagaaaaaaagataaaacatttcttcttacaagtttgggcttctatagccacatttggagatggagccaagttccaatcccggctccatcatgcactagttatttggtcttgattgagccactgaccttgtgtgtctcagtttcttcactgatagaatggaataaagacctatgtgcttgacaggattactgtgggaacatgcctatcacaggaaaagtgcttagtaaattatagtcattaatgctgtattaaggaatagtacactaaggtctctgctcctattgaacttgaacatgaaggtgccaaatgtttgttgaaataaatactgtgcctttgggaatataatagaaaacttaaaggaaatctaataccagaaagtgggatatcatagtctttctttcctgcctagttgtattttaacttgacctttgctaaaattgagagagaattctaaacatagttcggggaagcaagtaactttgaccctgctttatgtttcagatttctaaaaatgattggatatcaatatggaagccatgtaccttcttactttcttgaattatttattcctccaaactatttgtttattctatagctctatagttagtatatagattttctaaaaattattctttttttttttttttttttttgagacagagtcttgactcactgcaacctcctcctcctgggctcaagctattctcctgcctcagccgcccgagtagctgggattacaggcatgcaccaccatgcccagctaatttttgtatttttagtatagacggggtttcaccatgttggccaggctgctctcaaattcctgacctcaaatgatctgcctgcctcagcctcccaaagtgctgggattgcaggcctgaggcaccatgcccggactaaaaattatcctttaaaaaatatttaggaatggcccataaaatagatatatttaatattaaaggtttttgggtagactgcaagttagtcaatcacatttataaactttctgaaagatgtacttctaatacatgatttcattgatttttacatcaaacaaagattatgatatgtgtttttagtatagaaatttcattttccccctgagtattgagaagcctgatactcttgaacagacaggtcctatactgtatttgttatataagatagttttaaaccaaaagatagttagtgatccctaatgtggcatgcttcaaaaaactgcactgtcaagaacttctttcagcaacattttgagttaaaggagaactcctgcatgcttcaagcgaattctttaaatagtaaagccatttaccttgcgaaattacagactgtagaccaaatgtggaagtcgacttgctaccttcaatgataaagtcgttttgagtcaaaattcggaatgtttttaatcttagtggagaataattctcagagtatttcccttcaaaacttcattgcactttcgcaaatgtgtaatctttttgctggttagaattatgctaagcatattgaatacttcccatgcaaagaggccttaaaatatatcttctgtgcagactttctctgtagctgtgccaggatttttaaaaaatttatcacatactttgatgatgatagttctgtccttcctgaagacagtattattgcgtttgccattattttgtgaaaaataatgttaaaatttttagattatgagatccctgcattttgtcatatttaggcccagatttccagacaaggaatgcagacttgatttcctctcaggtttttgtttttgttttgcttagtggaaatttgaataacaacatcaacatatctaactggtgtataatataggcttaattggaaagtattcaggttaccttgatgaaaagaaaaacttgtagtattttaagtgcatttcagaggttataactaatgctctggaattactgttatcttccttttagtaccaactattcaccagaaaactaactctctttctttgtttctctgtttctgccttactccctttctctctccctttctctttctttctttctttctcttgctctctcgttctttctttcatctctctctctctcttttttctttcttggctagtcaaacagtaacatttctaatttcttccatagcctgccgatagctaaaatattactgttttcagagttttttttttttaaccaaatttatgtaatgttagaaagggctcactatttttttcagagaaaatggttttttttctttacactgaggatttttttttcttttttcttctattttgagacagggtttcgttctatcacccaggatggagtgcagtgacacgatcatggctcactgcagcctccacctcccaggctcaagcagtcctctcacttcagcctcctgagtagctggagctacaggcatgaaccaccatgaccagctaatttttgtatttctagaggcgaggttttgccatgttgtgtaggctggtctcaaactcctgagctcaagcgacctgcctgctacggcctgccaaggtgctgggattacgggagctacctcagccagccaaggagtttttaaaaatttccttcttcactgtagattccttttgaaattagcatataaaaactgacttttctcaaagattgttatattactcccagaaacaacagtctctacattttgcagattgtttttttctttctcaatagaaatgtctttactgagagtttgtactcagttacacaatctcatgttaactctaaagtctccctcctgcttgattgacttaagtacttctgtttccataagcctcccctttcctccaaaaagttggaagaatgtgggatttgaaatcattctcagacttgagcacttgctacttatatgactttgggcctgtgactgatctctaaaaccctcagtttcctcatatgtaaaataggcaaataatttctaccccaacaatcgtggttgtgagaattaaaagggacaatgtatgtatggtatttgacccagttcctggcacataataagtgcttaacaaatgttagctgccattattaagcttccggtttctcagagtttttgacatgaagagctagaatatttacatgaaggccaaggttccagacaaatctaccattttacatttgtttggcaccttatgaagacatagggaatacttcacattggtttgtagagagaacaactgttgaatgaattaaaatttttgcttggtattgatagtacacagctgaaatgattgctatttactgagtgagaaagaacattaaatccattgtactgaggatatggtatggataattaaaggagttagttggtgccttagtcttaatcttagtgcctgttgaaagcacctagtgtgttcagtgaatggtattctgtttgtaattcaaccattcatagcagtgttgttcatttgggactctgctggcatttaggacctattctttgtcaagtgagactgtacctcaaattgcaggatgctcagcattcctctctctgcttattaaatgacaatagcatcttctcagtcattgagagacttgtgacaaccaaaagacaacccagtcttggtcattgattccaccaccatatgagaataaaagggagcaattttattcttcttataaatttggcactctttatggaaactacagctaagcaaaatgaaaaagtatgtgtctgattactcagagccattattaataagctgactttcccctatgcacatatgttagtactaagcatttttttaagttaccaaattgggttctacatagagttttgtgccccactaaaaacaaacaaacaaacaaacaaattcttgccagatgcagtggctcacgcctgtaatctaagcactttgggaggacgaggcaggaggattgcttacgaggcaggaggattgcttgagctcaagaattcaagaccagctgagtaacatagcgataccctgtctctacaaaaaataaaaatattagccaggtatggtggctcgtacatgtggtctcagatacttgggaggctgaggtaggaggattgcttgagcctgggaggtggaggtcacggtgagctgagatcacaccagtgcactccagcctaggcgacagagcaagactgtgtctcagaaacagaacaaaacatatcttttattacaaacaactttccatatcattaaatactcttttaaaaacatattttaaatattgcatagtatgccattatatgcccagattatcatttctttaataaatctctattgttgaacatttagttgatttccttttttctccttttttcttgtattataaatagtgttgccttaaatattctagacatctatctttgctaaccctttcatgattattagaaaaattcttaaagctggaattcctgcaaattcctaaagatggccaaactttttataatagaagtctttagagggataaaataagtgtttttttttttaatttagctctactgtgtttttagctttctgcattttcagctttctgtattaaagctttaattagtgggttaaaggacttttattttagaatgaagaactcacaatttgttttgttttgttttgttttgtttgagatagagtctcactccactgtatcacccaggctgaagtacagtggtgcgatgacagctccctgcagcctcaacctccagggctcaggtggtcctctcaccttggcctcctgagtacctgggaccacgaatgcacaccaccatgcccagcttgtagaaatgaggtcttgtagtttgagacctcctgggctcaagtgatcctcccccttggcctcccaaagtgctgggatttacaggcatgagctcaccatgcctggcctaagtttttcaatactagatttttctgaagtgtgtatagaagtttatcaatcataggtctacttttgtttgattttttactatcagaaattgtttcccaacattaataattgaattgacatactcttattagatatttaatgtgagaatcaatttctctttttctctctctctctgtccccccaccccgctccccctctctccttctccccacttttcttttccctttttcattttgagacagcgtcttgctctattgcccaggttggagtgcagtggcatgatcacagcttgctgcagcctcgacctcctgggctcaaacgatccttccatcttggcctcccgagtagctgggtctacaggtctgcgccacctcacctggctaatcttttaattttttgtagacaaaaggtctcactatgttgccgaggcttatcgcaaattcctaggctcaagagatcctcccgtctcagcctcctaaagtgctaggattacagatgcgagccatcacaccctgccctatttttaaatttactgcatctaggtttcagtcagtggtcataaagggtgttagtctgataagctttcacagtggtattatgtaatctgggtgacttatttactccagtgagctggaaattattttcatcaaagatattttgataaatacatatttgttatatatggtgtgttccatctagaacgaacatacacacacacacacacacacacacacacacacacacacacacacacacacacacacacacacacacaaaaaaaataaagacaagttttcctgaaatatttttgtctgttgccctgtcaacttagtctgagggatttggcaatgagagcctattgattctatttcatcactgcagtaactaagaaaagtccaattttagaagcaccagcttctgtgcctataaataaaagtatattttaaggctaataagtgtcattacagtgaatgaattaataatatcttaatggtaatatttaatacctatttatctgataaactgcatatttgctttcacataattacaatttattgtaaagactcactttcattgatgtataaaaaattctgttggagaaagtagtctcagtttaggttgtcttttaatagtgcttgaatcttttgttgtcatttgataaacatactcatgagtatatgtttttccatggagcctgtttattgtgctaaggaagcacaaggctggaagccagtctaaatctcctttggtttcctccactcagggatgaatcacatatcaatttacctggaatttattaataaaaatgtggaaattattgttaattattgttccttgtgtttttctggtacccgcattatgatgaccagcttctcttctctctccgtctcattctctctatatatacacagatgcatttttgtatattatatcaaactatttcatactatgaaacactagtattttcatactatatgtatattgttttctttttcattggatttattcgtgtattaactttgttttctccttaattgttttacatgtaaagacacaagatatattttgttttttttgttttgtttagagacaggatcttgttcagttgcccaggctggagtgcagtgatgcattcgtagctcaatgcaacctcaaactcctgggctcaagtgatcctcccacctcagccttttgagtagttgggattacaggcatgtgccaccaagcccagcaatttccatttttataccttacattatttctggttatatacttccattgagaattgaagggtaaattaatttagaaactgatttttatcagttactgagaatagtttgatttcactgatagtaaatttcattaaataaaatgtgatgctttatcttgagtttttatacaagtaatactttttaaaataaaaattatctccccaaatacaaaaatatatagaataaaaaataacatcagtccctttataataatttaatttttaattgtttgcccttgtactgttttgccactgtaatatatccttggaaaaaaagttttttagggaacgagaagtggtagaaatgaaggttttcctaccttaaagaaaagcctcactcttaaaccaagaatggtttagcctcagttttggtgagcttttcagttgtattcttgatatataattttttggtgaatagattccttctcttactccaaaacagactttatgtattggataccaagtaaatagtaggtttaagtaaaaaaagaaaagagacaatgtttttggcataccagaataagtctaatatattggtctctgttctgttacctgtaatttagggtaagacattgaaagaattggcccaaggcaatatgtagtctctgatccaagaattattcttaaaacttatttttttttccccagaggagaagccaaaaccagatccagtgttaaagtctccttccccagtccttaggctagtcctcagtggagagaagaaagaacaagaaggccagacatctgaaactactgcaatagtatccatagcagagcttcctctgcctccatcacctaccactgtttcttctgttgctcgaagtacaattgcagcccccacctcttctgctcttagtagccaaccaatattcaccactgctatagatgacagatgtgaactctcatccccaagagaagacacaattcctatacccagcctcacatcttgcacagaaacatcagaccctttaccaacaaatgaaaatgatgatgatatatgcaagaaaccctgtagtgtagcacctaatgatattccactggtttctagtactaacctaattaatgaaataaatggagttagcgaaaaattatcagccacggagagcattgtggaaatagtaaaacaggaagtattgccattgactcttgaattggagattctcgaaaatcccccagaagaaatgaaactggagtgtatcccagctcccatcaccccttccacagttccttcctttcctccaactcctccaactcctccagcttctcctcctcacactccagtcattgttcctgctgctgccactactgttagttctccgagtgctgccatcacagtccagagagtcctagaggaggacgagagcataagaacttgccttagtgaagatgcaaaagagattcagaacaaaatagaggtagaagcagatgggcaaacagaagagattttggattctcaaaacttaaattcaagaaggagccctgtcccaggtaagccattctgccattaatctcgtgcttgctgaacatgaagaagaggcagtgtttgagttattttttaattggctactttccttgacttccagaaacatcgaatgaatgctgaaattcctagtctggtttcttcagtggtgtgtttgtgttttagtacaacctgcaaaagagttactccattgtctaaaaatgcaaatgagaatttccaaatatacaaaatgcctccaaggtatatgtcacgaaacatgttgggttttgttgttgttgttgttgctattgcctcattcatatgaattggtttctcaatgcttaattttgctgctttggggctagaaaacaaaaaaccaggatggtctatagtccctaattctgtcttcctagaattttaaaacccagtcaatcctaaaggaactcttctatgcatgaccagtttttaaatcttggatgtaggaagatagcaatcagaacatcaaaggtttataactatttttgaaaatataatgctgttgttgattcacttgcaggtaagcttaacgttctctcactttgccttttgaaacagttttattttttgtgtacatttttacatggtcattaatatccttggagtattatattcttcccagttcaaattatttctttttaatgtagcatcacctgggaccttaggaactaaccattgggttattgtaagtttaatcaaaagttatctgaggcttatcagctattctaggataagttagcccataggaatattgaagttttggctttgaacaattcagcacagcctatcttctgcaacattgccctatgctatataatttcctttctctgtgcctgtcagattaagtaatgcgtatgtaaattgggctttttgataaatgagtgctcctccagcagttgatccttgacatgcagtgaataggttttggtcaccatcatcctcagtatttttgtctattttgaggtgtataataaggaaatttgacaaacccaaaagctgatccctacttttgagatgtggcttttctacccagctcagttcttgagacaatttcctcatcagtgtctgtaagaggtgtctggccttttggaactgcagaacatcttgtagaacaccatgagccagcacaggaaagaaaacaatgcaaggcaattggaacagtgagaaatttttcataaatctttgtaaattacctgtttcctcaactatctggcttccattgacatcagtattcatagtgccatcactgttttaggaaacttgttccttggtggagagatgaccttagaccttgttttgtcagttaccctttagaaaaacagccttggggccgggtgcagtggctcatgcctgtaatccctgcactttgggaggccgaggtaggtggattgcctgagctcaggagttcgagaccagccttggcaacacagtgaaaccccatctccactgacatacaaaaaaaatagccaggcatggcagtgtgggcctgtagtcccagctactcgggaggctgaggcaggagaattgcttgaacctgggaggcagaggttgcagtgagccaagatcgtgccgccacactccagcctgggcaacagatcgagactccatctcaaaaaaaaaaaaaaaaaaaaaaaaactaaacaacttggtgttggtgtggctgtaggtaaatgccctccgaagaaacacgtgtttgttggagaacagtaatttgtttgacacttcaatgttcattttcatttgtagtgatacgatagttacaaaaatgagagaaactaatgaacaaaaatgtttttaaaatgtaaaagcaaagaaaaacaaaacaatcataggaaatataagttgaagatacaaaccatacctcagaattgaaataagtgtaaagtgaaaagaccatgcatcaaaatcatacttcactcatttctgacatatattctttttttaaacatcagtttgccacttagatgacctgatattgcaagacagtgcccagggatggatgggcaaacagaattttggtttaaataatgttcataccatggtacatttgtttgaaatgcagatgctctcaatattagtattgtgaacaccagcaccttaatcaaagagtatagactcttcagtggtaatccagagagcacttagaaaagaaagaactgtttttttaatgacttggaataacagaggtttgtgatgttgggaggtaaagtttcttggcatttttctagtctcctgattttttaacctatgtgtttaagggaattacaagttttataatttccttgtacatcttaatagtcttcaaaatccaacagtaaatgaacttcaagaacccctgcaactctagctttttttttttttttttttaattttttttaagatggagtctcgctccatcgcccgggctggagtgcagtggtgcaatctcggctcactgcaacctctggctcccaggttcaagcaattctcctgcctcagcctcctgagtagctgggattataggcgtgtgccaccacgcctggcttatttttgtatttttagtagagacggggtttcaccttgttggtcaggctggtctcgaactactgaccttgtgatccgcccgcctcagcctcccaaagtgctgggattacaggcatgagccaccacacctggccagcagtttgtaaattataaagcctcagaagcatttctgacccattcatttctgtccgaatattttttaatggttttgtcacaaaagttaacaatgaaaattaaaattacctccagtctttaagtatatccacctgacgtggtcatatgcttaatgactataatttatttgcacttattcacataatattcacttattataccttgtttactttgagaagttagtaaatcataacagccgtttactttgagaagttaataaattgtaacaccaaaacagtctggtttgcctatgagtcttttggtggtgacttttgagaatagtttttacttgtctctgcctgaggatgaaacacctcaaagctggcttcagaaacctgatacataaataacatatcagttggtatagagatagttggttaaagcagtaaagttataacataagggatatggtatcttttagttctgctgcaaaacattttcttgtaactattctagatcatatttctgagtgaataaaaatgcatcagttgaggccgggcgcggtggctcatgcctgtaatcccagcactttgggaggctgaggagggtggatcacctgaggtcacgagtttgggaccagcctggccaacatggtgaaaccccgtatctactaaaaatacaaaaattacccaggagtggtgatgcgcctgtaatcccagctattctggaggctgaggtgggagaattgcttgaacttgggagatggaggctgcagtgatccaacatcgcgccacttcactccagcctaggcaactgagcaagaccccatcttaaaaaaaaaaagaaagcatcagttgttttcggattgaagaacaagctctgtaaaattagaatttggtgtgtatatatcttcagtgtactctgaaaagcctcagttattggccacacttttaatatcaccgtcactttagtaattaaatgcataaaactagatattaattggatgatatattaaagtcttgggaatttttattgtttattctctgtatctggtgggaggaaaaaggagtgttttgaacttgtgggaaagcattccccattaatcatccaggagtttgttttctacaattttaggaatgtatatgatgtatagtatgtaacattaactttcccactttttaaaagaattgtgacttttttattttattatttttacctgtatcagatataaaaccattatttaaattttcttaggcagagggagatttctaatttttctatttattttgtttttttggctcttgcttatagtacatttttaatgtatattttgtaagtttgttttatgaacttatccagataaattttcctggatgtagattgatggcaagttattctaaagcagatttgtgtttactttatctgctgcatgtcttggggaaagcatttgctggaactaaatctgggtttaatgtttgttagaactaaatctgggtttaatgtcctaaagctacagttctatcccaaagcctaaggacagccataccgtatggcttggatactaattttcagggtaacagcaatcttctctccatccagttgaaacaacgtcctttctcatcatcactgtgttggttcagtggtttattccctctctctcttttttaagctatcttttcactgagcatgtcacccatttgggagtctcagagctttatgtgagcatctcagttccaggttcccactttgcagggatccaagatctctcttttcttatgggtgttaaaaatacaaattcattggttatagagactggcacacccttctacacccccaggaatgtaaggatggcatcagccactgacctgtagtttaccttatattctcgtaagctcagctaaggatgtagaagggtttccagattctgtagaatataacataggaagtttatttctcaaatggagatacgattatatgttttggtaatgttaacaaaatactgatccatgtagccaatcaagttgctgctttctcttttagtttagacttactgaagtgtaaagggagcatacttcagtgcaagaaaaatattttaataacaacccttgctttattctcaactgtgagagtattcagagtactttcaaagaaataaacatagcaaacataaaaccagagatataaaagtctatcagttttcctagattaaactaaaaatgactaatcttttaaataataaaatttattctaacctttgctcaacttacatattctaaaatatatttgaaatatctctggaagatttagtcgctggggccaaaagtagattgccaatggtttgagtatcctgttggcctaatcactatactactatgcatccttataatttagcttctacagaaacgtgttctggaaacatggaaacaggactccttacacattcctggttctttgtcatctaccaaaacaagcagagtgatccttaaagcaaggaccattggcttcagttttcagaggcttgagtctgagtgatccttagggataaataaaggttttctccaccttgtttgtaaactgtttccaacaaagctgcctaaaaggtatgtttctgccatcccattcctattttcttgtttccctccccagtaaactcttaggcattccttggaaaatactgatgctggtcaaattcttttatatactgcagaatgagcccagacacctgttagttgagcctgttggcaagtcccttacgtagttcttccttgcctctttatgtgggatagatttccccattttttacagtagttcatgtctttcatcatgagccctaaagtctcagtcattgggtattaacttagttctacatctttctgagtagttatactttgttcaaaatgtagctcccttttccccacatttagtaactaatcctcctccatgacaaaggactattgtactgacctgcttccagagaaggtaattcagtcagcctagagctgtgctccctcagtcttttaaagaaaacctctacaggaaaacctagtcttactataagttttccctttctctaatatccatcattaccttgcacacagttgccttgagaacttttcctgattgccttggaaaagataactttccatgttcctaacacaaagaaatgataaacacttgaggtgatggataccccaataaccctgatttggtcattacacattatgtgcttttatcaaaatatcacatgtaccccacaaatacgtatgactattatgtatccttaaaaatttagaattaaaaaataaaagcacaagtatgccaaaataaggaagataagtttagtaagactttattaagaaaaaagataattctctctactaatgcataaaaatgcccaaaatacatttccttcaatatatttcttttcttcattttctattactgtattaaaatacttggtaatttagtcacaatcataataaaaattattgtacatttttctgtttccaaaggctttcccaggcatttcaagcattattcttgtgatttgaacagttattcctggatatagttatttctgttttgctgatgacaaaaataagcctcagaatggtaaatcagctttctcaggctcacaggagaattacagccccttcctttatacgtcatgtttctattaatctttcagagatggtatgtcaatacaaaattacctcaggatttgacagttatactttatgcttgtgacctaggttcatagtgaaacatgaaagcccacctgtttgaaccacagtagttactgaaggcctactgcgtgtcagtcattgttccatgcacttgagatttatgaatgagtaatacaaagatccctgccctagtgatgtattaggaagttttaagtgctgtaaaaataataaaacagggtgaggaatgcaaaggggcagcaggttgtagtatttaaataatatgatcagagtcataggcctcagtaggaggtaagatttgagcaaagacgagggggattatttgagctaccctgtacaaaatctgtgattttcctctttttccttttgaaaaacatacctatcaaaacccttgaatcagtactataactcctactttgtctattaaactccagtaggcagagcactactggagaagatcacaccacttacagtggtgtgaatgcaactacaaattcacactgtccatcccaaccattatttttatggtttttctgttgaaaatcctttactctgcccagtgctactcacctgcagcacatgacctcgtctccttctttattgagaacattgaggacactgggtacgccttttttttaactttctgcccccttacaaacctggctatattgaaaccttcatcagactctcttagttgtctcttacagtctcgtatgtattcactgcctctctaccaccttcttattgtctgtctcatgccagagacgctctctgagtcccatataaccatttagctgccacttaaatggtatctttttcttctgacccaaactgtttaagaatagtctaccatgtcttctactattcttttcactattcaactaacatatagtctgatttatgctcctaatatgctagtggaatcttcctcagcagggtcatcagtagacacacatttatcttcctagtctttttgcctcattttaccactattggtctctttctctctctcttttaagttaggtcgagtgtaatttatatgcagtaaaattcacccttgttagctagcattcatttctgtgagttttgactagcacagaaagccatgtaatcacaccagtcaaaatataaaacagttccatcagctgggcgtagtggctcatgcctgtaatccccacattttgggaggccaaagtaggatttccaaatttttatctctgtcccaactcctcctctaaacttcaatcttaaatttccaattatctgacaaatatctccacttgcagagtcatctcaaattcagtacatccaatactaaaccagtcacctattcctctaaacctattctttcatctcaggttatacactggctttaattaaactaaaaccctgaagccactgttgacgaacctcccttttgagtccccttttttcccatccagtcatttcacaaggtgccctgtttttgtttttgtttttccccccacaagatagagtctcactctgttgcccaggctggagtgcggtggtgtgatctcagctcactgcaaccttccgcctcccaggttcaagtgattctcctccctcagccccctgagtagctgggattacaggtgcgcaccaccacgcccggataatttttgtatttttagtagagacaggatttcaccatgtttgtcaggctgatctcaaactcctgaccttgtgatccacccggctcagcctcccaaagtgctgggattacaggtgtgagccaccacgcctggccggtgccctggttttatctaatgtatttgtgacatttgttccctcctctccatttccttcttcccctgccttatccctgcacttaggtgtggatgcttgtcatttccttggtcccagttttgcccccacttgaaattgttctccaccaagtggccgaaatcatcttttaaaaatacagatctagctttgtcactcctctttcacgtctttttaagctcttcaggatgctgtgaaggattgggggaaatatcctgcaagatgaactctaaacttctcaagttttaccaccaggtcttctggtatccatatcctctcatacctctgcatcgtcagctacagtaatccaccagtgttctagaagcctggagattatttcaaaagcgccatatagtaggagtcttctgagtatacgggcatacctcattttattgcacttctctttattgtgctttcactgatacggttttttttacaaattgaaggtttgtggtaactctgtgttgagaaagcctgttaatgccattttccaacagcatgtgctcacttcctgtctctgtcacattttgataattctcacagtatttcagacctttcattattataggtgttatagtgatctgtgatcagtgatctttgatgttactgttgtaattgttttggggcaccacaaaccatgtaagacggccaacttgatcgagaaatatgtatgttctgactgctccaccaaccggcagttcttccatctctctccctccctcttcttgggccttcttatttcctgagatacaacaatattgaaattagggtattaataaccctgcagtgacttctaagtgttcaagtgaaaggaagagtcatacgtctcccgcttgaaattaaaagctagaaatgattaagcttagtgaggaatatgtatcgaaagctgagacagagtgaaagctaggccccttgagacagtaaagttgtgaatgcaaaggaaaagttcttgaaggaagtttaaagtgctactccagtgatcacacaaatgatacaaaagcaaaacagcctttttgctgacatggagaaagtttcagtggtctggatagatcaaaccagccacaacattcccttaagtcaaagcctcatccaaaacagtgccctaagtctcttcagttctgtgaagactgagtgaggtgaggaagctgcagaagaaaagtttgaagctagcagagcttggctcatgagattgaggaaagatgtcatcataacgtaaaagtgcaaggtagaagcagcaagtggtgatagagaagccacaggaagttatccagatgatctagctaagataattgatgatagtggctaccctaaattacacattttcaatatttgttgaaaaccaacagatactgatattgtagatgaaaccgccttatgttagaagaaaccatctacctactttctttttttttttttaagacagagtcttgctctgtctccagcctggagtgcagtggcaccatcttggctcactgcaacctccgcctcccgggttcaagcgattcttctgcctcagcctcctgagtagctggaactacagatgtgcatcaccacacccagctaatttttgtatttttagtagagacagggtttcaccatgttggccaggatggtctcaatctcttgaccgcatgatctgcccaccttggcctcccaaaatgctgggattataggagtgagccactgcgcctggccccatccagcactttcacagtgaaagagaaggggagaagtcaatacctggcattaaagctacaaaagacaggctgactctcattaggggcttatgcagccggtgacttctgtttgaagccagtgctcatttaccatatggaaagtcctaaggcccttaagaattctgctaaatctattcttcctatgctctataaatggagccacaaagcctggatgatgacacatctgtttgcagtgtggcttaccgactcttataagcctactgtagagacctactgcccagatagcaagattcctttcaaaatactactgcacattggcaacacacctagtaacctgagatcaaagagtaattttgactttcaagccttgttatttaataagtacattttgtatgtctatagctgccatagatagtgattcctgtgatggatctgggcaaactaaaaacctcctggaaatctgatttgttcgtggcatttgttccttcctcttcatttccttcttctgccttagttagccctgcacttatgtgtggatgcttgtcatttccctggctccagttttgcccctacttcaaatttattctccaccaaatagccaaaataatttcagcattctagatgccattaaaaacatttgtgggtgcagtggcgcacgcctgtagtcccagctactcaagaggctgaagtgggatgatcatttgagctcagaacttcaaagttcatctgcacaaaagaggagacacctcagcaagattcctgtctcttaaaaaaaaaattgtaattcatgggacaaggaggttaatatatcaacattaataagcatttggaagaagttgattctaaccttcatggacaactttgaggggctcaagacttcagtagaagaagtaagtgcagatgtgatggaaatagcaaaataactagaattagaagtggagcctggctaggcatggtggcatgtgcctataatctcagcatttgggaggctgaggcaggaggattgcttgaggccaggagcttgagactagcctgggcaacatagtgagaccccatctctaagaaaacaaaaacatagaactaaagcctgaaaatgtgactcagttactgcaatctcatgataaaacttgaatggataaggagttgcttcttcatgggtaagcaaagaaaatggtttcttgagttggaatctattcctgttgaggatactgtgaacattatagacatgacaacaaaggatttagaatgttacataaacttagttgataaaacagcggaagggtatgagaggattgggtaaaatgctatcaaatagtatcacatgatacagagaaatcattcatgaaaggagcagtcaagtgttggagcaaacttcattgttgtcttattttaagaaattgccacagccactctcatgcctcagcaaccaccatcctgatgagggcagcagccatcatcatcaaggtaagaacctccaccaacaaaaagattacaccttgctgagggctgagatgatcattagtattttttagcaataaagtattatttaattcagataatatgcattatttttagacataatgctatttcacacttaatagactacagtttagtagaaacataacttttatacgcactgggaaaccaaaaatttgtgactcgctttattgcaatattaacttcattgccatgatctggaaacaaacccacaatatcttcaaagtatgcctgtgcctacacaggcataggatctgaatgtagtttttcatgtatttgattaaacactggcagtaaaatttagtggtaagatcaaagcaacagcatcaaacactcctgagtcttaccctttttccttgtctatctctgtgaccatgggtgaatttcctaacctctttgagtctgtttctcatctagaaaaatgaagataataatagtatttacattatagaattgtaaagataaaatgtgatgtatgtaaagtacttagcacaacatctgacacatattaagcactctgaatgttaaataatattgataattctattttcagcttgtattaagagcccaaatgttccctttgaactctgctaatacacagaagagttggatatcatgatctttgccctgaggaatttatcttccaaagaaaggaagctcaaggagttgataccttctgaaatgtttttaataaaatctgggacatgagatggtggaaaatcccttaggataggccgtttgcatgtataatgttgattaaaagtttttgtacccattatgtcatttatcttcacagtagacacatctcaaggtgacctctgctgtgattggtaaaggagaaggcctccttagaacagtgaaggaaaatctgtagttgagttgaggatggtaataccatcattaacttcctgctttggcaggagtggaaaattaggaagaaaggcaaagaaagctcagaagaatgggggggaaaatgaatagggcagccataaagtggtaacaacccaaatcagtttatcaactgatgcatgaataaacaaaatgtgatatatacataccatgaaatatcggaccatgataaggaatgaaattcacatggtgtacaatggatgaaccttaaaaacattacgctaagtgaaaaaagtcacaaaagaccacattttatatgattccatttgtatgaaatgtcaggaataggcaaatccatagaagcagaaaataaattagtgctcaccaggggttggggagagaagagagtggggagacggtgctaatacataccgagcttctttctggggtgatgaaaatattctaaagttatatagtggtagtggtcacacaactgtggttataccacagaccattaaattgtatagttttaaaaggttaattttatgatacgtaaattatatgtcaacaaatattacatatatattttaaaaagaggggcctggcgtggtggctcacatctgtaatcccagcactttgggaggccgaggggcggatcacgaggtcaggagatcaagaccatcctggccaacatggtgaaacctgtctctactaaaaatagaaaaaaatagccaggcatggtggtgcacgcctatagtcccagctactcaggaggctgagacaggagaatctcttgaactcggaaggcggaggttgcagtgagccgagatcacaccactgcactccagcttggacaacagagtgagactgtctcaaataaaagaaaaatgagtatgatatggtggtgccaccagcatctatataaggatttgcttagggaagttatagcttagaaattgaggaagtaaatttcaacaagaacaccacaattgacagtatcggagatacaggagtatttgtgtacagccaaaaattatatcatcttttgacacatgctattgttgtataaataaatttatacaacaattacttatatagtgtatacataaaaactgtattgtttttattctgtcttattactttactactagttaaattttacctcagtttgagagggtgttctcagcttggtattgaatgtaccacctgtagagttcaagaccagcctgggcaacatatggagacctttcgtccctacaaaaaaataaaaaattagccaagcatggtggtgtgtgcttgtagtcccagctactctggagactgagatgggaggattgcttgagcctttgagattgaggccgcactgagccatgttcacaccactgctctccagcctgggtgacagagtaagaccctgtcaaaaaaacaaaacaaaaaacacctgtagcaatcattctagaggcattgctcgatgtcacagatatgaaatatccagttgggccggcaaagcagagtggttcttcatgatcagaacataagggatctgtgttttggaagtagtgattctgctgtttctttgtttgtaacttggtcccttatgtttttggcccagttcagccaccctctgtaactcttccttcaactctcctacctgagacccttctggatctgtctcttctttccagctatctaaccattcatttattcacccatctgttcaatccccatttcttttcactccatttcacagactgtcattatcttacacctcagctattacaactctgctttcagacttctctggaaaagtaaagtgcacattttccagaaaattctttcagagaaaatattgctgctggatgccagatatctgtctaagacctgtagaaatagtcgtttcaagggtacaagatccaggctcccagattagccttgaaactatcattatttcatcctagctttgcttaatattattttttaatctttttgcaaatctcccacacctgtttgatgagtgttaattcctgcattgtttccttgatgctgtcttcaacctagaccacattaaggaacctgctcaattcagttagctgggtgtggtgcctggcacctgtaatcccagctactcaggaggctgaggcaggagaattgcttgaacccaggaggcggatgttgcagtcagccgcaattgcaccagtgcactccagcctgggcaacagtgagactccacctcaaaaaaaaaaaaaaaaagtatttttttcaatttttcaatatgactctattcacaaggttttctattctgataattcctcgaacccttaaacatataattatgtcaatttaaaatactcgtagtactttatgcatattgatatgtgtacattttacctctccaacttcttttacatctccaggattagtaaagcttttatttttctgttatccccgagagcttttattaaatgtttatttactcatttctgcaaatgtatagatttgtgttgtttttgttgggtttttgttttgtcttgttttttagggatctgatagtaacaaatcaggtatatttaaaatcaccaccctggtaagaaaaaattgtagtttttttttttttttcttttcttttttctgagacagggtcttgctctgtcacccagactagagtgcagtggcataaacatggctcactgcagagttgacctcctggtctcagtcttcccacctcagccacctgagtagctggaaccacagatgcgtgacaccacacccagctaactttttgtagagatagagtctcgccatattgcccagctggtctttaactcctggcctcaagcagtcctcctgccttggccttccaaagtgctggggttacaggcatgagctaccatgcctggcctgttgattttaataatagtagctatcattgattaaatgcttgctatttattagacactgtggtcagttctttaaccctcacaacaactcttatccttactttacagaagaggagaatgaggcatggaggagatgatacttgctgaaggttatatagttaataagtggtagaatcagaattcaaatttcaactctacaatttatactcatagccacgtctttataatattgcctctcaaattaagctacatatcctgtaaataaatcttagacttcagcattcaaaagttaaaatcatttaaaatagttcttactaaaataagatatttttatatgaaagatgaatatatacataaagctacagctggataaacaggtagatgataacaagggatacaaagtcaaatgtgctcaccctgaataattaggaaaagcaaaaagcacagaatgtatctttcccagttcattagttaatacctctctccaagtttctgccaattccagaattcatgcatgtaacctcggaatcaccttaatacttaatgcagtgtttaagaaataaaagtaggctggctgctgtggctcacacgtataatcccagcactttgcaaggctgaggtgagaagatcacttgaggcccagagttcatgatcagccttggcaacagagagaccctttctctacaaaaaatttaaacattagccaggcttggtggcgcatgcctgtagtcgcagatactcaggaatctgggacagaaagattgcttgagcccaggagttcgaggctgcagtgaggtatgatggtgtcaccacactccaacttgggcagcatagcaagaccctgttgctaaaacgtatagaaataaaaatagaagtcattatttatgtgatagcattcaatgagatgattaatagcatccaaaaactattagggcttttgtaacataataccgttattaatagttgtcattcattcaacaggtatttattgagtcccagactgtcataatttatattagtttttaacagaattcaaataagatttgagtgatatttgaaatatttaaatcagtatacctgatcatgtagggaaaacctccctttgacatgatattatacactgatgttccataaattgtataaatcatgaataacccctaaaacatggcttttctgtatatcttacaaatgagttttactctaattttaaagccataccaaggtgtaaaacagtacgtatagtataaataaaggagaaacctgtatgcacattcacatgtataatgcacacatatatgtgcttgcatatacaccagtattttctgaggataagtaggaaatacttaataatgattttctctggggagagagacctaagagcaagatggggaagacaagactttttcagtttttcctcgtttgttgtgaaatctttttgttcatatgaattacttttgtcataattaaagccagaagcaagtttaattataaattttgcagtaatatgtgtcttaggtctcattcaaataataattttcgggtgggtgaggtggttcacacctgtaatcccagcactttgggaggccaaggtgggcagatcacctgaggtcaggagttcgagaccagcctggccaacatggtgaaaccccatctctactaaaaatatagaagttagccaggtgtggtagtgcacgtagttccagctacgcgggagactaaggcaggagaattgcttgaactggggaggctgagttggcagtaagccgacatcgtgccactgcatgcactccagcctgggcgaccagagtgagactccatctcaaaaaacaaaacaaaaagaacaattctctcatgatttatctgatatatgtgaaacatagattgtcaaatttcgaaaggtacctaccagtctgttttgaatgatttctaatattcctcaagatttgcagtgcctcacttcttattaatatcagttattcttcagtaatataaatgcggagaacagaaatatttcttaagaatttattttttgtatttctgataccatttgtatcatgatgttttcattagagtgcagaaaaattccagtttttttggatataagatttagtattcagttcaacaaacatatcagcagataaagttggaataaatagatgctgacagttctttaaatttcaataacagactctagatcttctctaaaatgtcatgttaaaatgagttataaattagaatacccttttgactgcctattctccatattttgggacacattagagaagatattcaaactggaaactgtcatggaaaaccaagaaatatgaatgacttaaccatgagtttttatgatgtgccaaaagagatgtgataaatccatgcttcactatgtttggtacaaaatccagaattaaattggttaatagattgatttcatttgttctggcaatgctaatttatatctaccatgtgacaggcccttttctgacctctagcaccacagagatgaatgaggcaaagtctttttccactgagaacttgataattttgtagagagacagataaatatatatatatatatatatatatagggatgggtaaggtgaagagaggagggaggaagtgatggtccctgttagagtgtattttttattattcatagtagctcccacatattaaggttaaagcaaatttctctgtgctttgcagtctggtaatgtagactcactgatggtcagatggaaagtagattttttttttccatctagagttatatattcgaggcagtgagctgtagcattttatttggagatgaaaagtgttgagtaggtgtaagggtaactgtattatagtctctttcctaattaaattacatatttgtgctgtagtgattgacttttttgcatctgtactagatttaccttgaattaaattgcagtcttttttgatgatggtagaagtggttcaaaagtgtcttattaaaatgcaaaagtgcctaaaacacagagcagtaaaaacagaggcctagaagatatgccagtggtctcattggagtcatctttgttctcagtgtcgacaattgcttaatggactgtcctccactgaactttttggagcaaacctacttagtgtcactttgccattttatttttttaatgacatactgtgctgttggggcaacaaactgcacatcctgtcatgctacaaaagcaaaagacaactttaaccaagataaaaatgaagctggaattcaggcaagaaagtgaaggataaggcagacttgagaggtggggtattgagtggggaagcgttttgaagttagatctgtgtttcagttctagccccaacctttactctctgtaaaggggaaacttataatctctctgttcttcagtttcctcatctctgaaatgggaatactgtaatactacctacacaaagagatttaaccagtattgttgttctagagagacattaaccttgggtttaattttgattgcaggtcatttattcattaacagatttgccaggcactgtattggttgctgggtagattgaagagaccaacaaaatacaatccttatcctcaaagaactcaaaccctaataattattcttagcttgtatccaagtctttgattgtgtagagtagcaagggtgcacactaagtgggttggtaaaaatgttgaaactgtagagcagtaaatgggcctgatgttgaccaaaaggtaaaagccagatttctaactttgctgtgtatcagaaaccagagaagcacatgttcttaaataggtagaccttgaatgctggacgtggtggctcatgcctgtaatcccagtactttgggaggcccaggcgggcggattatctgaggttgggagtttgagaccagcctgaccaacatggagaaaccccatctctactaaaaatacaaaatcaaccgggcgtggtggtgcatgcctgtaatcccagctacttgggaggctgaggcaggagaatcgcatgaacccgggaggcagaggtggcggagatcacgccactgtactccagcctgggcaacaagagcaaaactccttttcaaaaaaaaaagagatagactttgaagctagtagtagaatcattctcatgcaagtgaatttacgtcaaaatttttggatttaagtggcactttgataagtatttgagataccaaaaattagagttcagtcaagagaaattgatgtttgaaacaagatagagaggtcttcagattctaagaagttatgttcgatatggaaataggaaaagcaggacttggagactgatacgaatataggcctaagagaacttttcaaaaagagtttgtatcagacaataccaataccaaatgctgcaaaaatacttgagtgtaatggtgaattgaaaggatgttgaatttgtgataattttgtcatttactactctgagacaaattccatcacctaagcagatataagcaccaaagatttggagaaagaatagtgaaatcaagaaaataaagatacaggtatgtccatggcagggcagaagcctggggatgtcaaaatacacactggacctgctgaagcatgatgagaaaagcagaagcaggtgcacgttttcttctactttccatgccactttggaaaagagtccaaacatttagctaagcgggggcttttaggctgcatacttaagtaagcattatctcctcacctggcaatatcagaagctggagtataatgacaaaaaattgaattcaacagtattcttccagtttagcatatatggctgtggaatcaccagctcagatcttggtataatttgagggtctggtatctagtccctggtacagatgtctcacattgcaatcctgtgacataatccatgaccttaaaatcatggtttggaatccaacagctgttctttcggaatggtcaaggactgaggtcagtttatataatgaggcacactgttggttaagctgatacaccgcttcaacactgcattcagattaatggtttctattgagccacttcttttctctttgcctaaccttgcatcaatagcacaattaccttcgttactttagttttataatatcctaatattacaagcccactacctttaaattctacatcaaaattgtattggcttttcttggcttttgctttttcatttccaaataacaacatatggaattgttctctgcacaaaataggtatttgatcaacggaaaaattagaagattttttttctttatgcatatggtatatttagggtttcatatagattaacaattttcttataaatgtttacatcacataattcttagaattttcaaacacacccaaatataatttatacataatttttataaacagttctattatataaaataattattgctgttcaaatgagtcagttatgttgtttggaggagcaacagagaggcagacttactaaaatatattttagcagaaaaggttttgaaaataatattgggactttagctttctctataaatggatggttcctgcatttactatcaggaaacctgggccactgccattctgaaacagtatttctagagagtgaccaaagagagttggtgtaaaaatcctaaaggcccagaactgaggttaatggggaaaaaaaacccaagctctcggtggaagttttggtcagaataggagatgaaacagagtacagtgagaatcaggtagcttctgatcagtaagaaagtctaccatatatgttactggaatttttaagcctctttctcttagaattctctcagttcctattacatggtagattaatcgaagaaagtcattctgacttcctgttcttggcagtaggaatcacctttctcacttaaaagcagagaacaagcctaatatattctattattctattctctcttctatccaaccaccagtcataatgtgataataattttcagttttagttgttgccctttctacttacttttgtgccataatgatgccttattaataggctatctcatatctttactaataaaaaagaatgtgaataaaatatattaaatcaaagtttgcttgaaaatttacaggaatttgtctacttgaaatatgtgatttaaaacataaattgcctattttaaaaacttagttaaatgtcactatcaattttatttgtacaataaaatatctcgaccggacgcagtgactcacgcctgtaatcccagcactttgggaggtcgaggcgggcagatcacctgaggttgggagtttgagaccagcctgaccaacatggagaaaccctgtctctacaaaaaatacaaaattagctgggtgtggtggtgtgtgcctgtaatcccagctacttgggaggcttaggcaggagaatcacttgaacccgggaggtggaggttgtagtgagcccagattgcgccattgcactccagcctgggcaacgagcaaaactccgtcttaaaaaaaaaaaagaattatctccagagggctaactgaagtcatcacaagagaaaataacattctgactttggtgtctttagaaggatagcctacatcattacaacattctgattttcttctctataaaagggtctctaaaaaatagtattgcttcgtgattctcaaaattcatagctagagtaaaatagctgaggagaaacatgccagatcataggctttgtagacgctgtgtctcccttctaatttactttatgatatatattaaaggcaagagaaaaaagacttttccttgccttaatttcagattagttaaaatggatattttctttgattattttttcttttggtattgttttcaaagttagcatatattgattagagaaaattcaatataaactgatgatgataagaaaaatatggggtcaggcttggtggctcacacctgtaatcccatcactacgggaggtcaagttgggtggattggttgagcccagtagttcaagaccagcctgaacaatataacgaaatcctgtctctacaatacaaaaattagccaggtgtggtggcatgcacctgtacttccagctatacgggaggctgaggtgggaggatcacctgaaccagggaagttgaagctgcagtctgccgtgattgagccactgttcttcagcctgggcgactaagtgagaccctgtctaaaagaaaagaataaataaatgttgggttttgtcttggcagaaaggaaatcaaaagacaatatgtataagtttaacctgtctgtaggaaaatacctgtcggttaaaaagaaaacaaagcatctaataaaagattggataaaggatgagaataggaaattcacagaaaagaaagaacaaataaccaaaaacaaaaaaaggaaaaaatgcttaacctcattagtgagtgtagaaatagcccatttaagctattagtttgccaaatataaagtacttgtgagaatggagaaaatccaacacacatttatttgtgagaggagtatgagtaacctttgtggaaccaaatctgacaatatctatatttggaaataaaattactagtataggctgggtgcagtggctcagacctataatctcagctgctcaggaggctgaggcagaggattacttgagcccaggagttgaagaccagcctgggcaacatagtgagaacctgcctctttaaaaaaaaaaaaaaaaaaaaaaaaagatactaggaggatatatttaaaagttttcgtggtaagaaaaatagcaaaaacgtaagatttttcaaaagaaatgttgcatactagtatttgcataatgactacatgctaggagggattttaagtgaaaataaagcatgttgaagaataactcatatagttatgaccccatttttctgtttaagataaacttgtggctaggtgctgtggctcatgcctgtaattccagcactttgggaggctatgacggaaggattgcttgaggccaggagttcgagaccagcctaggcaacatagggagacccatctgtacaaaaaaacaaaaattagcaaagtgtgctggtgcgtgactgtggtcccagctactcaagaggccaaagcaggaggactgcttgaacccggtaattcaagagtgtagtgagccgtgactgcgccagtgcactccagcctgagccacagagagataccctgtctaaaaaataaataataaacttgtatatagggttgtgattatttgtatgagccatgatggtgtagaagactatatatcagacacagagtgctgaggcaaggttcacctcaggcaagtagaaatggctagttgggagagaggaatattacctttgtttaagtggacacatttgtcattaaaaacaaaaagtaaaagataaaaggcaacagaaattaggaggaagaaaaaaagcccttggaatcccactacttagatgtacagattatatatttacctttgtaaacggaaaaataactatatataattttaaagccttgtaaaaacagtatgtcatagaaatgtttttatgtcagtaaacatacattatcgtattttgatagttgtgtaatagatatatggaaatgctaatattttaggtacttcagaaaccacccagaacacttcagtatttctattgaggtatagttgatgtaaggttaatgtacacataaaatatttgatcacttttaacaggaacatgctctatataaacgataactataatcgtatttatcacccaaaatttttcttatgcctgttttgtaaatccctccctcctgcactactaccctcatcttcatcgccaggcaagcactgatctgttttttgtcactacagattagtttgcattttagaaatcttacgtaaatgaaagcataaactgttttttgtctggcttctttctgagatagggtctcactctgttacctaggttggaatgcagtggcacgatcacagcccactgcagccttgacctcccaggttcaacacatcctcctgcctcagcctcccaagtagctgggacaacaggcatgcactacaatgtctggctaattttttgctgtttatttgttgttgtttgtagagaccgtttcgccatgttgcccaggctgatctcaaactctgggcttaagcaatccacctgccttggcctcccaaagtgatgggattaaaggcatgaaccaccatgcccagcctgactggcttctttcattcagcatgtttatatatgttgttgagtatgtaaagagctcatttttaaaaattgccgagtatggatttgccacaatttgtctgtttgttaacctattgatagacattttggctgtttccagtttggggctattacaaataaagttgctgtgagcacctatgtacaagtctttgtatggacataagctgtcatttttcttgggtgaatatgtatagatgaaatggcagggttatatataggtgtatattaatttttaagaaattgtaagtcattttccaaagtacatttgccattttatattcccaccagtaatgtctgaaaatttcaggctatcttgtttctgctaaatctcctttgtaccacttctataaatacgttgtgcatacataatgagagtcgattgaatggattctctatttttttcaattgatccggttgtcttttcttgttgctcataccacacggtcgtgataaagaagctttgtaataagtcttaaaatccgagtattaagccctccaacttcattcttctttttcaaagttgttttggccattctaggtcctttgtttttctagattcattttataatcagtttttttctatattttttcctgcaaaaaaaagacagttgaaatttgatttgcattgacactgtagacagaattgacatcttgcaatattgagtcttctgacccatgaacatggtatattttgcttttgttttttgtttttgtttttgtttttttttttgagacagagtctctctctattgctcaggctggagtgcaatggcacgatctcggctcactgcaacctccgcctcccgggttcatgccattctcctgcctcagcctcccgagtagctgggactacaggtgtccaccaccacgcccgggctaattttttgtatttttagtagagatggggtttcaccgtgttagccgggatggtctcgatctcctgacctcgtgatccgcctgcctcggcctcccagaggcattttttaaagtattctttaattctctaaataatggtttggagtttctagtgtataggttttttgtatcttttgtcaaatttatatctttagatgcttgtgtacatggtattttttatttcaatttttgttactagtatatggaaatacaatatataatagatttttatatatcagtttcatgtcctgcaaccttgctaagtatacttcctagtcttgttagctgtttcatagagattcctttggatttttctatatggataatcatcttgtttgaacaaagacaaatttacttcatttccagctggatgcaccctttatttctcttgacttactgcactagctggaaccttcaatacaatgttgaatagaagtggtaaaagtaaacattgtcttgttctgatctcagggagaaatcattcaatcttttaccgttaagtatgatgttaactgtcagtttcttattatctagatgaggaatttcgtttttatttctagattgctgagaaattattttagtcaagaatataaattggattttatcaattgcttttcctacatttgttagtaaatcatatggttttttttgtttattaactgcttatttgaaaatatttgacatttgaatattaaaccaacctgcttccctgggataaaacttggccatcacattttttttctttttctgtattgttcaattttacttgctaaaattttatttagtgttttttttttcgggggcggagggtttgtatttaaatttataagggatgttcgcctgtagttttctggtgattgtcatgtttaggtatctgggtaacgacgcagacctcaaatgatgagttagtgagttttctccttcaatattctgggaaagttggtgtaaaattgatattgtttcttcctcaagtatttgcaaagaatccaaacagtctctaacagataaaaaagacaaggaaatagattcttccacagagcctccagaggagtcacagacctgatgatatcttcttgctttttggcccagtgacaccatgaaaacaatatgacccatgatgaggagaaaacaaatcgattgaaactcacaactgacatgcttagaattagcagacaaaatcattagagggttattagatacggttgctataactgtatttcacatattcaaaaagtagagataaggaatcgacataactggaaaacacagaattggtagaaccagtaaacagaaaactagtaaggacctaggagctggaatagcatagtcagccaacttgatttaattgactaaacattcaaacagtagatacacattcttttcaaatacaaattgaagatttaccaagatagaccatattgtggttccagaaacgaggcttaataactttaaaaggattcaagttggaaatcagtgagaaaaatatctctggaaaatcccccatatgtttagaaactaacacacttttaaataacgcagaggtcaaagaagaaatcagaaattataaaatattttgaaccgaatgaaaatgaaaacccacccattttctattttctattgctgttgtaatcaccacaaacataatggcttaaacaatacacattaattatcttacagttttggatgtcagaagtccaaaatgggtttcatttgggccaaaaatcaaggtgtcatcaggtctgtgactcctctggaggctctgtggaagagtctattcctttgtcttttttatctgttagagactgcttacattctttggctgtgtccccttcctccatcttcaaagccagcaacacagcatcttcaaatctctctgtgtttctcctacctccctcttttgcttgtaatgagcctttcgattacattggatccactgggttaatctaggataatagtctcctcatcacaagatcctttattatcacatttgtaaagtcagttttgccaggtagggctacgtattcacaaggttaaaagcattaagacattggcatctttggtgtggtccattattctgcctaccacactgctaaagcagtacatagatggaaatttacatcactaaccgcaactgttagaaaagaaaaaaaaaaaggcagggcgtggtggctcatgcctgtaatcccagcactttgggaggccgaggcgggcagatcacgaggtcaggagatcgagaccatcctggctaacacggtgaaaccccgtctctactaaaaatacaaaaaaaattatccaggcgtggcggcatgcgcctgtagtcccagctgctgaggaggctgaagcaggagaatggcgtgaacccgggaggcggagcttgcagtgagccgagatcgcaccactgcactccaggctgggtgacagagcaagactccgtctcaaaaaaaaaaaaaaaaaaaaaaaattctaataattgacctcaactttcatcttaagaaattattaaaagaagaacaaacacagaaaaagtagaagaaaggaaataatacagataggaaacaaatgtaacaaataacaagaaaacagggaaaaaatttataaaaccaaaaggtggttattgaggatataaataaaattactaaacctggatttgacttttactttgatatttaacatgaaagctagaagtaaaacaatttaaattgtgttatagatatctggcttcgttgtttttagagacaggttcttgctctgtcacacagggtggggtacagtaatacgatcatataaccatcaacccttgggctcaagcaatcctcctgcctcagcctcctaagcagctaggactaaagacacatgccaccacacccagctaattaaaaaaattttttttgtagagatggtgtctcactatgttgctcaggctagtcttggaactcctggcctcaagcaattcactcaccttgtcctccccaagtgaaatggctgtttttgatagaatttaagtctagtttcctcattttattatactgttttgtttctagtgctaggacctcaccaaactaactcatgtaattcaagctctttgtgaagtagtgatagagcagaaagattttgtcataccatgggaagcctaattaccaagtcaacatacatttcaaataacgacctctgagaagatgcggaaaaacactagacctaactctcaagtgtttcttttggttgccatctctcagtggcccatcattcttacatatttcatcgccattgttattcttttcaggtcattacatcttcattgtaaaatttatcctctcacctgggtttcttctttgtgccaccttagtttcttagataaatcatcatattttcctagattcccatgaagatctgtgaaaggaaaagaggtggtgatttgggacagaataggattcacagcctataggaactctagagggacaaagttcttgcatattatctaatcagaatgatttagtgccaacttgtagatctcaaaacttggaaaaaagtaaaaattgtcaaaatatatcaagaatggatgagaagggattaaaaccaggtgataaggatgggaactctcactgaaagttccattattagaacattctactttgtttatgcacaactctgtggcaatgcaccggggctgttccctgagcattagtgaagtgtctatagttggaaagtcttcgcagtctcagttttgtgtcacttcaatctaagagacccagactctggacacattaatttcaaaccttggaactagggagtttatgttgtattccaaaagcatgtggagctacaagggagacttttttgtaattcagagtctcttacttagccgttatgtggccacaagatcttcagctaatctgcacaattcaggcgcttcaggccaacccagaaaattatctccacaaatgtagaaaataaaacagctttattaattttttaaaaattttatcttgagaccaagtctcactctttcacccaggctaaagtgcagtggtgtgatcacagctcactgcagcctcaatgtcccaggcttgggcaatcttcttgcctcagcctcctgagtagcttggaccacaggtgcatgacactatacctggctaattttttaattattctgtagagatggggtctccctgtgttgcccaggctggtcttgaactcctaggctcaagcagtgctccaatcttgacctcatggtggcatgagccaccatacctggccttatttttttagagacagagcctcactctgtcatccaggctggagtgcagtatattttatttttattttatttttttaagtgacagagtctagctatctatatttatatttatataaggggtagaggaagtgtttgcaattaaccacaggtgttctttagctaaagatctaagaaaagggagagagaaaggaaataaaaggaaaataaagatctctttattataccaaggaaatagaaaaaatgttaaactcttacaacttacttggatgactacctgattaataaataagttagtaaagagaagcaatattaagtttatctaaaaattgctgtcagatttatattgttgcatagctaatagtaggatactctgggattaaagatttacctgtcttatgtagttagcgcttttacattcttttttttttttttttttttttttttttgaggcagggtctcagtctgttacccaggctagagtacagtggcacggtcatagctccctgcaactccaactcctgggctcaagtgatccacctactttagcctcctgagaagctgggatgacaagcttgtaccccgtgcctggctaattttttaattttttgtagaggtctcacttttttgcctaggctggtcttgaactcctggcctcaagcagtcttccctcctcagcctccaaaagtgttgggattacaggcatgagccactgctctcaacctcttttacattcttttaacctacgtggaatgatgctatttttggtttttcgttttttcgggtataaaatgagtactctctatgaactccgtaagttctccagatcctctggagatcagaatcatacacaaaattgtaatgtgcccagtaaaattaactgttttaagaatgtgttccaatagtatttttataaagagcaatctatcctacaatctataacaagactaaagtggattagtcatacaggataaaacagaatttgaaatagtgaatgaaaatcaactttaaaagttttacttttttatttctcccaatttaaaattatcattacaagcattgaagaacaaagagaaaccacttattgttcaagtatgtagcctgcatattagcgttaaacttttctttgtttccttccagtttttacataaatattttacatgattataaatgaagtgtaggtataattttgtgttttttacccttttctgttttttaaccttaacctactctctaaaaatcccatttagtctcattagcctgaatccaaatccttgctactagaagtggctcataaaaatctgtgctgtgatttgcctgttgacagtagatgtgaaacttgaccagtttaattttatccttatgtggattttctaaagataatcaagaaggtttttgttttgttttgtttttgtttttgtttttttgagtcggagtctcacactgtcgcccaggctgagtgcagtggcataatcttggctcactgcaacctccacctcccaggttcaagtgattctcctacctcagcctcctgagtagctgggattacgggggcctgccaccacgcctggctaatttttgtatttttagtagagatgggatttcactatgttggccaggctggtcttgaactcctgaccttgtgatctgcccaccttggcatcccaaagtgctgggattccaggcgggagccaccatgcccagccaagaaggtttttttagttcctatttacttttgaataaaatgtcttaatttttagaatcatgtacatttagctcttttatagttcttcactgcctattcatctttttagaatcttttttaattttaattgtctccctattaattgattgctttcaaattatcctgctacgtagcactaattacgagcttttaaccacttaatcaaaatttagcagattgggtcaagtgtggcagtggctcactcctgtaatcccagcactttgggaggccaagtcaggaggatcacttgagcccaggagtttcagactagcctggacaacatggtaagagaccatttctacaaaacattaaaaaaattagccgggcatggttgcgggtacctgtggtcccagctactggggaggctgaggtgggagaatcacttgggcccaggagtctggggctacagtgagccaagttcatgccactgtactccagcctgggcaacaaaggaagaccatgtctccaaaaaaaaaaaaaaaaaaaattagcagattgactatataagaattttaacagagttaatttgttgttaggacagtcccaaagaccaaaactataaagcttaaattcttgtttgaagttttgtgggggaaaaaaacaaaaacaaacaaacaaaaaaaacagtataaaactaaataggtgatgtgcctataattatgctttttaaatctcggaaataaaataacccaaaatgtttacaatgtctcaaaagataacacataggtgttttttttaactttatatctgtctatactttataagtgctcttcaatgggtgtatctttttatgattagaataaataaataatctagataaagggagattatgccagtgatagcagtaacgtttgtcattcttgtacttactgtgtaacatttctgagtcaggattttagactaaaaaccatgacttaactattagcagtttctttaagagctgatatttctgcaaagaaaaagagagtgcatgttctagatcatgtgtctacacagaatagttcctcaggatgcattatatccctgtctcttaactactcttgactctgctatccctttaagacgtacaacaattttacataaaagtttttctccatattctttttttttttttgaaatggagtcttgctcgatcgcccaggctggagtgcagtggcgtgatctctgctcactacaacctccatctcccaggttcaagcgattctcctgcctcagcctcccgagtagctgggattacaggcacatgccaccatgcctggctaatttttgtatttttagtagaggcacggtttcaccatgtgttggccaggctggtctcgaactcttgacctcaagtgatctgcctgccttggcctcccaaagtgctgggaatacagacgtgagccactgcgcccagcctccatattctaactacctcagacttcagggaaaactatttttaaaaacacatgtgggttttataaaaaccggtaagtttatgaaacttttacattagccctagccctcagtctccaagtccagtgtttatctcttaggttgtatagggatagttgttaggtcttaatttgcaggagtaacaatttgaatccagttaagcccacataaaaagtaaatgaaaaactaagagactcttccatttatggggatgacttgtattacatcctacagataccagaaaaatgttactgtaaggtgcgctctttttgaaatcttaagatgaagtcctttccagttacagaatttttgatgtaacacatcaaaaattgtttccctccaattaactgtaggaacagtaaactgtagcacagttttaaaacttacatagagagaagacagagaatctccctaaagcccaatgattaaacatgtctgttaatttgtccattagacgttttacaaaacagctctgaagaaaaacattttgttccaatagcataaaaatttgcaaaaatcaacctactcatctgacaaagggctaatatccagaatctacaatgaactcaaacaaatttacaagaaaaaaacaaccccatcaaaaagtgggcaaaggatatgaacagacacttctcaaaagaagacatttatgcagccaaaaaacacatgaaaaaatgctcatcatcactggccatcagagaaatgcaaatcaaaaccacaatgagatactatctcacaccagttagaatggcgatcattaaaaagtcaggaaacaacaggtgctggagaggatgtggagaaataggaacacttttacactgttggtgggactgtaaactagttcaaccattgtggaagtcagtgtggcgattcctcagggatctagaactggaaataccatttgacccagccatcccattactgggtatatacccaaaggattataaatcatgctgctataaagacacatgcacatgtatgtttatagcagcactattcacaatagcaaagacttggaaccaacctaaatgtccaacaatgatagactggattaagaaaatgtggcacatatacaccatggaatactatgcagccataaaaaatgatgagttcatgtcctttgtagggacatggatgaaactggaaaccatcattctcagcaaaatatcgcaaggacaaagaaaaccaaacaccacatgttctcactcataggtgggaattgaacagtgagaacatatggacacaggaaggggaacatcacacaccggggactgttgtggggttgggggaggggggagggatagcattaggagatatacctaatgctaaatgacgagttaatgggtgcagcacaccaacatggcacatgtatacatatgtagcaaacctgcaggttgtgcacatgtaccctaaaacttaaagtataataataataaaatttaaaaaaaaatttgcaaaaatctggaaatcagcattacctttttgtatttttgtttttattcatattttaatgtagttgaaattaaatgtgtctgtaagagtttagttcttaggtgggggagtccaggtaattatgaatcctatgcagagactgtcgcttgtcctgtcatgctttaatacaagacaaggaggaaacaatctatgtctttgccttgggaagtttaataatactgcctttgcctagaactgctattatttgttcagtcaacaaattcgagtgccctccctgtgcaatgaactagaaagtaaagaacgaatctaagacagtatcttaaatttaattcccccattctagtttaatcagtgttaattatcatgaaaatctgtgtcactctctgtcttccctctccctttttcttcctgactgcttcccttctactcccttttctcccccttcattcctcagcacacccaaattttactgcacctttctatcagtaattgtaggagaagggatatatgccccaacctcactgggcattaggggtgtgtgtgtgtttgtgtgtgtgtgtgtgtgtgtatccagttttttttaaggactaagtgtctcctaaagaagtctgtgctctttctgtccctctttttctgaattattgttttaaatcaagactttaaatagccacttaaacaagatgagtaacaattctcactggctcagtagctgttttttttccaagtatgttaaatatgttatattactgaaggaagaaatattttgtttcatgttttggggttgagtatatttgatatatttgtggaaagaaaagtttatctttgttttttgttgtttagaggaagttccttttgagcttatatttgagccccaaaaatcctccaaaaaattgttcttcctcttttccatgaatgagatttagagctaaattcatacaaatgcaaaacaaaataaaattacagattctctgaactctataactcctaaaaagattcagctatggaagcagagttgaaaatcacaagaattttggaggaaatgcattaaacagactggttatatcaaatcagaagatccacaaaaaatgcaaagagacaactgctgaatatatgtattcagtagaagcctgtgagacaatagcaaatttaaacccacccatggtttccatcctttgaaaaaatttaccttgagtaggacacaaaggaagaatgtcagctggtctattagtgtttccttaatggttcctgaggggaagaaaaaagaataattggtgtgagatgtgtataacaaagaagacatgcagagtattttttaagatggtacagtaattttgaggaaaaaaattaatattaaacgtctcctttttcttgttcccccaaaaagtgtgtgttccaccaaaaagtgtgtgtgcacgttctactgtcataccaaaaaagatgagactgtcccagagtctcagtgaattatcttatatttctgtagggaatcagattagatgataccctttagctttgtgtttatttgcttttggtaatgttccctattaagtggcctttctttaactcttctccttgttcatccttctatagtacctcactcttgtctattgattcataagttgccctctgtagaagcagtttaatatcatcagcttactatctgatggttaaaatgtctttcacttatacacccatgattctgtggaatttgtaagccagatgaattttttaaagccctttgtaaacttaatcctttaatctagaaatctgaaacaatggaataattcagtaaaaattatctattttcttagttttcactctatcaatatgaaaggctaggcaaacagtcctgatctgagatgaaaacagaatgtttcagaaatgctgcctatctaatgaaaccttaattgaagtatccttttgttgtctagaaaacttaaaaataacagaatcctgagcgtattattttttattgcttgaagtaactttagatatctagtctcactcttatactttatagctgagtaatgtaggggcctgagacctgtgacttgcttaagttcacatagttgatgaatagaagtagacccaggtctagaactgaatcacaagtcagttttcttatgtatgtactcatcacatgttgaattacatgctgggatatttctaaccatgaaatgggaagaacgcaggccactggttagaaagctacgagtttgtacccacaacacttgatgttgcaatctctgggctactacacaattgttcacttgatcagccaactatttgtttggtataggtaaagttctcttttatcctgcttaatttgaatataggtatcacttagacctaatatttctcagaatgactttgcagtggcaagtaatgggcctgatcttgtatttcagctcaaatagctataactgtaccaaagacatggaagaaaccaaaagatcggacccgaaccactgaagagatgttagaggcagaattggaggtaagcaaatctcttaagttcatattcagagcagtggtgccatttcatagacaggtatgtgtttatacctatttattgaaatagttttccaagcaaaacttaatatatcaagctcagagactaattgttttaagtccattttatattagaattttaaaaagatttttagtaacatgtttgatttcattgaatacttatttttctttcaaaatacctcttttaaaataacaaacttggccaggcacagtggctaacaactgtaatcccagcactttgtgaggtgaaggcaggatgatcactgcaacccaggagtttgagaccacctgggcaacataaggagaccctgactgtacaaaaatgttttaaaatactagccacacatggtggcgcatacctgtggtcccagctactcgggaggctcaggtgggaggattgcttgagccctggaggtggaggctgcagtgagatgtgatcatgccactgcactccagcctgggcaacacagtgaaacattatctcaaataaataaataaaatgacaatttttggttaaccttcctcttcccccaactagaacttttgtttgtattaactggatagaaagataatctggtaaacaaaaatggagagtttttaaaaataccattagtaatggtggtagaattcatctagtacattataaaggaattgattttgaatctgtcatctgttaactgcatcccagaaacataacttttcttcatatggttgtctgtcttaaaataagccatgcgagattttgcttcagattaaaacataccaagtccaagagatgaatgtgaggaagaaaaaggacaaatcagtcctaaggattactctaacaatttccttgtctgtaatctcaacatccttagcattatgtattgaagcttataaatgaagagcaatgtaaatctgtatgtagctttttccctttttttgactattcttttagctactttattaaaataattttactcaaggtttaacatgataaaattaaaattttactcaaggtttaacatgataaaatataaaaattatcttaagataactttgagtgtgtttacttcattcggcttttttagcaagttataattcttaccttctttgggtatctaacagtaccccttggttacctcccctgtgccttcattgctgttacatgatgctgtgttgatgtcactgttagtcccatagcaaccactaaaatgttgatcgttgtgatttcattgtggttattagggtgtaaaacttggcagtaaggtatagaggtgcaaatagtcattgcactccttttgcagctgaacctgaaaatgttcctcctacagagaataaaataccttccagaggcatgggaatcacatacattcctgctgtggctgttaagagcttcattaacttctttctttttagattcagctggtttttttgttatttttcttctgttatacttcatgttggatttctaagcattattgaatattatataggccactcctccattgccttcaaatattcatcctaatcttcagcttgaggttcaccaaactttttgtgtaaaggtccagatagtaaatattttaggctgtcacaattcctcaaatttgccgctgtagcttaaaagcagccatcaacaatgtgtaaatgaaagaagcaaggttgtatcttcacaaaactttattggtggacattgaaatgtgaatttgtatgccaggaaatatttttccagattttttcagatattacaaatataaatatcatccttaccttgtatgctgtgcaaaagcaggcggtgagccagaattggccctcgggccagagtttgctataaagcttctttagcttgttactcttgaaacacaagaactgttttgacttattttgaaccaatcactttttcttaactttatagtttaagacaaggctgggcgcagtggctcatgcctataattctagcactttggtaggctgaggcaggaggatcacttgaggccaggatttcgagaccagcctggccaacatgacgaaaccccatctctgttaaaaatacaaaaagtagctggccgtggtggcgcgcgcctataatcccagctactcaggaagctgagacaggagaatcacttgaacccagaaggcggaggttgcaatgagccaagattgtgccagtgcactccagcctggacaacagaacgagactctgtctcaaaaaaataaaataacctaaaaaatttttaaaaactaaagcaagacaaaaaatatttgctttttacatagtgacttctttcagaaatccttttttctgtctttcctaaaactgagcttttgttggcatagtgtagtaaatactggatgccattgtcttcatttccactaatcaggctccccctttcttagatttattttgtcagcttttaaaataatttgtttctggtatcagcttatttgggttacatattaggttgttgcattattaaagatatttatcaaaattatagtctagaggctgggcatggtggcttacgcctgtaatcacagcactttgggaggccaagaagggcagatcacgaggccagaagtttgagaccagcctgaccaacatggtgaaaccctgtctctactaaaaatacaaaaattagccaggcgtagtagtgtgcgcctgtaatcccagctactcaggaggctgaggcaggagaatcgcttgaacctgggaggcggagattgcagtgagccgagatcgcgccactgactccagcctgggtgacagagcaagactccgtctcaaaaaaaaaaaaaaaattatagcctagaaaagtaaggatgaaggatgatttcatattaaaattgcttggcaaagtatcttaaaataagttttaaaattttagagcatttcatcaattattatatacatagttgccagtctgattttctagcacttttaaaaaacattgcattaagcacagagttctgtcaagtgaattcttaacagattcctataaaaggtttacctttggctgtccagccaatgaagtcatctctttcttaaatctgtttctgcataaacaatttaggaactgtacagactagttgactaggattttatcctgctttaaaaaaaacccataaatatttaattaagctatttttgttattctcttcaaatacccctcatagtaatacacctcagataattcagtgattctgtgttctctgaattatggtttgttattcatagaactagtttctttatacttctttttccagttagaaattaaatttctaagtaatacagcctctgtttatatatgatagactgttgttgattgtaggtacagagaagaggatgcactgtattctctaaaaaaaagtttcacattttataagatctgaaataagaattctgtataattgtataatttggttatgttgctctttaataagtttaaataccatttacatactgatatctcagattattaaatgtcttcttgatgacctgtacttaattatgagatggtattataagattattataattagactatagtagagtctaaaatttttaaaaatgaggctgctgattcatgattcaaatttggtagatctggttttttcaatgtttaaatgatacctactttctgccatgctttataaaataaattgtttccaaacttatttttttggaatattatgtctgtctgtcttttgagggtttttatatactatctttttccatgaattagtcgggggaataggtgtggggtggtgtttgtgcatatttgcatgaactttttatttccattattagaaacagagtctaaaaaccatctgtttctgttgataacattaaacaatttattggcttttcaaccatgatctgttatatggtaaaagaaaatttactagtattatatctgttttaatactatctaacaaagaagtatttgtcactcaaaaattgttttaaacataatttcatagattatttggggtgaacttttttctgctatatatgacactactttacactatcctctgctgaaccagctccagtttttggctcttctcctcgtgtgaatttatcaattagaacacctctgagtagttgtttcagaggattgttttcagagtgcatacccatcgtgaaaagagttcacagagaactttgcctcaaggagttttgaagattcatgaggcctttacagagccatttgtgtttgatatctgacgctaagatggtcaaaaataatctagggaataacttcaattctttttcgccttctgaaaataggtgtgatactccataacccagatttctcttttttttttctctctctctctttttttttttttatatacaagatttttctatatggtcacagcctcagagaagtctaagaacgaataacaaaatagattttaactagcaagtggcctttttgtaaaatgagatatgatcagttttataggacttagatgttttaagctattctccagactgtcaatttcacagccagaagacagtgtaaaaaataccctccagtgtttctttttatatttgttgagctttaatggcaagggtagtgtagtgcttgttttagattctgactaggactctttcatgttcataaagttccatggattaacagttctttccattctaacctttggtatatttggatattattagtctcatgttaaagcatttcagcagccatttgaatggtcttccttttcctaggtgctgaaatgagaaaagtattttttttaaactcagcattctaataccacatgctgaacacagacattcttaccttgaatgacatgttttcctttgctttttgaagggagtagatgtaggtttttatgtatatttacacccgtggaaaaaaatgtaacctctttgttcatttattatttagcttaaagctgaagaggagctttccattgacaaagtacttgaatctgaacaagataaaatgagccaggggtttcatcctgaaagagacccctctgacctaaaaaaagtgaaagctgtggaagaaaatggagaagaagctgagccagtacgtaatggtgctgagagtgtttctgagggtgaaggaatagatgctaattcaggctccacagatagttctggtgatggggttacatttccatttaaaccaggtaagtttatacctgccttcctatgtacctctttatccctctactgcaaccttagagaaatgttgcctctttttagagagatactggatggaagaaagaggtttatcacaatataatatttacaggacagatcagcaagcccaagttagtgactagcaaatccagagagttctgtattgctggaaatgatacccgacactggtattccccttttactggcattggaagagcatctggcagagggaatcagacagtgccatgctagtgggtgcagtttgattttaaaaattattgcattcgttttaattgaaagggatatagagatattaccacattcctcgagatggcgttagtcatctttcataagacttgatctctgttgacagaaatcactctgtggaactgaattctgaaacaatgtattgagtacctgcagtatgggaagttccctgtggtaaatatgtatgataaacaagtaaataaggaatatatatgataaacatatggtaaacaaatataaaccctggaggatttttttatcttcagataccatcaaatgcattaaacctctgtcataatgctatataaactgtgactgactttgagatatatggagagatttggtatggatctgtaaggaaagatggttcctttgacagaaagtttgggctgggtgcggtggctcacgcctgtaatcccagcacttagggaggccgaggcgggcggatcacctgaggttgggagttcgagactagcctgaccaacatggagaaaccccgtctcgactaaaaatacaaaataagctgggcgtggtggcacatgcctgtaatttcagctacttgggaagctgaggcaggagaatcgcttgaacccggaaggcagaggttgcagtgagccaagattgtaccattgcactccagcctgggcaacaagagcgaaactccatctcaaaaaaagaaagaaagaaagtttggagtaggtgaaaagttttccttagtctgccaaatctagactaagttttgcaggaggtggggtttgagtgtaaaataccagacctcaaaggtaatctagatcaatatttttcaaactgttggatttaatacatttaatagattgtgaaattaataggtcacaaccaacattttaaaaaaggataatataataaaaaatgtcagtctattacatgtaagtaagaataagtattgtttttagaaactttgtagttatatatgtgtttataattgtcccgggtcatgaagtcattatgtcttactgtgagttgtagtcagagatgtttgaaaaccaatgactagtacttaccactttattttatattatttttaaaagtttttatttattgtttattttttacagagggagggtctcactatgttgcccaggctgctttcaaactcttgtgctcaagcagtcctcctgcctcagcctcccaaagtgctcccatgcccagcccttaccactttgatatactgatctttcactaccagtaaaatcctgttaatgggctttatgaaattgtaaatttatgctatcataaaactttttttaaaaaaaccctaggactcagtgtactcaattgcttttgtcaacttaggcttgtatactgtgttcaaaaataaagaaaaagatctaggcttgtaccaggtcacagagtacttgtagccatcaccaatgtgtcttaagaaaatggaaacactattgctatttttagactatgcaaattatatttttatattaatttattttatgttttaatattttgtatattgcataatttatgttacttatattttatattatattttaattcttttcatccatcagttttacagtataggccctgactataattgaccaactaccttttgcccttgtaatatttaacagcagtaattggaaaaaagacaatagtcattggaaaaaaaacagtttgaaatttagatcccaataagctgtctactttttaataaatataatagggtaataaagatatggtggaaaacatttggaatattctcaaagacccatcagcgggtctataacctacacattaggaatctctaatgtaagaaggatccaatctgctatcaggaagtaatctggagtctgattttgatgagttttattaattaaaataagaaaactgtgatttttttttagatgaaattataggcaggagaaaaaacttagtatctaactgcatagacagttcattatcttaaataagttgtttctgtgttttgtgtccttttgcttttttttttttctctaaaataacatttcctagtgaacaaccaaagtagccttttttatgaagccaagggttgtatcaggttccttatttcttagttatttaagttatttagttatttaagtcttatttctaagttatttatttaatgaggattattacatgtccctggccaaaggttacttagtgtgtatgtgaagtgattcctacttgctttagattattttactactcaaaggtatttagaagggatgaaagaacaagtgatggtttaaaatctttacatattttctgactgtatttcattgttcccttctattttttgtttgttcatgaagagataaatactggaatgtggtttgtactcttagggaatgtaggtcatgcatcatttaatgacggtgatttgttctgagaaatgcatcattaggcaatttcttccttgtgcaaacaaaagagtatttgcacaaacctagatgttctagcctactacacacctaggctgtatagtgtagcctactgctcttaggctgcaaacctgtacagcatgttgctatactgaatagtaggcagttgtaacataatggtaagtatttgtgtatctaaatataactaaacatagaaaaggtatagtaaaaatactatataaaagatttaaaatggtacactgtatagggcacttaccatgaatggagactgcaggacttgaagttgttctagatgagtggtgagtgaatgtaaaagcctaggacattactgtgtgctggtgtggattttataaacattagggcacactacatttattttaaaatgtgtactttctctaataatgaattaatcttagcttaccttaatctttttacttgataagctttttaattttttaactttttgacttttataataatatttagcttaaaacacactgtatagctatgcaaaaatatttctttttcctttttctttttctttttctttttttttttttttttgagatagaatctcactctgttacccaggctagagtgcagtggtgcaatcatagctcactgcagcctcagcctcctggactcaagtgatcttcccacctcagccacctgatagctgggactacagttgcatgtcaccatgcccagctaattttttaaaattttttttctagagattaggtcttactacatcgcccaggctggtctcaaactcttggcctcccaaagtactgggattataggtgtgagccaccatccctggccttgtttctttatatccttattctatatgcttttttctatttttaaaattatttatctttttacttgttaaggatttttcttaaaaactaagacacaaacatatattagcctaggcctatacacggtcaagatcatcaacatcactgtcttctacttccagatcttgtctcattggaaggtcttccggggcaataatatgcatagagctgtcatctattataacagtgccttcctctggaataattcctgaaggacttgcttgaggctgttttacagttaactttttttaataaatagaaggaatatactctagtgatttaaaagtatagtacagtagatacataagccagtaacgtagttatttcttgttactatgaaatattatgtgttatacttgattgtatgtgctatacttttaaatgactggcagcacagtaggtttgtttacactaccattaacacatacatgtgaataatgcattgtgctgccacatgaggatagttacagtgtcattaggcaataggaacctttcagcttcattatagccttatgggctataatgttgtatatgcagttgtatatgcagtttgttattgatcgaaacatcgttatgcaatgcatgactgtatataatgccctacaaacagtgtctgcctatattcctctttctagaatcctggaagcctactgatactgaaggtaagaagcagtatgacagggagtttctgctggacttccagttcatgcctgcctgtatacaaaaaccagagggcctgcctcctatcagtgatgtggttcttgacaaggtaagctgcgtactcagagaaaactagttctttttggtgggaactgattttaactataagagcaaatatgtgaagtatgagcagtttttagtaattgttagaccaaatgatgtaaaaatatctaatgtttaagaatttgtttccctaaacactgttggattttgagtttcttataggttacagtcattttgggatttggcccatgttggagtggtggttttttttaatgtttattgatttatctgcttattatggctgttttttggtgaaataaaaaattttgtgtttgttgggggaaacatggctaaattgatacggaggtctttcctcattgttctaaaagttcattatggaattctattggcattgaagacaggtcagaaatctaggaaggtatttggcagatcaaacataagtgagagtcaacatgattcaaataatatgtatctcaaagtttccctaatagatacctccagtgattgaattctccaatcttgtgcaaataggcatccttcctctttgcatctgatctttatggtgcacacagcaaattagtacagtcagtatttgtttactaaattaaaaggagtaaagtcagatctactaaagtaatttcatcagagctgatgattaagcttgaagtatttttgttttgtagaggaacagaaatgtaaaagtagagattaactatcttatggaatcatatctacctcttaaccgatttatgcctagtgtttcattattggaatgctaagtttgtgagagttatttatatcctactcttcaaggtcataaccaaggtctgaattttcacgcaaaaaaatttgcagcctccggcataaatgggttagtaaagatgtccagcagctgcttatccagaactcatttatactattttactttcttatagcaacaggtcttcttacttctattggtggtatctaagtcttctctcctagatacttatgtgaggacagctgaatgactgattaatggtgctaatttgaggctacttcagtacctcagaagtcaagtgttatatccaccaaattcaattatcctcttagaaaatattcctgcctgtcctgctgccttatctgtttatgactttggccactaattagttgatttctcactgatctgcttaactttatgttgtccatggtcacattacatgcttattcaaagtcagatatctcagattaacaaggcagacagtgaaattttaaatgaatcatcacctatgaaacatgtctcctctaagacttattgtccactcatagtacattctttactaaccataagtctacagcatcaaaactaaaatgagcagtagcaggattcgtataggcaagtgctctatatcctgatgaatatttttttttaattctaaaatttgaccctagtatagaggatctcaaaatatcttgtcttgtgccattcagttggtcctcagtatctagtgagccagtctgctgattatgtatagcccctacttggaaatttaaggcctaaatcattcccagcgtatcagaaaaccattgttttagcctaatggctctaagagtagcccaggagaagctgccatggatgagattggacttctgcgggttccaaagctggtgcttaccgtttcagctgatgtaacttttcagtaaaaatttttgttatcttttgtggcagggaatgctctggaacatgtattaagctttcttttgctttttcatgcagatcaaccaacccaaattgccaatgcgaactctggatcctcgaattttgcctcgaggaccagactttacaccagcctttgctgattttggaaggcagacacctggtggaagaggcgtacctgtaagtgcaagttccctacaactcacttagttagacactggcacagactccatgaaatcctacctcatggcaagacagcagcttttattcgttgattctagtcaagaagaagaagaagaggcaaagactatcctttccatactcatattaaagcagataaagaatacacttgagttctttttacttggcagaagctagtctgcattaatttggtcttgattttttttttccctattttttcaattgaggtgacctgcaaataggtttaaaaatagtgccaaccatggccagggatggtggctcaggtctgtaatgctagcactttgtggggtcaaggcaggaggatcacttgaggtcaggagttcaaggtcagcctgacaacaaagagagaccctgtctctaccacaaaaaaaaaaaaaaaaagaaaagaaaaaaataggccaggcatgctggcgcatgcttatagtcctagtcccagctactcgggagactgaggtgagagaattacttgaccccaggaggtccaggctacagtgagccatgatcatgccactgcactccagtctgggtgacaaaacaagaacaggaagtccaggcttcagtgagccatgatcatgccactgcactccagtctgggcgacaaagcaagaccctgtctctgaaaaaatatatatacagagcgagccaaccttgataagattcctgttttgttttgaggtgtcctaaaatactggagatctctgatgacattcagctaatgatcatgtctttgtctttgtttctacagatttgcaaagtgcagagcaggcatggattgccaattctggaacagagcaaagccccaacttgccctccactggtgatgtcacacccacccatgaagagcctgcctctaggggtgcgctgaacactttgttttttgtaataatagtctctggtgttataatattttctgttacgctctttttatttactattgattgttaagtcaaaattttaacaaatgacatgtacaaaagagtgcagtattggtaaactgcagattgccattacacccccagtggcaggctctttcagcggtggaagtggcatcaccagtggagttatgctggggcactgcactgtgcaggattcggcaggctctgcctactccatgctttgtagacttgcagaaagcatggggaaagttgccaatgatgttgaatgtctcttttccccaagttagaatggcatagagagcaataaatctaacattttggaggagcttggggtttgatgtacatttgcagataaccgtgttacttcattttatgtaaggtgacactttttgtttccgcatcacctttttatttctgaaatggcaacttttgaaacctgctttgaaataagactacattgtctgaaaacaaatgtcactttgtagatatttaaattatttgattattttcctgcaaccgaacagtgatggcgtatacttgaatgcctacagtgtgttggaggctttgtaaaactaccgaaaaccacctgaatttgaagcatactgtttattgagccattaatccatcaccattttagagacctgtgtatgtgagatactctgtttctcacacatttatctattttcaggaaatactaaattaaaatttttctaaatcttgagttacctcaccagaaagtcttagaaagcagctttctagaaaccattttatacccttttttttttttttgagacagagtgtcgctctgtcgcccaggctggagcgcagtggcgtgatctccactcactgcaagccctgccacctcctaggttcacgccattctcctgccttggcctcccgagtagctgggactataggtgcctgccaccacgcccagctaatttttttttttttttttttttgtatttttagtagagacggggtttcaccgtgttagccaggatggtcttgatctcctgacctcgtgatccacccgcctcggcctcccaaagtgctgggatgacaggcgtgagccactgtgcccggcccattttataccttttttttcagtattatttccctttttaatgttgaaatttttatttgtgttactgttcattttggttttggtttatatctttgttttgccaaatatttgaaataatgttgatgctattttgaatattctgtggataatagcatctgtggttattatcatattgcccaatgttgttgatatgtgactcacaaaatgtataaatcctcttccagtgtcacttttcactaacagcttgctagtcattgtttgctaataactagttataacaaaaaggaaatattgtgagtttagaataagcaatgtctcttttaaattattgaaaatagaaaatgattttcaaaagtaactttatcacagcatataccactcctctgtatacctacgtatgtgagatcagtgagttattctggtacactcaaagtaatgtgactagaagtgagatgttatctagaatttgtagtagctccaaaaagatcaactttaattatttaatttacttttattaagcagctttgttctgtgtcagaagctagtttttaagagaaattttgatgtctcagggtaatgttgatatgttaagccttaacacaagttattcttccagcctatctcctagataacagacattctccacttaatttgcccagcttaccttggtatattgatgtagatacagatgggaatgtcataggacataaatatcaacatataaaggaacaaaaatggccaggcacagtgactcatgcctgtaatcccagcactttgggaggccaaagcgggtggattgctagagtcccggagttcaagaccagcctgggcaacatggtaaaatcctgtccctacaaaaaatacaaaaatttgccgggcatgagggcacacacctgtagtgccatctacttgagagactgaggtgggaggattgcctgagcctgggaaacagaggttggagacagaggctgcagtgagccaagattgtaccactgcactccagcctgggcaacagagtgaggctctgtctcaaaaaaacaggacagaaataatgctgtttggaaaaaagcaacagccctactctttgcagtttctgattccatacttcaaataactttttccagttctccaaattatcttataattaattatcacttaatgatattaaaatctatgaggtatgccccattattatcttaagtagccatgacttctaatataaacttttctacagctcatgcctgtaatcccagcactttgggaggctgaggtgggcagattacatgaggccaggagttcgagaccagcctggccaacatgacaaaaccgtgtgtctactaaaaatgtgaaaattagccaggcgtggtggtacatgtctgtaatcccagctactcagaagactgaggcacaagaatcgcttgaacccgggaggcggaggctgtagtgagccaagatcacgccactgcactccagcctgggtgacaaagcaagactctgtctaaaaaaaaaaacaaaaaaccaaaaactttgctgtaacagacttgctataaaatatttttaatgtatgccaatgattttaaaatgtcatatgcagctacgtagttttcaaacctaagtgtccttcactggatagtaaagtgcatatctgttggaaattaccatgaaatatcatgtctttagttatttttaaaataaaattatgggccgggcgtggtggttcacgcctgtaattccagcactttgggaggccgaggcaggtggatcgcaaggccaggagatcaagaccatcctggctaacacggtgaaaccccgtctccactaaaaatacaaaaaattagccgggtgtggtggcgggcgcctgtagtcccagctactcgggaggctgaggcaggagaatggtgtaagcccgggagcttatagtgagccgagatcgtgccactgcactccatcctgggcgaaagagcaagactccgtctcaaaaaataaaaaaaataaataaaattacttatcagttgtgttagtagtctttttgcggacatcacagaaagcactccaaaaaatatatcttaagaggagcattggacctatataagtaatttgccatttatacttattttaactaacttttgagataaactgatcaatcataaaaatcctagcagcaaagaagaatcctaggagtaaagtctttctttaaaggaacacttggttgtcttccttctttaaaaatttaggtgtatattgattctcttttctttggttatccaagtaggcagtggaatttaagattacagtctctgaataagataggaatgatgtatattaaattgcaaaacggagatgggtataatttcataatacatttttgaaaactgacagtgggtaaaaaatgcaaactttaacgtcacctgaaaaaagaaaatggctcactaatcaaccccagactttgagatttttagttttgacattgtggaccttgagcacattataccttaaagttccttaaagtactgtctttcaaagaaagaaaccaggtgtcgtttctttttgtgtagcccatacctcttagcacaggatcctagattttttgtgtgtttagtatataaatcattcatcatatgttgctacttctgaaggataccataaatttgattatctgtattaagattttcacacacaaaaagggacatgaaatgtttaaatttatgtatcagttttttaaaagttccttttgatcctttggtgttgatgataatatagtttttagggtccttttacatggtttatatcctataatcacaataatgttttcaggtagggctggcattgtatatatgagaaaacaacaaaactaagagacttgcctatagtaactttgctcatatatagcagatttggactctagattctgattcttttgtctcctaagttcactacaccacagttttccaggcattgctattccaaacagtgaattcattctcagagtgtaaatatgggcacattagagattgattaattgaacatattaagaatttgtaagtatagtagatctattaatagctagataaatatttgagaacagtgtctttatcttagttataaccagagatacaattataatttaaaattttttcttgggtgctttcacgtgggttataattttaactattttatcctggactaacaatttatcagttagcttttcaaagttttttttcctttgaagcattattgttactttctcacgtctctctgttgctcatttgaaactcacacatatttgtcttgggtcaggtaaagaggtgtggaataaatcatattgccattttccagattcaaatctcaaggcatatttattcattggtgtttgcagtaggttttggtaatgggcattttctgactttgtctcctaatgtgcatctatggctcttaattggttttgacataatttcctttcattgcatccagaaacatttgttcttgacaatgtttatgtacaaatgcatggattaaattaaatatcttgtgatataattgtttacctgaggtttagccaaccatttagtaagttattaatccatataagtcaacactagaatataacttgaattataaaaatcaggcattacttgattaccacatttttctatcagaattgtttcttctgggctactatattaaagtttcagttacaatttatgttcttatagtagtactgtctggtttaacaactgttccctgttggtatttttccaatctgatgatctttatttcctttcagttataccatgtgtctcatacctctgggtttatctgacctgtttgttttttttttttaatgtttatcaaataatctgtgatatcatcagtactgtatccttagctggatgcatttgacaagattggtgtgaaattttgcagaaaccctaacttttgatcctgatgcattcttgatactaccatttctaattggggcagatggtgaagcataaaggaataattctgagaatgattgatgtgtaaaggtgtttgagcttatcagcttaggccccagactgtgttatcgcctagaaactgtatttttatgtaatgaatgacattaaagtctagacttttttctctgaagcgttaaatgaattcaaaagggcagcattggggccttaagtgagaaatgattctcatctatgtgtgctttgtatgaagtttttattctctcttgaaatctaatggctagcccttcagtgcaactcagaaagaaaaaaaaaaaaatctggtggcagtatttgcccagcactaacagaatgatatatcagaaaaagtaaaggttgtcaacatgcagcaggtctgcttgaaggtagcagagcttagtatcaacccaaatatttaaccttgaaaaattatttccaagcatttaagatagtaattatgaatattttgatacacaaaatgcaacttttaacttactctgttatctctacttagtgtgctggcagtataacatggcaacatacattggttttaacataagggtatagtgggaatccagcaggaacagagcagacaaataaaaggaagccttttttttcagggagtaatttagtttgactctcattgatgatatataacgggcttattttagtatttctgacccagcataatgagtggaatcttttatgatctacagtaaggcttagtgatgatattaaatttgcattttaccctgggattgtagaaacccagttttagcagatttgtaactatgatgatacctacctgtgaatttttgtaattattgaagtgaccagtccacagttattcaactaataaaagataagcttaaattaggactagtctttctcattagaagtaacggctttgtcaaacatctggttcaaaaaggcctcttgttcaaaagttgtagtggtggagaacattacattgatggtattctgaagttattttttttacccccaaaaaagattacctccagtttgagtacctagtacccaatctttgcatctagcattgcttggcgtagtcatcagacttgacttgaacagcacaacaaagccaataaattgtaagtactctgaatagctgtaatattcttgtcctagttgttgaatgttgggtcacgaagatctcaacctggccaaagaagagaacccagaaagatcatcacagtttctgtaaaagaagatgtacacctgaaaaaggcagaaaatgcctggaagccaagccaaaaacgagacagccaagccgatgatcccgaaaacattaaaacccaggtgagaacaaaagcatatcctaacattcttttgaaattatattgattttgttttaacttattttgctttgctaatgtttctagagataatcagtttaagactttttataacattttcctattaaaagaattattctaaaagccattatggatgccaggcaacctactgttttctcttgaaattgctttatgtgtattttttcagaatagttaccaggtctagagggttcatgtgtcatagacttatgtaattcaggcttaagttaatatttgcttttctttaaaatacatttttagattctcagtgattgagtctctttatcctatttatcctaattattacattgctttatgttccttgtcaggccttcattgccaataagctagaatttagaaactcatcttgttttgaagccttttggaataaaatttaattctttgaatctttttatgcatatcctgccctcagaactatgaggataaattgaatggatttattttattgacacaaaattaatttttatgtatcagattatataaagcctttatttatcttttgctttatacacaatgtcaattcctatccccaagttacctctgcgacttgagatgtttttgcttctaggcaccaaaactggagtctcttaaaattcacacttgtaccagagccaggcatcacagatcacatactaacttttcagcatctggattccttatatatcttttctctcaccatgaacagttaagtgtagcagttcaaagttccagctctggaggcagagtcctgactctgttaggcaggttcttaatctcaactataaaatgaagttacaaacattgagtgcctcatagggccagtgttaagattaaatgaaataaatataaaccatttggcatggttcctggagcgtggttaagtgctcagtacgatgatgtccctgagatcagagatgtgccttagatatctttttgattcagtaccatcacataacctcagagagcaggggatccccaacccctagtaccagtcagtggcctgttgggaacggggccacacagcaggaggtaagtggtggcaaaagagcattaccacctgagctccgcctcctgtcagatcagtggcagccccagattctcataggagtggaaccctattgtgaactgtacatggaagcgatctaggttgcacgctccttatgagaatctaactaatacctgatgatctgaggtggaacaattttatcctaaaaaccactttcctcttccccgctcaaccccacccccaaccctggtctgtggaaaaattatcttccacaaaaccagttcctagtgccaaaaggttgaggaccactgttagagagagtaaattctcagtaaataattgttcagtaaataagcgaacccacagagtagttaatacaaaacaaagatgaagatgaggcaatccaacaactagccatgctgtcaaactgtacttggcggtttgcttttgtttatctctttagtgattatccccaaacatttgccacagggttcctaaggacatccttcatcacattgctgagataattctctccatttcaacatatctcaaccttttttggaaaaaagaaaaaaaagtcttttttgtccttctctccaatctccgtgagaaatgcttaatgataatgggcctaaatggcttataaagatagttaaaacttcctactggatcttcatcattgacagtgaagatgtatttaaggcacttggattaatgctttactttattaaattcttactgtacctataatgaggaaatagatgttatccttttttttcatgaggaaactgaagcttcaaaagttgtcaagcgtcatgaaagatactaaatagtccagttgttataactcgtaatctgtttctgtttataacagagtcctctccgttattgtcttatttcagaaacagaataattatcttgatatgaggcagcattaattaataggttttctttagtaagtagataaaacaaatctaatggagaatttttaaaattcctttacagagccagtacaaccttcttttttcttgacactttcttttaaatatggacttgctttgttgccttcccttacgttcctactactatattaaatcagcattgtgaacgaccactgttgatgaccttattctcatcttcttgaagcatttttaggatatcattgcctcaggacatgtctgggcttctacccctaggattccctgcattctctttcttctttctcctctattacaacatttctactgatgctgcctgagtcatctacctgaaacactgatttttgtctttccattcgagctttttaacctagcattcaatatgtcattttcactcacagccagtgaaaactagtcttctgatatttccagcttgttctctcaattagcaagctagaaaatcctcattaacaattccttcctaaagtgttttctccttcataaaatatctactttattttttttcttccctttacctagctctttctgtcctttattatctggcccaattctcatttccttctttttttttttcttttaagatggagtctcgctctcgctctgtcacccagcctggagtgcagtggtgcgatcttggctcactgcagcctccgcctcccaggttcaagtgattcttctgcctcaacctcccaagtagttggtattacaggcgtgtccaccatgcctggctaactttttatatttttagtagagaccaggtttcaccgtgtaagccaggatggtctctatctcctgaactcgtgatctgcccacctcggcctcccaaagtgcggggattacaggcgtgagccaccacccccggccctcatttccttctaaaggcattcctcgactaatccagttcctctgacctcatgtacctaaactattcccctttctggtctctaatcaaccctagtacttgctttatcacttcgtttttaaatgtattgtccctgcaactagattttgattctgtagaaggcaataactgtgtttcgtgcttcatttgtacctaacacagaatttactggacatcaactagatatttagttatagcgaaatgttttttttttttttgagacagggtttcactctgtcaccaaggttaaagttcagtggctctgtcacagctcactgtagccttgacctgctgggctcaagcgatcctccctcctcagcatctcaagtatctgggactacaggcatgtgccaccatgcctggctgatttttttgtagagaccaggtctcattctgttgcccaggctggtcttgaactcctgggctcaagcggtcctcctgctttagcctcccaattgctgggattccaggtatgaactaccatgcccaggctttttttttttgaaagagggtcttaaatctattgcccaggctggagtgcagtggcacaatgatggctcgctgaagcttcaacctcctgggctcccacctcagccttccaagtagctgggactataggcatggaccactatacctggctaatttgttaatttttttttgtttttttttgtttttttttgagatggagtctcactgtgtcgccctggctggagtacagtgacgcgatctcagctcactgcaacctccgcctcctgggttcaagcgattctcctgcctcagcctcccgagtagttgggactacaggcatgccccaccatgcccggctaattttttgtatttttagtagagacggggtttcaccacattgaccaggctactctggaactccgggcctcaagtgatctgccctccttggcctcccaaagtgctgggattacaggcgtgagccactgctcctgggcctaaaaattttttagaggcagtgttgcccaaactcctggcctcctgcagtcctcctgccttggcctcccaaagtgttgggattacaggcatgagctcctgtagcttatccaataaatgattttgtgtgtgtgtgtgtgtgtgtgtgtgtgtgtgtgtgtgtaatttttctttttttggagacagggtctcactgttacccatgctggagtgcagaggcatgatctcagctcactgaaggcttgacctcccaggctcaagcgatcttcctgcctcagccccacaagtagctaggactacaggtgcttactacacacccagctaatttttgtattttttatagtgatggggtttcgccatgttgctcaggctggtctcgaaacccctgagctcaagcaatctgccctcctctgccttccaaagagctgggattataggcatgagccactgcacccggcctcatttcattctttcagcagtgtctttcacagagcagttgtttttatttttattttattttattttattttattttcattattattattttttgagacagggtctcactttgttgcccaggctggagtgcagtggcacaatcacagctcactgtaacctcagcctcccctggctcaggcagtcctccctcctaaacctcccaagtagctggaactacaggtgcgtgccaccgtgctcagctgatttttgtattttttgtagggacagggttttgccatgttgcccaggctggtcttgaactcctgggctcaaacagtgcacccaccccagcctcttaaagtgctgggattataggcatgagccaccatacctagcctgtttttaattttgataatattgaattagtcaaccttttctttcatgattgtgcttttgctgtcatatctaagaaatacttgcgtaaacccaagaaaacaacacttttctactatgttgtcttttagaagtttatagttttaggtttcacatttagctttgtgatccagtttttgttgagttttgtacaaggtgcaagataataggtcagggttctttttctcccctttcttgtggatgtccagttgttccagcaccatttgttgaaaagattatcctttctccattgaaatgttttggcatctttgttgaaaatcagttcatcgtatatgtgtgcatctatttctagactctacattcttcttcatctagctatgtgtctgtcctctggccaacaccactctgtctttatatagaaagttttgaaatctggttgtgtgaattcaattctccaactttttgtttttcttcaaaattatttaggctcttctagggttttgtatttgtgtgtgtgtgttcatataaattttagaatcagctccttgttttctacccaaaacaaaaaacaaaaggccctattaggatttggattatgatgatatatctgcagatcactttggggaaaactgacatcttaacaataatgaatcttctaatacaagaacatgatatatatcttcatttatttaagccctctttgatttccttcatcagtgatttatagttttcatatttttttccatcttttttgttttgagacagagtctcactctgttgcgcaagctgcagtgcagtggtgcgatctcagctcattgcaaccgctgcctcccaggttcaagtgtttcttctgcctcagcctcccgagtagctgggattacaggcatgcaccaccacacccagctaatttttctatttttagtacagatggggttttgccatgtcggccaggctggtctcgaacctctggcctcaagtgatccacccaacctcggtctcccaagttgagattaaaggtgtgagccaccacgcctgaccttttgctagtttttggctaaatattttgtagattttggtgctgctgtaaatggtacttaaaaaaattaatttctggttatttattgctaatacatagaaaagcagttgatgtttgcattttgacattgtatcctacaattgctagactgacttattctggtctttttgcagattccttatgattgtctatgtagacaattatatcttctctgcatagagttttatttcttcctttacaatctacgtaccttttattgctttttctttgctttatttcattgattaggacctctggtatgatactgaatgggaatggtgaaaagaaacattttttgcattattctcaatcttaggggcaaaaatcattttgcctttcacctttaagtggagttgtatatctccttttactagtctaggaagatctcttctattcctgttttttttttttagagtttttacaacattattttaaaagactcctgcctagtgtttcataccattatttatattataccataatttagacaaatttctatttttttacatcaaagttattttctgtaatgagttatgtggctaaagtatttttacgtatctctaaatataaatacatttctaaaagtgtaattactggttcaaaggttacatacacagttttaaagcttttgatacacgttgtcaaattgcccttagaaatgttaacagataatgctcccaccagctaagtgtgtatatacctatttctagaattctcctcagtagtgaaaagaaggtaatttttgactatttgttaaaatagattagtttaattatttctgtcactagttcacagtccttgttaataatttgagaagttgaacttatatattatttttaaaattaatcattacagaaagcaccatattgtcacagttactctaatgcttttttcttttttgtggcccttctaggagctttttagaaaagttcgaagtatcttaaataaattgacaccacagatgttcaatcaactgatgaagcaagtgtcaggacttactgttgacacagaggagcggctgaaaggagttattgacctggtctttgagaaggctattgatgaacccagtttctctgtggcttacgcaaacatgtgtcgatgtctagtaacggtaagaagagaggaaggagtaaaacgagaaatcttcaagaggtatattctcccctcactacacattcttcccagaagtgttattggggcaacataaaggggagaatatatttttagtatttattgatataatattctcattattaaagacaatcttgctttattaaaacgtatactcccctctggaggggatatgaagtctggactgaaatgggcatgagatgggcccattcagcgtaagaaagatagagtcaggtttaaattagtaatgtaaaattatcgtcatgggcaacaaatttttcccgtgtgtctcttatggaaagcaagcaaatgcgtgctttcacatttaattaagtttgaaatttaaaaacacgttgattctaattctaatctctgtgaaaatgaaaggatagttgttctgtagtcaaaaaggtttcaaagctgataatttcatgtcatagaaactgttaggtttctctccgtttacattatctgaagccatttaatctccacagcctgtcaaacctagggcaagacagagagggagaccaaagagcttctggttagtgttcattgtcctctattccacagtcataaactgccatgtatcatctgttttctcttcctgttattgttaccgaggtacttgtgtcagaaatgtctgtcctttaacatttggattttttcttaattattacaactcattgtcgtgccttgctgcttagaaacaagctatgaaaatgcaaaattctctcattctaccaatatttttgactacctatgtcaaaggtaggtaagtcttttggggtttggaaaagtcacatcttctgtcttaaaggaattcaaaatccatttgaaaataagtatttccaagaaaaaaattacttaaaaggtattttgtgatgtagcagtatctcaatgcctgaatggatggttagaccgaaaaataagttggaagaaaaagaaaacactatgttggtgggagagtcacaaaacttttataaagcaaatagagtttgagttggacctgacacaatggggaatacacatttggagaagaaagaacacattctaagcaggctcaagtctgaagcagtaagtgtggctttggagtcacagctctaggtttaaaatttaaagtttaaaattaaattccaggctgggcaaggtggcttatgcctgtaatctcagcactttgggaggctgaggtgggcagatcacctgagatcaggagtttgagaccagcctgggcaacatggggaaacttcgtctctactaaaaatacaaaaattagctgggtgtggtaacaaaaattagccaggcatggtagcgtgcgcctgtaatcccagctacttgagaggctgaggcaggagaatcacttgaactcaggaggctgaggttgcagtgagcagagattgcaccacaacactccagcctgggcgacaagagtgagactctgtctcaaaataaaataaaattgagataagagaagatagtttctactctgccacttcctaactttatgaccttagaatagttactgatctctttaagcccctgtttttaatccataaaatgagattaattcataccacttgtaatattataaggataaaattaattaaaataaatgagattacaaaatttctagcccagtgtttggcctgtagtaagccctaaataaattgaaactatgttagaccttttaggtccaatttgtgaaggttttgaatgttggctatagaatgaggatgattattataataaaaatagtctattcagcacctactaagttgcaatatggatagaggctttatatatacatattatttttaatggttattctaatcctgaatggtcagtgttactagccccactttattgaaccaaaagctgagcttgaaaaggaaaaataacttctcagggtgatgtaactagtaagtggcattgctagaattcaaatcagggattatttaactcaatcacttgccatagtgcctcctgatgtgccatagttatatggaagcaaactaattctccatttctgggctctcattttcattgtggtagccatgacatccatgactcattaaaattaggactagatcccagatcctctggatcacactttaatgctctttcccagttttgaattttatcagataggcagttaagtggtgtttaggtagtttaatggaggagtgatattgatgaaaatggcctttgaaatgatctggcaataagtacaaattggattggaatatgaagaaattatagacaagccacccacttatgagacttttgaaaactttattggattgttttatttatgtattttgcttgagacaaggtcttttgctctgttgcccaggctggagtccagtagcatgatcatagctcactgaggcttcaaactcctgggctcaagcagtcctcctccttgactataggcacacaccaccaccaggcctggctatttttttatttttggtagagatgaggtcttactatttgcccagattggtctcaaaaactcctaggctcaagtgctcttcccgccttggcctcccaaagtgcagggattacaggcaggagccacctcctggcctcctggattattttaaattataagataacaacctatttgaacaagtcaaatggtatagttaatacagttattactctctgcttgcagccccagccagttaatcttccttccctatcagatggtcactgtgaatggttttgatgtaatcatctatagttttcttcatgtttataaaatcacatgaaaatatgagtatgtataaagaggtttttttggttttgctttaattgaattatataaattattttcagtttgtttttttttttttttttacttaataaatgttttgggcagccgtctaggtcattacagatagattttactcatacttttatactaattgcataatatttcataatatgcatataccataacttgttcaaccatctctcttctctctctatctctctctctcatatgttcatttatccttgtattctggagcctgcctccctccctccttgtctttttttttttttttttttttttttttgagacaggctctcactctatatcccaggctggagtacagtggtgtgatcacagctcactgcagcttcaaactcctgggtccaagcaatcctctcatctctgcctcccaagtagctgggactacaggcacatgctcagctaatttttgtatttttttgtacatgtagggttttggggtttcgccatgttgtccaggctgatctggaactcctgagctcaagtgatctgcttgcctcagccttccaaagtgttggcaccatagacgtgagccaccatgcctggcctctttcttcttttccttccccttccctttcctttttgtcttgctctgtcacccaggctagagtgcagtggcaggatctgggcttactgcaccctcaaccttctgaggtcacatgatcctcccacctcagcttcctgagtagctgggaccataaacatgcaccaccatgtccagttaatctttaaattttttatagagacagaatctcaatatgttgcccagactggtcgtaaactcctgggctcaagcaatcttcctgcctccttcccagagtgctgggattataggcgttagccattgcacctgacttttatttctttagtgtatgtttttaatgttttaaacttttttattgaaatatgactaacatatgtgctttctgggttgaaattcttcatttgttgcatttgccaaatttaatgatgtaaatgctgtcctcaggactatttgtaatctactgacagtttgacaagactcacaaaattactgttaaacagttgtctgtcataaaccaatatgaaccagcttcaacacaccaatgcaacatgcttacagaaaggtatacaaatcattactgtacagctcattgtatgtcagtgaagtgaatacaccttagacccttttcaatactctttagtcttttttaaaggtaactaggaccaggtgcagtggctcatgcctacagtgtcaacactttggaaagctgaggcaggaggatcgcttgagcctaggagtttgaggccagactgggcaacataatgagactctgactctacaaataaaaaattaaaaaatgagccaggcatgatagtagtccacctgtagtcccagctactagggaggctcaggtgggaggatcccttgagtccaggaggtcacggctgcagtggaccatgataatactatggtacttactccagcctggtgacagagtgagacctagtctcagggaaagcaaaaaaggtaaccactgtcctgacttctgacactgtagttgattacttttgagggattgagagactgaaataaaatggtaacagtgaacatagaaacatagaatcctactacacacatcaaacattatgggattattaaatatctaaatttgaaaagctaaccttttataagaatatcaaggaggctattttcatgaacttttgagtagggaaagatttctttagcaaaattcaaaacatgaaggataaaggtataagatttgactgttaaaatttataatctttgatgcagcaaaagatactataaataaatacaaagataaaaccacaacctaggagtatctgtttggagtgcattaactgacagaatattagaatccaggattaaggaagaaaaagaagcaaatcagtaggaaaaaaacagcctaataaaaatatgggcagttcatagaaatgaaaatccactgggtgataaactttagaaaagataatcaatgacagcacttctcaaaataagacatttacgcggccaacaaatatatgaaaaaaagttcaacatcactgatcatcggagaaatgcaaatcaaaaccacaatgagataccatctcatgccagtcagaatggcgattattaaaaaggaaacaatagatgctagcaaggctgtggagaaacagaatgcttttacactgttggtgggaacgtaagttggttcaacagtatgacgattcctcaaggatctagaaccagaagtaccatttgacccaacaatcccattactaggtgtataatcaaaagaatataaatcattctactataaagacacatgcacacgtgtgtttattgcagcactatttacaatagcaaagacatgaaaccaacccaaatgcccatcaatgatagactggataaagaaaatgtggtacatatacaccatggaatactatgcagccataaaaagaaatgagatcatgtccttttcagggacgtggatgaagctggaagccatcatcctcagcaaaataacactggaacagaaaactaagcactgcatgttctcactcataagtggtagtttcacattgagaacacatggacacagagaggggaacaacacacaccagggctttttgggggatgggggttgaggggagggaacttaaaggacaggtcagtaggtatagcaaaccaccatggcacatgtatacctatgtaacaaacctgcacatcctgcacctgtatctcgtggtttttttttttttttaaggaaaaaaaaaagacattcaatgttattcattattagggaagtgataaactaagaaaagataaaccatagttctgtaaaattcacccccactagattgaaaaaaaaatcccattttaaatgtttttaaagacgaatataaccatttatgagggcaattgggcaataatgttgaagatgttcatgtactatgcaataacatcaaattgctaaatgtaccagatatttacaaacgtgaaacaacaagaactctcgcatactgattgcaacagccactttggaaattgtttagcattatatactaaagctgaagtttttctgccataactagcatttcaattcttaggtatatacacaaccaataaacatacatatctcatatgctaggaaatatatacaaaaatgttgtagcattttttatacaggaaagaaaaatgaaaaaatgcctgttgatagtagaatggataaatcgtagcatgtttatacaaggacagtgaatctgaagtacaactacatgggcatggattctcacaagagtaagtttgagtaaaagagggcagacccaaaaagatactacatgatttgttatttaatgttcaaaaatgaaacaaaaactaactttggtgtttggggatacctgtctatagtgttaaaggttgcatgttttctttgtgaaacaaaagcaaggctgggcgcagtggctcacagctgtaattccagcactttgggaggccagggcaggcggattacctgaggtcaggagttcaaggccagcctggccaacatggtgaaaccccatctctactaaaaatacaaaaattagctgggcatggtggcgcatgcctgtaatcccagctacttgggaggctgaggcaggagaattgcttgaggcaggagaattgcttgaggcagggaggttgaggttgcagtgagctgagatcatgccactgcactccagcctggccgacagagtgaggctctgtctcaaaaaaaaaaaaaaaaaaaaaaaggcaagaaagttataaaagtctaggaggcttttgtataactttggagacaaggggttgtggatgtgctttggaaggaaatttaagtggagcttctgagaagctttcagtgttctgtatcttgacctggttaccatacctggtggtatttatggagtttgctttttcataatttattgctgaaccttaaaaaatttttgaaacaaaaacaagcaatagagtgaaaagcttaaaaaccactataggcttttaagttttactgtaatatttagtttcttaaaaactgaaaaagtggccagctgtggtggctcatgccaataatcccagttggggaggtcaagatggaaggatcacttgagcctaggagttggagaccagtctgggcaacatagtgagaccctgtctcaaaaaaaaaaaaagtgtgaaaaagctgggtgtggtggcatgcacctgtactcccagctactccaaaggctgaggcaagaggatcacttgagcccaggagttcaaggatgcagtgagctatgatggcactgttgcattctagcctgggtgacagagcaagaccccgtctctaatatatgtgtatacacacacacacacagattttttttttaagcaaaagatctaaaacaaatatggcaaaatggtaagatttgacacatttggacaatggatacctgagtgtgtgctatgttattttgtactgttggaaaagaaatgaattagctgggcatggtggcgcatgcctatcacgccagctacttgggaggctgaggcacgagaatcacttgaacccaggaggtggaggttgcagtaagccaagattgcaccactgcactccagtctgggtgacagagcgagaccctgtctcaaaaaaaaaagacagagaaaagaaaagaaatggagtctacccaattgctttttcaagatgacatgtccacgggccagtgttgcccaaaagtgaaatgcccaaaattgagctgttagtatgtgtttcagcaatgctggcataagcagatttgtttccttcaagcccctgtttactatgctaatgtttcctgtgaagtcagacaggaaagatctactgtatacaacattttccaaacctctagaccacaggcatttaaaagaattcccttaaggtaattattagcttgaaaaataatacctcccaacagaatcaaagaaactgaagacagtgaataaaaaattgaactagtatctgggagtctgatctcaaccagggacattccctcccacccccacttcaggacatttggcagtgtctggaggccttcttggttattggtatggcatcttagtgggtatggggtgaggatgctgctgagctttctatagtgcacaggagagccctccacaagaaataattatcctaccccaaatgtcagtagtgttgaggtttaaaaacccagcctagattgttgagattgtaagatttaggagaatatgtgttctcattgtttagagcagttgttaagccatttttctctttccatgtcattcacattgattgcacacctccatttaaaacctcttttgtaactttgcagtgattaggtgaatcctagagtataaaattattttgtttgttaattttttcttgaagtcttaaagggtaggcctttaagaaagattcttttagatttatagaggaaattgatataatggattcagctttccctcgttgctctgtagtactgtatacacacacatacagatacatatgtacatatccatccatatatgcagctgcctgtgtccaccaagctctactaaggcataccatacaaggcttgagggaatcataagacatggtcaactccacctctggagtattttgctgcttctgctagttcaactggaaatgactgaagaggcctgtgagactcccttcatgaataataaagcatttaactagaattcagcatttctttttggaggaggacatctgaattaagtggcaggtgaggaagagtggacaagagaaatgttgtcctgtatctaaatctgtacttaagtacaattttaaattggattattgaaactttaaattgctgtgcttttgtcttaattataattgaaatgagaatcctcatctcagaacccctctagaatataaactccaaggaaagggactttttctgttttgttcactgctgaattcccagtgcttagaatgattcttggcaggtaatagttgtgagtgagtaggtaaatgcctgaatgaaagaataaccaacttgaatgagtttcttttatgccctgagactgtagttttgttactttttgtctgtgctgtgggagacatacatacctcagctacaaagaatggcactaaaggcagatttttaagcattctgtatactgttatgccagatacagagcttgtagtattgccactttaagtgtttaaaagcaaagcatgaggagaatgacaggactgagaataggaagagacaccgagagaaaaagagaggcagttaaatcccataaaaaataaagcccggaattgcagacatgacaagtcagccttgggcaacagcgagtgaccggtcaactggaggaggagggatttgtaactgtcctgatggaagattttataatgtgttgaagaaaaaatgatcagagatgacttatactttcataactgaccactcccttttgaatcttgtgcatatcctttaacactatacctcttcaggtatatctaacagagatccattttgatagatgtgttcatagtatgcagagtattatgtacagttttggcaggttaaattgcctaaggtcacgatataaccactgatagaaaatagtatgtcaccatggacctgagagttatgttggtttattaaacaatttttttttaattaccatattgctgtttacttcactttttttttttttttttttttttgagacgtagtcttgctctttcacccaggctagagtgcagtggcacaatctcggctcactgcaagcttcgcctcccgggttcaagccattctcctgcctcagcctcccgaatagctgggactacaggcgcccgccaccacgcccagctaattttttgtatttttagtagagactgggtttcaccatgttagccaagatggtctcaatctcctgacctcgtgatccacccgcctcagcttcccaaagtgctgggattacaggcgtgagccactgcacccggcctatttacttcacatttaagagcaaactgtccttggccaggagtagtgacacatgcctataatcccagctactcaggagacaggtactcaggagacagatgggaggatcacttgagccccgaagtttgagactagccttggcaacatagggagacactgtctccaaaaaaaaaaaaaaaaaaaaaaaattttaaagtaaactatcctctagaaaccagagttttagagttagcacagaggtgccatttgcttacattatcctattcattacaaatactttacttcagactagcacatgatttgggggcaaaactactgctgggccatgggttgccattaacatctttatgttctgagacagcattgaaaatcctgaacatgccaagccaaggccaggacttaccattccattttcatttctgtttgattaccataattactacactgctgacaacccttgatgattctctagaatttgatccttttggggataagcatgtccaccctcaatactaacaaatatgtcagcagtataggccctgttgcttgaagaaaattactacctgatgctgacaacattcatatctaagattgctgagtgacctgtatgtggatgggtctctttacactaatgccacattgttagtttactactgtgtaaaaataaaaagctaggtgctttctagtgaattcagcttatcaagcagccttcctaaaacattctcaccgactcccttgctccctgagaaaaagaaacccgtcccgaacaacccatttaaacacacacattttagtgctgatcatggactgttaagtgaaaattgcagttgtctaaatagatccttttcccactgtcacatacctttcattcttgctattatccatgatcatatttgcatgcatctgccttgtccactgttgtgtctctgaaaaatcatagtttgaagccctgactcttactataattacattaggaggtgggtggggggcagtaactaggtttagttgaggtcatgagggtggagcccacacaatgggattagtgcccttggaagaggaaacacctgagctgtttctctccctgtcatgtaaggatacagtgagaagtcagccatttacgagccaggaagagggtcctcaccaagaacttaatctgccagtacattgattttggacttcgcagctttcagtactatgagaaataaacttccattgtttaagccacccagtctatggtattttgttatagcagcccaagcagattaaggtatccactcttcatgttctgttccaactaaccaatctcagtgggtctcttgaccacccagtgtccagcagacaacaagtgctcacttacagccctgtcaaatttaccatcccctaaggacaaaaaaaaaaaaaaaagaaaatcaccatgaatcactattctcagaggatatgttctcactggcccctttccatatttccacagccctgttaaccatccccagagggtattaagatcatattccaaaacaagtcttcaaggagctgtatagctaggtattcattcattcagagatacatttttgtaaatctgtagtcattctgctagttattcagttttaatacttccatgtgaatatatctgaaaagtttatgcatgattacatgttctttatgccccaattcatgtgaaattcctcttgaccattattttgggatagcagacttttgtttctcttgcattttgtgattttctctttattgcttagtgagctaactttgctttatcctttctttgatagctatgttattacaatatacgttactcttaatgtttaatcataggcctgtcaaatgaagtgtttaatatagccatactagttgtttattgggcccttactgtgtgtcagccactatttgcttttccttagatacctcatttgatcctcccaataacacctcctaagagataggtataatacctcaccccatttttgaaatagaggtttggggaaactgagtgacttggccaaagtcacatggcagagctgggattgtgactatgtccagagctcccttttcaccagctattttatcatgttccttaatctacagtcattttggaatatctcattctgcaggtgtaggggctgaggttcagtgaggtaacttgctcaaatttacatagtagattaaagagctgggattcagtttctgattttgtgactcatattccagcactctttcgatttcagttacagcttatttatctgtggcttattaaagtgcttccatgctgaatgctcaagctgccctctcagatggacatagaggctgtacctcccttgttttagatgacaaaactgaaacttggattaaaagaattgcctttgtttatatagcaagtaagcaaaacttttgatacttaacccagctcttctaaaatagtcttccctgcacttctcaccatatggcagtggcttagattttcatattgtttgttgtcctcatttctctcttttctacacagtaaatctgtaatgtaggaaacttctctttagagatgatagattgtgggccggactattattttcttgtcagtcagttatacacttaatgtcaatacagatgatggaggtaaatatgccaagatgctggctaggattttgtggctggtttaacttatgttcctataaagcagcaaattggatataactgctgatgtttagaacctttagttctaaaatctaatgtcatgttggtgctcttgtatgccaacctgcttttgaatatacttcttggttctcttttgtatttcttagtccattattgtgtattctgggtcttatataagagaaggtagaatcaacttttggcttttgctttggaaaactcttgctttcatgtagcatttcttttcttgaaggctgacttgtgtgactttagaataggcctgactgtgaaattatctatagttgcttgcatttatgtagcctaaatttggagttaaggatacagtagccttttctctggttgtctaaaaaattatctgaaaatgttcccctcttcctaagataatgtctcctgctgaaaggaaatatgcagtgtaacacatggttgattattactggatctgttaaatgatctttcatacatcgtagggaatacattggagagtgtgccatcagttctagtacaaatattctagcatcatcatcgtcagttctcaggaagtttctctagccatccagccttgatcaacagctgaccaagtgcattctggttgataacattaattattttgtgagtatggatgcagtgtacccagttttcacaaagatcttctgttatacctagggcaaagaccatacatacatttcagaactttgggagccactttgtcatcccagaaaaactgttgtatcatattatgaaatagctgttcaaaatggtgctcagagggatgtcatctgtaaattagaatattttagtagaatccctgctgcagtctactgtctttatattctaaatatgttcataagaatgtctctgtgtttggttacaagtaaccttgagctattacaactattagaaaacaattattattggatttggatggaaaccttgtaaggatcttgcttccaaacttttggagaactagtatattctcatggcacataagcaataagcagtaaacatactatatttatagtcaaggtaagtgctaacattatgacattccccaatgaaaagatatctcaaaaatcccccagtatcccaacttctgcataaatacaataaggatctcacctacaacagttttgcgataaccagcaaattctcccttgtcttatgtcatttttgtgtgttctattaaaccaaaatacttattacaacggtacttcttaaaaaaagaagtaataactctacacagttttttttttttttaaataaggtctagataagttcagagttatagttgcaatgatatgacaagggtttccatgttagctagtagcatggctaaaaaagagtacatttatatgagaggaatgtgtgtcttttctaaataaaatttaagacatattactgttgaatcatgaaatgcctgaagctatattgtttgcctcttatagaatgcttacctgtggttcagtcagcattatttcatacaataaagcaaacagatatttttaatgtctttaagtaatcttgttgattttttttattttcctgtctggatgtagctgaaagtacccatggcagacaagcctggtaacacagtgaatttccggaagctgctactgaaccgttgccagaaggagtttgaaaaagataaagcagatgatgatgtctttgagaagaagcagaaagaacttgaggctgccagtgctgtaagtattttcatagaaagacagtgcttgtacactttgagcactgtaaagtagaaatttcaggaagctagatacagcatctccctgctaccttaagagggacctatggcctttttttttccatgtagaaacaacatattaatgtttaggggaatgctttgttccttttagtgcctaatataggggacagctaaattttccatgccagccattcaatctaagcctgagtcaggtcactgagttccaaaaatctgaaatggatgggtatagttcagttttctgagcagtagattctacacttgctatcagattctcacggggattctgaccccatgaatctcagtgtttattgtgcagtacaactttcatcatcaagatgctattattcctccttacacaacagccagaggagaggacaaggcttcatgatgaactggaagaagccaaggacaaagcccggcggagatccattggcaacatcaagtttattggagaactctttaaactcaaaatgctgactgaagccatcatgcatgactgtgtggtgaagctgctaaagaaccatgatgaagaatccctggagtgcctgtgtcgcctgctcaccaccattggcaaagacttggactttgaaaaagcaaaggtaaaaatccaaaagctcagaaaccttcgcaaaggctccttgtcagttgcaaaagaacttagactgtcaacagaatagttctatcttttcccaaaggtctgggctgtttatttttcttcttttgcccgtctcattgtcagtgttcaaccatcgtgctccttacatttccatcagagtcagagatgaggagggtcccaaattgtgtaaaagccagtttgtagattcttcagattatttgtcccatattcttttttcttcttctgtaaccatttcccaatttgggaacagaaatatgcaaagaaaaactatggcctaagggtagtgcagaaatgaagacccagtagtgcttctagagtttatactctaattgatgacacagccatctaaccataatataagaaatcattaaaaatactgtaataatgtatgctatttaaggggtatagaaattagaaatgcttcaaagaaataatgtcagaaacgctccataacatctgattcagctaggattatgcttagctgtgacagaaaacccagtggtttatacaagattgaggtttacttcttatttatgtaaacaaagctctgaggtaagtcctttcagcttaacattctgtgactcctaaagtttaacccttgtcctaattattctcaccagagaaggtaggaaaaggggcaaaagacacagccacctctctctctctctcttttttttttttaagtaacagggtcagccgggcacggtggctcatgcttgtaatcccagcactttgggaggctgaggcgggcagatcacctgaggtcaggagttcgtgaccagcctgaccaacatggagaaatcccgtctctactaaaaatacagaattagccaggcatggtggcgcatgcctgtaatcccagctacttgggaggctgaggcaggagaattgcttgaacccgggaggcagaggttgcagtgagccaagattgcgccatcgcactccaggctgggcaacaagagtgaaactccatctgaaaaaaaaaaaaaaaggaaaaaaaaaaaaaaggtaacagggtcttgccctgtcacccaattttttttttttttttttttttttactttttgtagagatgatgggtctcacttagttgcctaggctggtcttaaactcctggcttcaagcagtccttttgccttggcctccctaattgctaggattacaggtatcagtcactatgcctggcccctctggtctctttaggaaggccctaggaagctatagcataacatttccatttatattattgcctatcattaatcacgtgaccaaagccagctgccaggagcctagaaaaatgtagtctttattttaggtggtcatatgaacaactaaaaattctaccatatggccgggcacagtggctcacacctataatcctaatactttgggaggctgaggcagaaggattgtttgagctcagcagtttgagaccagcctgggtaacatagtgagatttcctatgtccaaaaaatcatacacacagaaaaatttagctgggtgtagtggcatatgcctgtctgtggtcccagctacttgggaagctgaggcaggaggatcacttaagcccaggagattgaggctgcaatgaggcataattgagccattgcactcccaactgggtgacagaacaagaccctgtctcaaaaaaatacaaataaaaattctaccacattatattttggctataaattgatattcctagaccatttagaaaactacatgggctggacgcagtggctaatgcctgaaattccagcacgttgagaggccaaggctggaggattgcttgagcccaggagttcaagaccagcctgagcaacataatgagaccctgtctctacaaaaaattaaaagattagccaggcacggtggcacgtgcctgtagtcccagctactcgagaggctgaggtgggatcggttgagcctgagaggttgaagctgcagtgagccgtgattgtgctactgcactccagcctgggcaacggagtgaaaccccatctctaaaaaaataaatagataactacataaataaataactgtaaattggtaaaattacgtttaagtttctcagacaggagtactaatgattttgtctcttgcagccacgtatggaccagtactttaatcagatggagaaaattgtgaaagaaagaaaaacctcatctaggattcggttcatgcttcaagatgttatagacctaaggctggtgagtgggaaaaaaaataataataagcctgctggtccagtctctttaaaggaattgggttggggaaggatgtcctgttgtttacatgtgtaaagatagtgcttttgcttcaggactcagaatttggattggcaaactttccgtgggagagttctgagaagggacaaaaggcctattgccagttacgtgcttcttctccttattctgattatcaaaccatattgcaattttgtttgcgctttgtttttttttttgagatagagtctcactctgtcgcccaggctggagtgcagtggctcaatctcggctcactgcagcctccgcctcccaggttcagatgattcttctgcctcagcctctggaatagctgggattacaggcacatgcccccacacctgggcaatttttgtatttttagtagagacaggatttcacgctgttggccaggctggtctggaactcctgacctcaaatgatctgcccacctcagcctcccaaagtgctgggattacaggcgtgagccaccacgcccagccacttgcaatttgtaatcagccattctgaattcaaactccattcaaatgtaaattcaattaaatttagtctttgtgagctaaataatcagcaagtctcatctccacagtaaatacctttaactctctgagccttacatttttaatctctaaaatgaggatgttgcctaccttgcagatttgttgaagagtcaatggaataattacgtaaggtgcccagctcagatattggtgttttcttctctttcgtttttcctgtgaccctcctattctgctgctgggttttttttgtttttttgtttttttgtttttctcatttctcttaccgggtgcagtttttgttactactacttttctctgttttaagtttaactcctacagggagttactcttttgtaagtttcactcctacagggaatatactacatcaagccctacactagagaaagtgaacaaagccctacctcttatttctcctccacccaggccagatagcattgatgatgattctttatcttgctaagactagatgtggttgtcttcacccatgttatcaaccacttatatcagatgttgggactgttgctagaaagagaagggagaagtataaagtgacaacttattttgtccttaatacaggggataaccaaagggcagagtggtatggacctttgtgtagaatatcagaaccatgatattggagaaataaaagcatgagtcatccttgacttagaacccctatggaatgtgatatgatctgagtagtaatcccacagattaaggcaaggccaaggaatcctcatcatttttatttttctctcctcctttcaaatgtacaaaatactgatacagataaaatccatttagtccacagagaaatatatgccatgcttaaaaatataataataaatttgggccagtctttcaccctgttctttgtatccattggctattggaatatgtagtatacaattggccagttttgactgagaagattttaatccttcagctctaatcctaaactgctcatagtgtcatctataagatacatgagaaactgccataatacagcttttgtaggtattttgtacttttccagtagtaaaaattgctaatttttaaattttaaaaaatgttcagtttatctggcagataaccttattttctgcttttatagtgcaattgggtatctcgaagagcagatcaagggcctaaaactatcgaacagattcacaaagaggctaaaatagaagaacaagaagagcaaaggaaggtccagcaactcatgaccaaagagaagagaagaccaggtgaggccggaatccaccagggtttagagaacttggaagtttcaggaatacatattaagaattatgtatttaggtataaaatgagatcagaaagaacagcccaaagaatagagtggtgattgttaggtgaagcagtttcacctgaagagtaaagttactgagtaaaagtagagaatgcaggaacaaagcatgatttctttcactacttaaaagccagtaagcaataagactttattgagcatcttctatatactcagaattggtgagacgagaaaaggaagtggaaaatgtagttacttccctctcaaagtgtacagtttatctggtaaggtaaaacttttgacaagcaaaagaggaacatttgttaagcaaatggaagatagtatatcaattatgaaatgtgttctccattaactgttaaaatttagagaaaaagaagagagacagaaagctgaaagaaaactttatttaagaaaggggcactttgtagcaggccggacgcagtggctcatgcctgtaatcccagcacttcgggaggctgaggtgggtggatcaattgaggtcaggagtttgagaccagcctgaccaacatgatgaaaccccgtctctactaaaaaatttgctggacatagtgatgtgtgcctgtagtcccagctattcaggaggttgaggcagaagaatcacttgaacctgggaggtggaggttgcggtgagccgcgatcgcgccactgcactccagcctggggaacagagtgagactacatctcaaaacaaaacaaaacaaaaatagagacatgcaaaaaaagtgaaagatgaagtagaaggcattttaaacctgagacgatagtccatttactaagtttaggaacgttggaaaagaaaacctttttcagagggaaatgataattttctggctgatagtaaatactcagtaaccattagttattgtcacagacacagtagagctcatagtgaagttgttaggagagatgaattctgcatggaagaaagtttacttttaagtttcttgagataccacacttaccttcctcgctctagtacctagtgcagtgccttttgggtaataacttttatttattattgaaccagattgagagggaaaaggagaagataccaaagcctaattcatggaggatattcacatatgactaaaggaagaaaagaactcttggaaaagtgccagacaagtggagagaaaggactaagatacaagtgtcatagagacaaggaagaagcaagtctgtttatgatcagtaatatcagatagcacggagaaaatcaagacgttatgttaggaccagaaaagcttttggatagacagttcggtgatctttcaatttattaattcattcagcaagtatttttttttgagatgagtctcgctctgtcgcccaggctggagtgcagtagcgcgatctcggctcactgcaacctccgcctcccggattcaagcagttctctgcctcagcctcccgagtggctgggattacaggcgcccaccaccacgcctggctaatttttttgtatttttagtagagacagggtttcaccatcttggccaggctggtgttgaactcctgaccttgtgatccacctgcctcggcctcccaaagtgctgggattacaggcgtgagccaccgcacacggccctcattcagcaagtatttattgtctgtcacttaacaaggcactcaaagtcccttccatcatgcggcttacatcttatggtagaggggagagaggagacaataaataataaatacttaaataaaatatatcatttgtcaaataaatttgtagaaaaacaaagaagggagaagggactagggagtgcaaatcttggtgagtagggtgcagttttaaacaggaaaactggggaaactataaaagttggtattgtttgagcaaagacctgaagcaagtgagggtgttaaatcatgtggaaatctggggaaagagacttttaggcaaagggagtagtaagtacaaagaccctgaagcagcattttcaaggaatagcaagggggccagtgcagctgaacctaagaagggcctgacggggagagtggtagaagatggggacttagaggcagcaggagccagattatttagaggccatttgtaaggaatcttctctttttctctgaatgagacagaaaggtatcagaagtgttttgaacaaaaaagtgacgaattttgtactttactaggatcacactggctgccatgatgagcacagctgaaggtagaagcaggaaggccaaaacacgtctctgcagtaatctaggaaaggggtgttggtggcttaaacaaaactgctaatgttggtagtagattctgaatgtattgtataggtttaactggcaaggtttactgacaaaaattggatgtgaagtgtgaaagaggagtcaaggttttccacctgtgcagctgaaatgttggagaagcagatttgggaaataaagcatacttctgtcatttgatcccattaaatacaatatactttagaataaataatttccatctgacttctccgaaagtgttctagtcattaattctgtgaatactggatttagccctgccttctccagcaccaggtattcatttgtgtcagttgtttgtttctaggtcagtaatgtttcatgggtgatccaaaataagcagtgcttctgctgatacagggtgcttctgctgatacagggtgcttctgcttatattttcctgccatgggattaaagatattgtcatcaatgctttaacatcttctgttgtctttctccttggttttgatgaaaatattgctcactctttcaatgtaaaactgacttgagacagatgagagactcccactctgttctccctgcaggtgtccagagagtggacgaaggtgggtggaacactgtacaaggggccaagaacagtcgggtactggacccctcaaaattcctaaaaatcactaaggtgagtctgacatttaaagtacaatttacgctctcctttgatgcctttgatattaaaacacacacacacacacacaatttacaatagttgcaaaacgtgtctcaaaagtacttattaaagtaaaacagcaatattgcaaatccatggggtggttattttttaatgcatttttcttcaagttactattgatcaatgtattctacaaactcatttctacattttctttttttttttttttttgagatggagtctcactctgtcgcccaggctggagtgcagtggcacgatcttggctcactgcaggctccacctcccgagttcacaacattctcatgcctcagcctcccaagtagctgggactacaggtgcccgtcaccacacccggctaattttttgtattttttagtagagacggggtttcaccgtgttagccaggatggtctcgatctcctgaccttgtgatccacccacctcggcctcccaaagtgctgggattacaggcgtgagccaccgcgcccggcctcatttctacttctataaggatttactaaagaggaaaagactaggttacttcttagacataagatgcttaatatacaagaggtaataacaaagatattttagaagcctaagtcaattgcaggcttttacacaatgtatccgtagctctggggaaaaaagcaatcacctgtttaaacctaaccatgaaagatttgccttatccaaggcgtaaaggaaaccacagagggcctactagaaatcattctgtaataaggatttaagagactctgtctgctttcctctctttttgagagtctgtgggcagtaagaggaaaaaactttctgtagcaggtattttcagcagtaaaagttgatcattgtaaggaggatgaagaactttggagaatgtagagaaagcagaattaaatatgataagagtggaaacttctaaagtccagtgggttttccaaatcatttgcaagtctagtttgatccttatacttcccatagttctgaaaatcggcaccctgctagcaaaatactgaagacaatcaaaactaatgtgaaaatactacatgaaagaagataactgacaagaagtattaagaaaagtctttaagaaaattggaataaaatgggctatgtcatttgcatcttcacagttttgtcaaagctttgcttcatgatagaaaattctccttctgaatctctcttaataatgtaattagctaggatccttttctccaagattctggtactttcttctagttgtttatatctcagagtaggaattccattgctgaatacaatttgagtcttacccatctccatttccatctagagacagttttaactaaaagtttatgtttaaagaagtcctccagcattttgaaaaatgtgtcggtatttaataacaacatttgtatttttaaatattatgctttccgtgcttggatactataaaaacagtgctggtatcaaacctccaacattactaccttaatatttttaagtatgtaaattgctaataaactttgtgtattcagatagttatactggaggtactatacatgggtatcctagaacaaaaccgttatacatatttattgttaattgggagtggtttgtgtgaaagcatattacatagcatagcaacatatatattatgagctgtcagaccatagaaataccttttttacaaagcgctacattacagcttttatgttatatgtattttataataatatgcattacagcgtaattttatttcacttgtagtaaagttgtgcttggaagattaaacatgagatatcaggcaccttaacttcctgtgctccctgcctaacattccaatctctttcttcttattctttattgaatactcacatcccactgcctgtctctagccaacatgaaatttttatgtctgttgatctgttttctgacagtcatgtaaagacactaatgaattaattttgtagtatttgtattttttatttttaaaattaatgggtattgtacaagaagaatgattagaaactgcttattacagttagcaaattcataaaccatcttaaacaggaggacctggatgcattctctagaccaaacagttttttgtggaaactggagtccagggaagtgcttcaggggccacatggatcccagtttaatgagaacagctccaatttctgtttctattaaattggcattccaaacaaatttttgttgctaaaattggttctacttcactgaagaagaaaaaaataaaagaaaaactattcttctagaatatttcctataattgacttgtggtcccttatgttacagcctacaattgatgaaaaaattcagctggtacctaaagcacagctaggcagctggggaaaaggcagcagtggtggagcaaaggcaagtgagactggtaagtgtgtgtgtcccttctcaaacctggctgtggcttgttagcatttgccttacagcgcattcccatagtcatcgaatgatggtttttgggaaagatgtgtagactaatcatgcctaaaattttattggtagccctttcctttcaacatagatcctttctcaggatccttaaataattttaagtatttttttaatttcaattcattcatttagactatttaattaagacctttatttatttatttatttatttatttatttatatatttttgagatgggatcccgctctgtcacccaggctggagtgtagtggcatgatcacaactcaccacagcctcaaccacctaggttcaagcaatcttcctgcctcagtctcctgagtagctgggactacaggtgcacgccatcacacctggctgatttttttttttttttttaattttttgtagagatggagtctcactgtgttgcctaggctagtcttgcactcgtgggctgcagtgatcctcccaccttggcctcctgcgtgctgggattacagttatgagccacactcagccactaagaccttaattttttaggttccctttttgttgttgttcacaaatttaatatagctagagaaattactgggaccctaaattaaaagggaaactcattatgctgataaaagaatcttaatatgcagagcatttactataattttagggagctgtaaaagaataaagaaacattgttcaaaatctttttcgaaaatcagattttgagagatttgacctcaggaccaaagatgtttggatctcacaaacacatcttactagcttgaggaagcccaatggaaagaaaaaaaatttaatgttaacctacttcctatatgtcccttctactaagtaatttcaacctttttttctttaaattttaaaaaatgtcattattcagtaaaacccacatgcatatttgtgcacaaatgagattggagcatttgtgctggttagctttgttaaagttttgttctgttttcgcttgccttcctcctcctatatgccactcccacccctgtttactatgtttttaaaggaaccaatggttgaaataaataaagacttctaaactctattatgtgcaaattccctctaacactttgcttctcagaatatggtagagggaccaggagatgggcgtcacctaagcttgttaggaatgcctggtctcaggcctcacctagggatgcagatgactgattatttgcattttagtcatgtgatttgtatttttttctaaatcctcgacatgtgtagatgccttacggtcaagtgcttccagtttaaacagattctctgccctgcaacctccagcaccctcagggtccacgccatccacgcctgtagagtttgattcccgaaggaccttaactaggtgagaaccctgctttttatgtctactcaaggctggcccgcttgccagtatgtgtggcaagataagaacaagggttttgatagcaatccttatggatgcattccttttattcctaaagttgatttctttaatcttcacacactataatttctaagataggaacataattgggtggtgaatttgggatgggatgggagggaagggattcttaagaaagctaggcccacccaaacagccctggaggcatgtctaggggctccgcaagctaatcctccagatgttctagaagcacctagcattctcaaccatgggaattaaagaacatgacaatccacccatacatttctctgtcacactcttcatgttatatttgaggttgtccttcagtttttgctagtctccatatttcactatctttctgcttttgcttttctaggattgatacagtcaagtatcctgttggctggtttacataaaatgaatgggcaccctgtagtgcagtcacaaaaaataacattttttacataagcactttcagaattgaagtttctttaagctctaaaactttttttttttaattattattttttagagatggcatcttgctatgttgcccaggctggcattgaactcctggtctcaagcgatgctcccatcaggctttttattattattattgtaataagtttgattaggtagactttgtaaactgtgttcttattcccttgacttctattgaaacaaagtatagttagcacaaggcagcttttcatgatgattcaggttgtcattgagtatcacttgtggcgctttgccctgtcataaatgtcccctaatggttctgcttcctaagcacttgtgtatgttctttcacaatagttagaccattttcctgcccgagtctctccttttcccttttaatttgctgcttctggtctgccacgggccaacgaactgtttgctcagctggttagaattgtctaaaagaagacgaatcaggaaatatggagagtctctcttaaaaggaataaaatatatagcgttggctaatccaagacagcttcttcttgattctcaaatattttccatatgtttaaagattctaaataaaaaggtatcattgcataatttctgagatagtgataccatgttcttataatatttgtttccctttcatttatgtaactcatactttatcattgtcttctttattcctgaaagattttttaaaactaaaaaaagaaattgccaaaattaaggccgggcacagtggctcacgcctgtaatcccagcagtttgggaggccgaggtgggcagatcacctgagatcgggagttcgagaccagcctgaccaacatggagaaaccctgtctgtaatcccagctactcaggaggttgaggcaagagaatcacttgaacccgtaggcggaggttgcagtgagccgagattacgccattgcactccagcctgggcaacaagagtaaaactccatctcaaaaaagaaaagagaaagaaattaccaaaattatcactggctttttttgagacagagtctcactgtcacccaggctagagtgcagtggcgcaatcttggctcactgctacttcctcctcgcagtttcaggccagtctcatgcctcagcctcccaagtagctgggattacaggcacccgccaccaaacccggctaatttttgtatttttagtagaaacacagtttcaccatgttggccaggctggtcttgaactcctgacctcaagtaatctgccctgctcggcctcccaaagcgctgggattacaggtgtgagccaccatgcctggccaccactgacatgttaaagtgttaaatagtatcccttcagagaaaaaagttaaaacatcttaataaatattccctttaaagcactcttttacttgtttgttgaataaactttgaaatataattggtgcctcacacatctaatgttatctgtgaaaaattctgtatactttcagaaagtcttagtgttattttataatttgaatatgtgggggacatgggcttgtctttcctttgaaaagtgttgttttgtcttttaagtcgtggaagtatgggcagggagaagaatgacaagccccttccatctgcaacagctcggccaaatactttcatgaggggtggcagcagtaaagacctgctagacaatcagtctcaagaagagcagcggagagagatgctggagaccgtgaagcagctcacaggaggtgtggatgtggagaggaacagcactgaggctgagcgaaataaaacaagggagtcaggtgagagacttggcttaaacagatgcagatttgggttttaaatttggaaggaaaaataaaaaagagactgtgcctgagtagattttagaattaacacataatagcaacacataccagcatctgaagagttaaagggtacttcatagttttataacagttctcattccctaggtatgccttagctgaacagtttgtaaattttctcctttctctattaaatgttatggtgaggaggtcctcctgctgtattttaagcaatctgaatttcttacaagtccctgtaacatcccacacttgacgttgctgttagattgtgtatgctgtgtagagctcctcaaatgtgtgaaaattctcattgagccactgcaagacaaaccaaagagaaggtattaggttatctttagctgacttcatcttccgtggtaacctgttgtttttgtatgcatttagcatgtatatacttagaggacttgctcggataatgctctaaaaattgcttcatgtatttaacctgtgtttcagtttccttatctgttaaatggggataagttgtacctaccttttcaggatattatgaaaattaaataagaagttaatacacgtaaacacttagaacattacgtgataaatacaaggttttcaaaaagtattaaatgttgtgatgacgaatatagcaatggaaaacagtttaaattgaagattattttcagcctcttttaaatattagtcatgaagtaatagcagttttagttttttagtatttatatagctttctaatttgtttcactatataaattgtatctcttaactgtagtccctaaatggatctcagagacaaattgaagtgtcttctcccaattggtgtaactttagataatacagctttagggacatatggcttttttaaaatctgtgctagatacttttgaaatataacaggataggacataaaatatcttgggtgtaatgaataatgtagcacagctgccctatgtgtttttattgtctggttcatttgtacacttaccagatgcacagtgaatgtgaggcccttgatccctgttctcggccttcagtctgctgagtcagaaagaccttttttagtaattccacgaaagacacaaactgagaaaggtgctatgaaggaaggaatttagttctaagagaatacttagaactatctggtaccaaggagctatgtagaataggggcaaggggaggtttccttcatccgaaggaccagtaggaatgaaacaggttcgtaggcaaggatgggtgtgaaacagagggaaagagcactccagacaggattactgtgagcagagctgtagtaggaatagccacggtttgttcaagcagctgcccaagatcagtgtggctcaagcttagtggcgagcagggccctgacctgtgcaggattgtgaagacctcatgtactcttcatctttgaagcaatggggagcaatcataatacagaaaggaacaaaaaagctttaattaggaaagtttatcatgttcctaaatcttgttcattgttattgtagattataaagttacttagtgcgaatctattctaaaacaaaaggtttctgtattctgtttttatctattaaatgtcttgtagctattaaaataatgtaatagcacataatattgtcaaccataatctcactattttaatagtaatttttattatttttactttttttggggggcctcactaatagcaaaaccagaaatttcagcaatgtcagctcatgacaaggctgcattatcagaagaggaactggagaggaagtcgaaatctatcattgatgaatttctacacattaatgattttaaggtaaatgagattaaaaaaaaaacacacacacagtaagtcctttgatagtatagaataacttggttctggtctaaatcaggtgtcattgtgaactgataagacttaggttgagtaatacaagtcctacacaattcagtttgcttaacgctgatgcatttctgccaagtactctcttttaatttgatactataatttacaacatagagtggtgggcagagagtatgagtaccaatccatccccactaagggaaaaccaaattgatttctatattaaggaacaaaaacaacacattatcattatgaagcatttctggcaccctgtatatagctgtcatggtctttttttttttttttttttttttttttttgagacagagtcttgctgtgttgcccaggctggagtgcagtggcacgatctcggctcactgcaacctccgcctcccaagttcaagcaattctcctacctcatcctcctaagtagctgggactacaggtgcccgtcaccatgctgagctaatttttgtatttttagtagaggcggggtttcaccattttggccaggctggtcttgaactcctgacctcaaatgatcacccacctcggactcccaaagtgctgagattacaggcgtgagccaccacacctggcctgtcatggtctttataatcattctgttatcattctcatattaatcttgaaatatggccagcattactttttctttatttcataaaactgaggcataaagaaacaagcaatgtgccaggtcagacagcctaagccagagatttcaagacaaggccttgaatttgccctttaacccttaccttctctttaatcttcattttgagatagtagtgaataagacatttctacctgaccttgtgaaccctatagtctagtggcagagacaaaccataaacaaataactccactagcagttacttaactgtagttatgataaatgctagtagacctataggtcttaggagaaatccattaatgggatctgattaagtgatgtgaggtcaggaaaggctaatctgttaaaacagtcttatctgttaaagtatttgtcagatatattaactacttttgctgctttggcactatattattaaaaattctttcaagattatttgttttcttggccgggtgcagtgactcatgcctgtaatcccagcaccttgggagctgaggcaggaggatcacttaagctcaagagtttgagaccagcctgggcaacatgataaagccccatctctacaaaaaatacaaaaattagccaggtgtggtggcacgcatctgtagtcccagctactcaggaggctgagatgggaggatcacttgaagcccgggaggcagaggttgcagtgagccgagatcatccactgcattccatcctgggtgacagagtgagactgtctcaaacaaacaaaaaaaaagaaaatattacttgttttcttaacagtgtaatcatcatctgctttccacatataaaaatcaccttggttatctatagttcaatcttctaaagccttcaagcctctgaaattcttcaaaattcagaagaagtagaaggaagtttttgatgatgagtgaggtggaggtgagtgctttgcagaaactgttggaaatgtaccaaagtaaatgaacattaacgggaaatagccaaagaataaacctgatgtactgtgattcatcagttagcctcctggaaaattaggggtattcttataaattggcagcatagcctttttcttgcatggaagtagggaaatgtgaacgaattgcaaaaaaattagaatggccaagaaagatgaaacgccaagacagtaaggaagaaaacagtggagattggcttcagatgtaatttgaaggatgtacaaagtcaatgaataaccctttaaaaggggaaaaatatgatcctgtgatgaactggaggtatagggagtaaaagaccttagtaacacctaaagagtacaataggaggactctttggagaatcatgagccctgggccaggcttgcaatacagaaggggcagaatcgttgtatctttagaatttcattgtgcagtgtacaaagcaactgtgcctgcaatatggttaaaacaggtattaacattgggcatttactgaggacttactctgcgttgggtgctgttgtacatattcggcatgtattagtttgtattgtcctcgtaacattctcctgaagttgatgttattatcatacccatttttcagataaggaaactgaggtgcaaagatgtaaatcaacttgttcaaaatcttaactgctaataagtgccagattgaggattcaaagctaagtttctagcttcagaggagaaaatgctttatctcattacctttggggtattagtgtgtcaggctaaagacttaaagagctgatcttaaaaatattttttccaaatatcttcctattaggtgctattgtttttaacagtgattcaaattaatatttattgagggtttattttgtgcctggcactgtgccaagttcttatacctatattttatatacattcctcacggtaactctaaaaagttaagcccaagagattaagttaaactcctaaactctaaagtagtaagtggcagagccagggttcaaatgcacctctgtctgaccccaccgtgcatgttttagcctctatgctatttatttattgaatacctaagtgtgctagccacattttaggggttatgactgggtataccatatttgtagtgaacaacaaaatctgcttccatggagcttacattccagtggggagatacagacaagtctggccctaaagataggtagtaaattaataaataaacagtagctaccaaaaaaatgttttcagtgccaaaaactaaaattatgtgatttgatggagtcagggaagacaggaagtatcatttcaactaaaagctcaaagacaaaaagaagcaaaccataagaaaaccagatggaagggcgaggttatgaactgctatgacactgtgagtataatgatatagctggaagtattacccttgaaaaccagtgcaagacaagaatgtcctctctcaccactcctattcaacatagtactggccagggtaatcaggctagagaaagaaataaagcatattcagataggaagagaggaagtcaaactctccctgtttgcagatgacatgaacctgtatctagaaaaccccatcatctcagcccaaaagcttattaagctgataagcaacttcagcaaagactcaggatacaaaatcaaagtgcaaaaatcactagcatcagtcaagctgaaagccaaatctccagtgaactcccattcacaattgccacaaaaagaataaaatacctaggaatacagctaacaagggaagtgaaggatcactacaaggagaactacaaaccactattcaaagaaatcagagatgacacaaacaactggaaaaacatcccatgcttgtggataggaagaatcactgtcatgaaaatggctatgcgacccaaagcaatttatagattcagtgctattcccattaaactcccactgacattctacaaagaactagaaaaaagtatttaaaaattcatatggaaccaaaaaaaggagcccaaatagccaaggcagtcgtaagcaaaaagaacaaaactggaggcatcacactgccctacttcaaactatatatatgtattttttttattttttatttatttattatttattttttttcttgagatggagtcttgcactgttgcccaggctggagtgcagtggcgcgatctcggctcactgcaagctccacctcctgggttcacaccattctcctgcctcagcctcccaagtagctcagactacaggcgcccgccaccatgcccggctaattttttgtacttttagtagaaacggggtttcacggtgttagccaggatggtcttgatctcctgaccttgtgatccgccctccttggcctcccaaagtgctgggattacaggcgtgagccaccgcgcccagcctacttcaaactatattacagggctacagtaaccaaaacaacgtggtgtggtacaagaacagacacatagaccagtggaacggaatagagaacccagaaataagactacacacctacaattatcttatcttcaacaaacctgacaaaaacaagcaatggggaaaggattccctttttaataaatggtattgggatacctggctagtcataagcggaaaattgaaactggagcctttctttataccatatacaaaaatcaactaaagatggattaaaatgtaaaactcaaaactatgaagaagaaaacttacacaataccattcaggacataggcacaggcaaagatttcatgatgaagatgccaaaaacagtgcaacgaaagcaaaaattgacaaatgggatctaattaaactatagagcttctgcacagcaaaataaactatcaatcaacagaataaacagacaacttacagaataggaggaaatgtttgcaatatacacatccgacaaaggttttttttgttgttgtcttttttttgtttgttttttgagatggagtgttgctcttgtcgcccaggctggagtgcagtggcgcaatcttggctcactgcaacctctgcctcccgggttcaagtgattctcctgcctcagcctcccgagtagctgggattacaggcgcccgccactacacccagctaattttttgtatttttagtagagacggggtttcgccacgttggccaggttgatctcaaactcctaacctcaggtgatccgcatcccaaatactgggattacaggcgtaagccaccatgcccggcccccgacaaaggtcttatgtgcagcatctgtaaggagcttaaacaaatttacaagaaaaaaaaaacacacactaaaaagtagacaaaggacatgaacagacagtactcaaaggaagacatacatgtggccaacaatcacaagataaaaaagctcaatatcactgattattagagaaatacaaatcaaaaccacaatgagataccatctaataccagtcagaatgactattattaaaaagtcaaaaaataataggtgttggcgaggttgtggagaaaaaggaacacttttacactgttggagggtaaattagttcaaccattgtggaagtgtggcgattcctgagagacctagagacagaaataccatttcacccagcaatcccattactgtgtatatacccaaaggaatataaattgttctcttataaagacacatgcacacgtatgttcattgtagcactattcacaatagcaaaaacatgcaatcaacctaaatgcccatcaacgatagagtggataaagaaaatgcggtacatagacaccatgaaatattatacagccatacaaaggaccaagatcctttcctttgcagggacatggatagagctggaggccattatccttagcaaactaatgcaggaacagaaaagcaaatacttcatgttctcacttataagtggaaactaaatgatgagaacacatggacacgtagaggagaaaaatgcacactggggcctactggaggacagaaggtggaaggagagagacaggatcaggaaaaataactaatggatactaggcttagtatctgggtgatgaaataatccgtacagcaaacccccatgacacacatttacctatgtagcaaagctgcacatcctgcacatgtacccctgatcttaaaagtttaaaaaatatatatcatgatatagctaattgaccctttatgcaaacacagtgaatgaattcccattagaagacatttaatcacttccatttaaatactgaggaatgatttttatttatttatttatttattttttggagacagagtctcaccgtgtcgcccaggctggagtgcagtggggtgattacagctcactgcaacctccgcctcccgggttcaagcgattttcctgtctcagcctcccgagtggctgagattacaggcgtgtgccactacacacggctaatttttgtatttttggtagacacggggttttaccttcttggccaggctggtctcatactgctgaacctcaaatgatctgcccgccttggcctcccaacgtgctgggattacaggtgtgagccaccgcttccagcctgaggattgaatatttgcattcatttacaagtcctcttgaaaaggcataacaatgatgttgattggcttaaaataaggttaaaaaacccacaaggggccaggtatggtggctcacacctgtaatcccagcacttttggaggctaaggctagaggatcacttgagcccaggaatttgagaccagcctgggcaagatatccatctttacaaaaaaatttttttaaattagccgggcatggtggcatgcctgtggtcccagctacttgggaggctgaggcgggaggattgcctgagcctgggaatttgaagcagcagtgatctataatcatgccactacactctagcctgggtaactaagtgagaccttctctctttaaaaaaaaaaaaaaactaaaagacccacaaggatgaagagaccagggaatagacagaagcaacgttctggaagttggaaataagaaggatgagtggtaatttatttaacaaactaagactgtctgtgaggtacagatgtggccagaaacaaaagggaattagttggttaaaagcatatataagaaacattttacagccgggcgcggtggctcacgcctataatcccagcattttgggaggctgaggcaggcgattacctgaggtcaggagtttgaaacctgcctggccagcatgaagaaaccttgtctctactaaaaatacaaaattagccaggcgtagtggctcatgcctataatcccagctacttgggagactgaggcaggagaatctcttgaacctgggaggcaaaggtaacagtgagccaagattacgtcattgcactccagcctgggcaacaagagtgaaactctgtctcaaaagaaaaaagaaaccattttacatgataattgtcttgaatgtttcaaaaatggcaatgtcatgaaaagacaaaaaagagaaaggacgattttagattaaaggaatctgaacaacataacatgtaaagtcgggttctcaactggactcagcaacaacaaaaagctatattagacattcagagacagttgtggaaatttgaatatgtactatatatcaaatatttttattgacattatagtaaatctcttggacattcagaaagaaaacaacaattgatgaatctaaaagtgaagatatgtagttgtatattgtatgactctttaatttttctgtaggcttgaaattttgttagataaaaagttaatgtgagggaggtattaaataaaggagcagggaggaaaaagcggcagtggtgagacacctagatgagccttctcccttctgcatcagttcatcacccttcctacctacatcctcccccttcctacctacatcctcccccttcctacctacatcctcccccttggaagagctactttgctgcaaaggttgaaccaaaagattgtgaattcagggcaccagactaatttccagtagctgagaacagagagatacactgctttattggtgtatcagcaactctggctgaccgactttcacccttcagaccaaagatattgacttggctggatactctatagtaaacaccagttaacaagcacaaattaagaagcataccacaagaacttactaaaagaattttaatgcttaacctaaccatatcacttaaatttaactttcatatgaaggaagacctttttcattgaagattgtgcaaatattaacctacacagacacagtaacctctgttgacacattaaggcttttgaatcatgacattaaatttctatttcataatataccattttcaattttttaaatcagtgatcataaaataagtaaatattatgtagaaaaatacatttgactcaccctttgagtgatgtttaataaaattgttaaactaaacatgttagctttgtaaagatgcatcattataaaattttttttatttataaaaacagttctctggtaaaaactggaaaacctactagataaatttgaaaagggctgtaatgctctttttttgtatgacttttaatattgcccatatcagcctgtaatttactgagctataaattatgttaaacaaatataaacttatatttgaaaactgtcctgttcatggaagtttctactgattctgttgtaagtaaaagattttaaagttatcttaacattctggtaacactattcagattttggagtaaacctttctttgctgttggaacaggaagccatgcagtgtgtggaagagctgaatgcccagggcctactacatgtttttgtgagagtgggagtggagtccaccctggaaaggagccagatcaccagggatcacatgggccaattactctatcagctggtacagtcagaaaaactcagcaaacaggactttttcaaagggtcagtatcctcttcaagagtggtattcagttactaggctcttgggtaccagttaattttcaaagtacttacctctttaagtatttagttttttccatagatgaaaattgtatccactgtaatatgttgatatgatgcaattaatatattgatatgttggttgatgtgatggcattttatagattgtgctagggcataaaggttatcttttggttttctgaatattattgttagatctctatcatgatgtaagtaaggtaacagagaccccttagcctcagggaaactctgaggcctttagcagcccatttacatgtgatccccaaatgttctttgaggaaaaaagcttttctttgtgagaacaattctgaaaaattgtcttaaatttaaaaaccatattctttcaataaaccatggttattgtggctaggaagcacttgtgtgcccactctagcctcatggagaaggttatgtaacttggtgttcttaatgatttagtctatttcaggttggtttcattatgattcttgtcaatggatggtttgataaggtctgcctatctgcctgtcactggtggtgaatcctcatttgatcaggttctggtatatttgtgatataccatcatcacaagtacatggatcaggttccttgtggttcagccacaaaatcttacccaggcatagggtgtataaccaatgtttaaagtgaaatttgcattggtaaaaaattttgttttaggagccatgttgtatcaaatataaacacagagtcacacccagcactgacagatgcccactctctaagggaatagcaactaggatctcctaaggtctggacattggattaacatctgccatctcatcctcacctggacatatgcttattgaatcaaatggcagtaagaattctgtactacttgtaattttcctcttttttttttttttttgccaagctcatgttctcataaattaaatgcacatatgattaaatgccactgtatatttttccgtagtcatttcacatatggcaatccttttagaataaggtaaccattaaatgtcattgttggccaggtgcagtggctcacacctgtaatcccagcactttgggaggctgaggcgggtggatcacttgagatcaggagtctgaaaccagccacggccaacatgccaacatctactaaaaatacaaaaattagcccaacgtggtggcgtgagcctgcaatcccagctacttgcgaggctgaggcataagaatcgcttgaacccgggaggcagaggttgcagtgagccaaggttgcaccactgcactccgcctgtctcagtctctaaaaaacaaaaaagtcattgttgaatttattcgtttgactttgcaagcaatgacagcgttgtcttctaggtcctagaaaatttatacttgcccctaggaccattaaaaagttttcttgccaggcgtggtgactcacgcctgtaatcccagtattttgggaggccgaggtgggcagatcacgaggtcaggagttcgagaccagcctgaacaacgtggtgaaaccccgtctctactaaaaatatgaaaattaggctgggcaccgtagctcacacctgtaatcccagcactttgggaggccgaggcgggtggatcacaaggtcaggagatcgagaccatcctggctaacatggtgaaaccccgcctctactaaaaatacaaaaaattagccgggcgtggtggcacgcacctgtaatcccagctacccggagaccaaggcaagagaatctcttgaaccagggaggtggaggttgcagtgagctgaaattgcgccactgcactccattctgggcgacagagcaagactccctctcaaaaaagaagttttctttcaggctgggcatggtggctcacacctgtaatgctagcactttggaaggctgaggcaggaagattgcttgagcccaggagtttaagaccagcctgggcagcatggtgaaactccatctatactaaaaatataaaaattagctaggcatggtggtgtgccgctatagtcccagctacttgggaggttgaggcagaaggattgcacctgggaggtccagactgcagtaagccatgatcacaccactgcactccagcctaggtgacagaatgagaccacgtctggggaaaaaaaaaagttttctttcagcaataagctagattgctctgaattaaggccatttgaaccagttagtaagacactttggcaaaagttgctgtggttattggtttttaaggccaggatggtttcccagttttaaaagagaagcctccaattcagtccagtaactagccagtgcaaatggtaagagcaaataaaggtatgtacaccctcacaatcagattgaatatggtcctcccagcagacttgaaactataatttcctagaaataatactgttggagtgacgaggatatccatttataaatagttacttattacccagatattatgctacattcctcagaaaattctggaaatgataatggtaaattatcatttaccattttctgtctcttcaaactatactcggaagttgattcatatctataaagatgcccagaagcatagtctacctttattggctataattgaacttgtgagatactagcttagtctctcggatatctcagacatttgcatttctccctttgtgggattctctgaagaaaaaatatcataaccagacgtggctacagttttgttgttggtgttagaattgctgttgccggcaataattaccacactactaccttttatttagacataaaatgaggttaacacttctgtgtctcagcaattacttcatgtttcaccatacctgcttccgtctgcagctagaggcagtgcagtgactccaggcctaaccttcgatgcttagacctaaccagtcttggaccttagaccaagacatgtaaaagttgtactattttattctaaatggagaggcctgacaatttagtgccacctttttctaagagggaaatgtagggattgcttcatgtcagtgtccaccaagagctttcttgcaagcagatcagaatttcacaatcccttctaaagcctgagttataaatggttcatactgtctagagaggccatttcattggagccatgaagataccctgtcttttgcttctttattcttaacctacaaagatagtattgtccttccatagtattgtggaagagcctctgagatcagctgttttgggtgctgctactgcttagatgtcaacttctgaacagttggggaagcagtttctgcctagctcgccaagccaatgataactctgggaaggttagaaagcagaaagccagccaggcgcggtggctcacgcctgtaatcccagcactttgggaggccgaggcaggtggatcacgaggtcaggagatcgagaccatcctggctaacatggtgaaaccccgtctctgctaaaaatacaaaaattagctgggcatggtggcgcatgcctgtaatcccagctgctcgggaggctgagacaggagaattgcttgaaccagggagtcagaggttgcagtgagctgagattgtgccatggcactccagcctggcaacagagactccttctcaaaaaaaaaaagaaaagcagaaagcctccaggtatactggtccctggtgaggtagctactaatctgccatttctccctatagctctttagagtatgcactgctgcaaagtagtaaaatagacaaaagtttcaaataggctttatgaatatagcttttaggtcctttggaattttccttacaagatgttatatcaactgtgagcataatagttgctgtatgtgaaacatatctccgcaaagaaaacatcaagccatcgtcctgatattttcaggacttgaatctaaatactttatgaccctagttaggttggtaggtagataggtagaagcattattgtataggtacatgcacttcaaacagtgtgttgatagtctttttatatcatgatttcagaaaacttctttttaaaaactgtctagtaaatatagttgagtgcagtttgctgttagtcacagaactggaatgactttgaaagtataataaacaaatgaagaccaaggttgtaaaaattagagtggacaatagacacaaaatatgtaccctagaggaagattgatacattaatatttcactttgggagatgttttgttagagaggaaattcttatctcttccttgaatacttttctggaacctttattactgcttacggcaattctacattggtaaaagaccctatgtaggctggacacagtgattcattcctgtaatctcagctaccagggaggctaagatgggaggatggcttaaggccaggagttcaagaccagcctgggcaacatagcaagaccccatctgtaaaaaaaattaacaaaaaaattggctgtgcatggtggcacgtgccaataattacagctacttgggaggctgaggcaggaagattgcttgagcccgggagttcaagctgtagtgaactgcgagagcatcactgcaccccagcctgggcaacagagtgagatcctatctttaaaaataaaaaacactttgggaggccaaagtgggcaaattgcttgagcctaggagtttgagactagcctgggcaacatggtgaaaccctatctctaccaaaaaatacaaaaactctctgggcatggtggtgggtgcctatagctgcagctactcaggaagctgaggtaggaggattgccatactgatcttgtaaaatgacttgggaagtattttctccacttcaattttttggaagaatttgagaagaatttgttcttcttcaagtgtttggtagaattcagcagtgaagccatctagtcctgggcttttttttttttctctctgagatagggtcttgctctgtcacccaggttggagtgcagtggcttcatcgtggctcactgcaacctcaacctcctgggctcaagtgatcctcccatctcaacctctcaagtagctgggacagtaggtgcatgccactgtgctcagctgattttttattttttgtagagatggtgtctcactatgttgcccaggctggtcttgcactcctagacaaatgatccttccaccttggcctctcaaagtgctgggattacaggtttaaggcagtgcacctggccatgattcagtcttgatttgttgtatatatctatgagtttatctgtttttttctagattatccatttattgttcatagtagtttcttatgatcctttgtatttctgtggtatcagttgtaatatctcctctttcatttcttattttgagtcttctgtcttttctcctagtctagataagggtttcttgattttcttcatttttccaaaaatacaactccgagtatcattgatttttttctttcattttttaagtgtctatttcatttatttctgtttagatgtttgttatttccttccctgtgctaatttggggcttagtttgttcttctttttctagttccttgatgtgtaatgaatggtatattgtttgagatcttttttcttttttgatatagatgctcattgctatacatttccctcttaggagcacttttgctgcattctataagtgtcggtatgttgtgtttccattttcatttgtctcaagatattttttaaaaattcctttctaatttcttctgtgacctattggttgtttaggcagatgttgtttaatattcacatatttggatattttccaaggtttctcctgttaactgagttcaagttttattgcattgtgatccaaaaagatacttgatatgatttcagtcctcttaaatttgttaagtcttgttttgtggtctaacatatgatctattggggagaatgttttatttgcactttagaagaatatgtattctgctgctgtttaatggaatgttctgtatatttttgtttggtttaaagtataattcaagcccaatgtttccttactgattttctgtctagatgagttgttcattgtctaaagaagggtattgaggtcccctgctcttgctgtattgtagtctgtctttcccttcagataatcaattgccctatgtttttaggtactccaatttgaggtgcatatgtatttataactgttatatcctcttagtaaatggattcctttatcattacataatgacctttgtctctttttatagtttttgacttaatgtcctttttgtctcatataagtatagctacccctgccctcttttgatttctattttcatgaaatatctttttccttctcttccttttcagtctatgaatgtccttagtagtaaagtgaatctcttataagcagcatatggttggatctcatttttcatttatttattttttagattttgtgagagtcacactctctcacccaggctggagtgcagtggcgcaatcaaggctcactgcaacctctaccttctggactcaagcaatcctcctgggtagttgggaccacagccatgcatcatgatgcctggctaattttttttatttttttatagagacagattctccctacaatgcccaggctggtctccaacaactaggctcaattgatcctcctgccttgacctcttcaagtgttgggattacaggcatgagccattgcgcctggccggatcttattttttaatctatttagccactcagtcttttgattggaaaatttaatccatttacatgtgacataattattgatagataaggacttgctactgccattttgtaatttgttttctggttatttttgacaataccactttcaattgtggtagcattattttgcttttttgaaagatttcttatcagaactttactgcgttaaaatttttaaatatttttcttccaacactatgttgaataggagtggtgagagagggcatccctgtcttgtgcccgttttcaaagggaatgcttccagtttttgcccattcagtatgatattggctgtgggtttgtcatagatagctcttattatgttgaaatacgtcccatcaatacctaatttattgagagtttttagcatgaagcgttgttgaattttgtcaaaggctttttctgcatctattgatataatcatgtggtttttgtctttggctctgtttatatgctggattacatttattgatttcctattcaacatagtgttggaagttctggccagggcaattaggcaggagaaggaaataaagggtattcagttaggaaaagggaagttaaattgtccctgtttgcagacgacatgattgtatatctagaaaacccctttgtctcagcccaaaatctccttaagctgataagcaacttcagcaaagtctcaggatacaaaatcaatgtacaaaaatcacaagcattcttatacaccaacaacagacagagagccaaatcatgagtgaactcccattcacaattgcttcaaaaagaataaaatacctaggaatccaacttacaagggacttgaaggacctcttcaaggagaactacaaaccactgctcaaggaaataaaagaggatacaaacaaatggaagaacattccatgctcatgggtaggaagaatcaatatcgtgaaaatggccatactgcccaaggtaatttacagattcagtgccatccccatcaagctaccaatgactttcttcacagaattggaaaaaactactttaaagttcatatggaaccaaaaaagagcccgcatcgccaagtcaatcctaagccaaaagaacaaagctggaggcatcacactacctgacttcaaactatactacaaggctacagtaaccaaaacagcatggtactggtaccaaaacagagatatagatcaatggaacagaacagagccctcagaaataacgccgcatatctacaactatctgatctttgacaaacctgagaaaaacaagcaatggggaaaggattccctatttaataaatggtgctgggaaaactggctagccatatgtagaaagctgaaactggatcccttccttacaccttatacaaaaatcaattcaagatggattaaagacttaaacgttagacctaaaaccataaaaaccctagaagaaaacctaggcattaccattcaggacataggcacgggcaaggacttcatgtctaaaacatcaaaagcaatggcaacaaaagacaaaattgacaaatgggatctaattaaactaaagagcttctgcacagcaaaagaaactaccatcagagtgaacaggcaacctacaaaatgggagaaaattttcgcaacctactcatctgacaaaggggctaatatccagaatctacaatgaactcaaacaaatttacaagaaaaaaacaaacaaccccatcaaaaagtgggtgaaggacatgaacagacacttctcaaaagaagacatttatgcagccaaaaaacacatgaaaaaatgctcatcatcactggccatcagagaaatgcaaatcaaaaccacaatgagataccatctcacaccagttagaatggcaatcattaaaaagtcaggaaacaacaggtgctggagaggatgtggagaaataagaacacttttacactgttggtgggactgtaaactagttcaaccattgtggaagtcagtgtggcgattcctcagggatctagaactggaaataccatttgacccagccatcccattactgggtatatacctaaaggactatgaatcatgctgctgtaaagacacatgcacacgtgtgtttattgcggcattattcacaatagcaaagacttggaaccaacccaaatgtccaacaatgatagactggattaagaaaatgtggcacatatacaccatggaatactatgcagccataaaaaatgatgagttcatgtcctttgtagggacatggatgaaattggaaatcatcattctcagtaaactatcgcaagaacaaaaaaccaaacaccgcatattctcactcataggtgggaattgaacaatgagatcacatggacacaggaaggagaatatcacactctggggactgttgtggggtcgggggaggggggagggatagcatcgggagatatacctaatgctagatgacgagttagtgggtgcagcacaccagcatggctcatgtatacatatgtaactaacctgcacaatgtgcacatgtaccctaaaacttaaagtataaaaaaaaaaaagaaaaagtaagatgattggaaggaaaacaataaaatgatccttattttctggtaacataaaaaaaaaaaaagaaaaatgcaaaggcaaagaatcgatcaggttggcagaagctgttccctggcttatgggcaggagggagctggtgaggctttggaaattctattgctaacactaacacgggagatctttctggcctttctggttttggcaatggctctttttctcctgccttctaaggtactacaggaaaaaatatttcctctacctccatcccacattgcccaggaacattttaaagattgaaggctttctcaaaaaaaaaaaaaaaaaaattaatatttttcttttaatcatgtatccctttcttcaattaaaattttacacaaaaacccagtaaataaaatgaagtggagcttttgtagttgaaatgggcggagggatatctgcagtctcatctatgtagaccttaccaaagttcagtccagtggctgtggttttttccttccacccaaagaaaagcctgacagtccaatgactgtgatggtcactacatgccaagaggcaagggtatgatgtagctctgtttcattttttcagcttttagaaaataacgtgtggtgcaaagcattaatataggctatgtagtagtgcaaagacataaagacagttattacctaggtgcttcagcacactcaagatttttcttttagaatcatgcaacaggatttaagaactgtaaacctgaaaaaaaaataagcttcttacaggcttgttctatggaaatcctatgttcagccaaaaaagttttttgttagcagtatagatttgaccactgattgtgttctgtggactgtcccatgatgaactgactgatcaaggcataaaaaaccaaagcaagaatatgggtatattttatttgtaatgagataaaatatatgagataaaaatagcagcaggtacactgctgaaagaccagcatggctacagttgtctcttgggcccattaaacagcttaatttatgctgctagcccacagagcatgagttggcaggatcaggtggttaacctagaaatcctggagtccagctagattatatttcatcagtggtacattaactgaacccaaagtatgcacataatgagagaacctgcaattatttgacatctatttgccatagcacagacaccgtcctcggcatcaaataattgcaagctgtgaggtcagaaagttggaattaaggattcatgaagcccagagttagataatatggctgagctgcaaactgttttgaagtggcagcttcagaatggtgaccctgcctatggtggtagctctttttaagtgaaaagttttagtgagatgtaggcctctgaaaaaagggtggcatactttggctagaacctggaactgcagtggaaaagcacacgttttacaattgtagagatctgaaagggcatgcatacaattaccacctgctcttagctcttcaattcattcctccctttccttatgacttgcaattatgtgtatgtctcctgtagttaaattcatttgcttttgtactttattatatattgtatgtggaaataattaacaaagtcttgagttgtttgtttatacttccaaatgaacagctatgatttttagcctacataagagtgctggtattttatatttgattttcctaagttttatatttaattcccatttgcttgacattgagaaatatttataattcatagcacaaaagcctgaaaccattagcttttctgtagagatagaacagttcgtaacatgtaataatgatgatagtgttagtaatgttgccagactcttttatatccatccagttttttccccattgtaagattcctcaaggacacagatttttgtgttttacagtaagtgtttagtcagtgcttttgactgactcagagaatatgatattcaactgtggtgaattctttatagtgcaggattaaatggataatttttcccctagaacttcacaggactgtccttcttttcatcatttaaggctttcaaatgtcacctttatatggaggtattttctgacctccttcttgtacatagttcatgttcttcagagtattagccctatttgcaagtatgcttttgtctgttctagtctttttcccccacgctaacataatctctttgagaatggtaatgtatttaccagtcactttgtggctagactgtacctaacatagcaggtgattaatatgtatttgttgactgattttttatctctttatttaattttaacttttgaattacatttgcatgtgatttttaccccctgttccttttcagtttttcagaaactttggaattggcagatgacatggccattgatattccccatatttggttgtaccttgctgaactggtgacccccatgttaaaagaaggtggaatctccatgagagaacttaccatgtaagttatacttgtttctcttgatatatatcaggtagaactgactaataactcacttgctagctctctatcatagtactgtcccattatcgcctttggagactcatgaatgcaggctgtgactctttaagacttctgatttcagtgtaaaaatgttaccttatgctaggtctacacctgagatattctggggatatgatagccctgtggtctgttgagggtagtggcgatgatagattggctccagaatcgtgtaactggaagatgactgcttctagaagcttaatgttcatctggcttttgtgtctatcattgcagtagtgctgtaagtagttatattttcccattgtaacttgtcagactgcattaccccatagtacatgctcatgattataataaaaggatgattataataaaacaaactgagatctcaagtattcctacgtttggatgtgagtggggaatggatgctacgttatatagaccggtggttcccaaactctgttcttcgaaacactagtgtttccacaaaagttgtttatatagtcaaactttgcacatggtcatgtcccttttctttgagattaacaaaacatacttagcatattaaagtttatgacagtcctatagtaaagcaataaataaaaactagttagctttgtttaattcagcattgcctcacttagagtatagatatcctatggaacacagtttggtaaatgctgatttagactgttacaaaattggcccctttgctgtttcatccataatttcatctataaagaaaagcttcctttcttaaaaatactttatatatggccagacgcaatagcttacacctgtaatcccagcactttgggaggccgaggcaggcggatcacaaggtcaggaaatcaaaaccatcctggccaacatggtgaaaccctgtctctactaaaatgcaaaaattatctgggcatggtgttacgtgcctgtaatcccagctacttgggaagctgaggcaggagaatcgcttgaaccagggaattggagattgcagtgagccaagattgcgccactgcactccagcctggcgacagagtgagactctgtctcaaaaaaaaaaaaaaaaaaaaaactttataaaagcatcacaactccctgttacctaaggtgcttctcattttagcttgaagcagaacttacataaacaaacagattaccacatctgatctttgtgttgcttctgtcactgaagtggttaaagaaaaaggtaaaaaccaagaactcacatgtaccttttcaggaacttctcctgaaaatgacttagagcatgtcctggagctttggcttgcccagtattatgtaggttgcacagtatctggtttttggtcacacattgtttgcctcttgttctagaagaaaggatttctttagagatacttaatcactgctcctatcttttacagagaatttagcaaacctttacttcctgttggaagagctggggtcttgctatctgaaatattgcacctactatgcaaacaaatggtgagtgttacactgagtgtcagactcaacagtattattaggaagggcagtgatcttgatcttgggttatctgtgaatagcttaggtctcagggtgcaagtaattaagaatgaggtctctgcttcaacccagtttctttctgaggtgcatttgtccttctgtttgctaatatcttggggcagaattatcaaatctcgactagatttggtataattctaaagaatctcaagtcatgttttatttgtagttgattttttcttcctttgaaacaaaatggatatatcatttatatgttttaatagatttcaacgaaaagctccatagagctggaggctgtcagtctatggcaggctgtcagtctataaagtgggaacagataaatctaaaccaataatttcaaaagagtgaaagtgctttgttagaagtctaagaggtttggggaagtgttgtggcatcacaaagggaataaaatgtctaggatgagagggatgagagatgtcaaaacaaaacagaactcagaaatgaagattctggagtgatttctgacttacttacgcctgactcaaagatattggatgatagattttaatgtttaaagtcagtgtttcattcctccctctgatacagaagtccttctgtatcccatttgtgtggtagttattcataaacagatgtactaaatatcctggtctctagttctgttgactatttgttaatactactctttgcttaatggcactaaaatttttactgaaccctagtttttatgtccaaaatttcctcctctccgacctacttgactttagtccttatttaaaactcacattctggccgggcgcagtgattcacacctgtaatcccagcactttgggaggccaaggtgggcagatcacgaggttaagagatcgagaccatcctggccaacatggtgaaaccctgtctctactaaaaatacaaaaattagccaggcatggtggcacgcacctgtagtcccagctacttaggaggctgaggcaggagaatagcttgaacccgggaggcagaggttgcagttagccgagatcatgccactgcgctccagcctggcaacagagcaagactctgtctcaaaaaaaaaaaaaaaaaaaaaaaaaaagaaagactcacattctggctggcacagtggctcacgcctgtaatcccagcactttgggaggccgaggcgggtggatcacttgaggtcaggagttggagaccagtctggccaacatggcaaaatcccatctctactaaaaatacaaaaattagccaggcatggtgacaggcacctgtaatcccagctacttgggaggctgaggcaggagaatcgcttgaatctgggaggtggaggttggagtgagccaagattgtgccactgcatttcaacctgagctacagagagagactctgtctcaaaaattaataataataactaaaaactcacattcttattaactttgatgtgtagaaacagcacaaccctacttccaaataaaactaaattctcatatagtataagctttggagccagatggccgagttcaaattctggttcaactatattttcagctatgccttggacaagttactctatgaagtaattaatacatacctctcagatgacagcaacagcctcaaacctggcattttccgttgtcactgtaactttcttcaggtagaggacttgtacctcttcacttttttctacctgacaacagctcttctttattctctctcttgggctcaaccttgtgcttcttgcccttgaaacacttctcattcctggttcaggagcaacaactgctttaagcctccttgtatcaggcagcatggctgtgatctattatgaagagggattctagtgaggcttcttgaatggctttaatagcagatacatacagagctatctaggaaaagacacagtgtggaatttataaactctgtgtattggactttttttgatgtttataaatcccaaataaccagctgtagctccccagattagtcacctcataaatcaattatttaatcttaagcagctgtacttcaattattcaccattgtatttatgtgcattcagacatcttagtttgaaagtcacaagtcttaagagattaactttttatcagtgaggaaaagtttgttttcgagactggtcttgctgtgtgtgttgcctgggccagacctcatactcctgggtgaaagctgtcttcccacctcagcctccctagtagctaggactatacaggtgtgcaccaccatgccctgctggaaacgttttgatttttcagctttttggggtttgcactgtttgacttcaagcaaatctttttttttttttttttttctgtttcttcttccactgtgaaagtaaatggattggatttatctctattttagagccataagaaagtgggagccttatggagggaggctgacctcagctggaaggactttttaccagaaggagaagatgtacataattttcttttggagcaggtaagaacaaggcttatgttttgctgtttgatagtagttgatctatttcatagaggaagtgaaggtaatttccttcgtattccagtcgttaaaattgcatcaaaataggaatcttggtaaagatgtccttttaagttcatgcttttaaagccactccaactgtgtggtcatcagatgattgatatttaaaaaaagaaaatgtaaaagacttagcaacctatagaaaaacaagctacagcaagcagaaatgaagttaacaaataaagcagggtgacagggccaaagctgtctcctgatttctgggtctgatggcaggccagaagcagccagaagttattctgtggggaatggagaccattaatacccttataaggtagaagattagagacaagcttatagcttgaaactacacaggtaaataagtgcaaggaagtagacacagtcttatacccagaaccttagctatcctgcctactgactggtaactagatccagaaatctacaaaacagaagaccccatgatcagtataatctggtcctataggaggatttgtgggctgttaggttgaggtaaccataaaacaaattagatcaagaaaagtaacagaaagaaaacaaaactctctcaaaacgttactgaaaatcaaaatcctaaaactcatgaggaaaactaaagctaagacagccaacaaaatcaggaataaggagaaaaaaaatcaccataggtaaaaagagaacaagaatgcaatctgaaaatgactttaaaataagtattttgttctggataaagatattatattaggttgctacagacattagctttctttttggttgtagtctggaacactgaagagcattcttgccacagcaataagaacctgcatgaagcataacttctgatgtgttactggacttagaagaggtggaagtaatttccttcaaagggacaaaaagaattaatgagggggaaaagccagagatgaaacctgaactgtgaatagtaattacatgtgaagggcatattgcccaaaggacacatagcccagtgggaagatactattacaaatgctgtcagatgtcatggaaaaagttgacttagtcccagttcagtattaccttggctcccagaagcagcaaatcaaaatgctctttggagaaacatcctcaacttaggtccccttattttctacaaatccaaattatttaaatatatgagttgacacttggtgttcatttaacatacaattaaagaagtaaagataaaagtaaacagacaataagtagtagatttagaccccatggacttgaggtaatggaattatcattcagagtataaaataacactatagtaaaagaaagaatcacaaaaatgagcaaacaagagactagtcaaaatggttaaagagatttgaaaagaaaagaaaaggttgggtgcagtggctcatgcctataatcctagcactttgggaggctgaagcaagagaatctcttgaagccaggagttggagatcagcctgaacaacatagtgagacctgtctctactaaaaaaaaatagctaggtgtattggtgcacctgtagtcgtaagctactcgagagactgaggcagaaggatcactagagcgtgggagtttaaggctgcagtgagatacgatcacaccactgcactccaacctgagagacaaagtgagagcctatcaaaaataaaaaataaaataaataaacaaaagccacacacacacacaccaaaatctgtaggtagctatctaagatatgttaatatgttaggagatttggaggaaagaatgagagaacatctaacctatctaattggagtcccagaaggaaaattagcctaaatggagaagaggcaatatttgaagagacagtggctgagacttctagaagtgataaaatatacaaatctataatgaaagcccatatatgcaatacaggataattatattttagtgaaactgcataataccaaagacagatgaaagattttaaagaagctgggaagaagaagcacattacttacctgcctccccctcaaaaaaaaaatacacaaaaaattagactttgcagtagcaaccatgaaagccagaagatggtagaataatctcagagtgctgagaaacgagcagtaaatgtagaattccctgtgcagctgaactaacctttaagaattagggcaatgcatactgagaaacttaacaacatacttctaaatacccatgggtcaaagaagaaatcaaacatgatagtaaaaaacatttttaactgaatgaaaacaaaaccacaacatatcatcgatatttagaaaagaagaaaggtcaataacctcagcttcaaccttaaagaattagaaaaataaggccagacacaatggctcatgcctataatcccaacactttgggaggccaaggcaggaagattgcttgagcccaggagcttgagagaccagcccaggcaacagagcaagaccctatcaccaaaaaaaaaaaaaaaagaaattagaacaataagaacaaatgaagctccaagcaaatagaataaaggaaataataaacattatatcagaaatcaatgaaatagaaaaatttttagagaaagaccagtgaaatcaaaagctggttctccaggaggtggaggttgcagtgagccaagattgcaccattgcactccagcctggacaaaagggcgagactccgtctcaaaaaaaaaaaaaaaaaaaaaaaaaaagctggttctttgagaagataaaagtgataaacctctagccagattgatcgtgaaaaaaagtttgaaaagaaggtacatattactaatatctggaatgaaagcggtaacatcagcacagattctatacataaaagtgggtgaggaaattttatgaataatctttatgtcaataaatacatcagccaggcgtggtggctcatgcctataattccagcactttgagaggccgaggcgggcggatcacgaggtcaggagttcgagaccagcctggccaacatggtgaatccccgtctctactaaaaatacaaaaattagccaggtgtggtagcacacgcctgtaatcccagctactcaggaggctgaggcaggaaaattgcttgaacccaggaggcagaggttgcaatgagccaagatcacattattgcactccagctctgggtgacagagcaagactccatattgggaaaataataataataataatgtagggtttatcctagaaatgtaaggtgggtttaatatttgaaaactgatgtatacataatagggaagatggtgaagtatacataatagagaagtatacataatagagaagtatacataatagggaagatggtgaagtatacataatagggaagtatacataatagggaagatggtgaagtatacataatagggaagtatacgtaatagggaaggtggtgaagtatacataacagaagtatacataatagggaagatggtgatgtatacataatagggaagatggtgatgtatacataatagagaagtatacgtaatagggaagatggtgaggttccaggattcaatccctccactgacacaactattgaactggcaagatctgttagagccaactgttttagaactgtggagtctcgttaaatacatgcattatcaacaccaggggattgcataatgaaaaaagagtctgataaatttcagtgaatttgggaattttgcatagaacttaccagtacccagcccagtggcagaccaccaggaaactggcatcacaccatttctggtgcagcttgctggtgccaggttgaacaataaggacttcattttccaaggattggggttgtgtcttttaattgacttttagttgactgagaggccagtgctggggctggctgttatttcaactctttcatgctgaagtatcttttagggctgtgactatcaaaagtatttaagcagtagtgttaacgggatctctggagtgtcgatttttttggccagaaacctctgtggccatggcacctttgcccgagttcttttcctgtgtccaggaagaatgaggtacgcaaacaaatgaagggtgaagaagagttttatttagtgttagaacagctcagaggagtgggtagctcctctctagtaggcaggttgtcccatggagtgttcagctctctgtagagaggaggctctggagaggatagctcctctccacaggcaggtcgtttggacatttctgcaggtctctgaagctctcagaggagagggtacctcctctctcctggcaggtcatctctgcagctctcagcagagaaggcattcttctctgcagctggtcctccaatcgtctctctaccctctttgtcctctgcccatctgctaccctgttctggctgagtccagggcttttatacctcagaggggaagaaatgcatgccaattggtccataggcagccatggttgggcctggaagaggcaccatgagcccctactccactctgctggactggcatcccagcccccagccttcaggtcctccctggcctgagggtggggccttactggggaccctgcccccttccacccaggactctgtctgcctcctgctgccattcatggccctggggcttggtcccaaccccactccaagatcagagagcaggcaactctgagcctgcagggacagggggtctttcctgggacacccgagggtgctgactgcagagacgcccaggtgctgcatgcctaggagggcagccacagctgcaccccagagctcccaccccaccaactcagaagaggcagggctcccccttttcccgtcccctgcctgctttgtggaacgggaggcccaggtctgcagccgcaggtcaggcagctgcgacagcacccaggaggggagatcctgcctgctccctcaagaaaggctcgaatccacagctgcagtttgggtgggagggcagggctcctgcctgctccaaagagcaggaggcttgggtccgcagctatggtttgggtggctgcagtagcacaggcagcttccatcccaactcagaaggggcagggctcccaccggctccatgcagtgtacggccccagctgcacctccctgctgcagccaatagtatctctctctctgtctctctctctttctttctgtctccagtctctctgtctcctctcctctcccctctctcctctttcctccttctccactccctctccctgagtcctctttttttgttaatttaacttttattttaaggtcaggggtacatgtgcaggtttgttctataggtaaacttgtgtcatgggggtttgctttacagattattttgtcacccaggtattaagcctagtacctattagttatttttcctgatcttctcccttctcccaacctctgccctctgataggttcgtgtgtgttgttcccctctatgtgtccatgtattgtcaccatttagctcccacctataagtgagaacacgcagtatttggttttttgttcctgcattagttcgctaaggatcacttggcctgggaggtcaaggctgcagtgagccatgatagtgccattgcactgcaacccgggcaaaagagcaagaccctgtctaaataaataaataaataaataaataaataaatatgagacttcagtttaaaagaaaaaaaaagcaatcggaggtcaaggctgcagtgagccttgatagtgccactgcactgtaacctgagcgaaagagcaagaccctgtctaaataaataaatatgagacttcagtttaaaagaaaaaaaaggcaaaataatatatatataataaaatgaatatataaaaatgtttatagtttgaaaaatgaggttgaaaaatacttggcctgtatcttgacttacagtttgcttaaacagcttatggccttcatgttgtgcttttttgcatatattggagcatcatggattggatgtatagttaaccaatactaaatcagaaaaattgtaatattgagccatgtttctaaaatcttatggagctgggtgcagtggtgcacactgtagtctcagctgctcgggaggctgaggcagaaggatctttgagccccagagttcaagtccaacttggcaacatagtgagaccccaagtcaaaaataaataaataataaaaccttattgggaaatataatttagagatgctacgtaagtggtagaaacggaacaatcagatgacagaactcaagactgtggttttcactttgtggattggggatagggtataggaccataccagagtattcaagagtattagagaaaaccttatgtgagtaatccttaatattttcatctttatggtttttgtataatgaagccacataaagcaaggcatacctatgtacttcatttctttagtcctttgaaaattatgaataattttgattatagattttttttttctttttgagacaggatctcgccctattgccaggctgcagagcagtggcacaatgacaattcactgcagcctcaacctcccatgctcaagcaatcctcccatctcagcctcctgagtagctgggaccacaggcgcatgccacaacacctggctaattttggtatttgtgttggtagagacggggttttgccatgttgcccaggctggtctcaaactcctgaactcatacactcctcctgccttggcctcccaaagtgctgggattactggtgtgagccactgcgcccagcctgattatagattttttaaaactatgtatctaagtgctaaacaattatagcatcatttctcacacctatattcgaaatggccacaacttaacaaagccaaaactatctagttttgatagctgctgagtaccaatactaatattaaaccataggttgcagaaagagagtgaaattgtacccttttctagggctcctatcctgccttaaagagctatgttgcagctaaggggaagattgaagctcaagattatttgcgtgtaaccatagcctagagataattatagggggttattaccttcttttttaagatacacggtatgagaagttggaaaaatattcagaaggataatggactgacagtttttcaaaactataatacgaacaggttgggcgtggtgagtcatgcctgtaatcccgtctttgggaggccaaggagggcggattgcttgagctcaggagttcaagaccagcctgggcagcatggcaagaccccttctctactaaaaacacaaaaaaatagccaagtgtggtggtgtgggtctggagtcccagctactcaggaggctgaggtgggaggattgcttgagcccgtgatgtggaagttgcagtaagccaaactactccagcctggatgacagagcaagaccctgtctcaaaaaaaaaaaaaaaaaaaaaactacaaacataaaatagcctctgctgatcattttgattccatgtaaaatagaagacgtaacctatgactttgttcttctctcaggatgacaataacatagaattatattaatatattaatatgttccaccttttatgtttcagaagttggacttcatagagtctgacagtccctgttcctctgaagcactttcaaagaaagaactgtctgccgaagagctgtataagcgactcgagaaactcattattgaggacaaagcgaatgatgaacagatctttgactgggtagaggtataaagactatgtcaccttccctgatacctctacaggaaagattcttgtgggatccccttaattcgcttacctatcagttcacttcatgaatttttatttttatttttttttatttatttatttttttatttatttattttttttttttaattgatcattcttgggtgtttctcgcagagggggatttggcagggtcacaggacaatagtggagggaaggtcagcagataaacaagtgaacaaaggtctctggttttcctaggcagaggaccctgcggccttccgcagtgtttgtgtccctgggtacttaagattagggagtggtgatgactcttaacgagcatgctgccttcaagcatctgtttaacaaagcacatcttgcaccgcccttaatccatttaaccctgagtggacacagcacgtgtttcagagagcacagggttggggttaaggtcacagatcaacaggatcccaaggcagaagaatttttcttagtacagaacaaaatgaaaagtctcccatgtctacttctttctacacagacccggcaaccatccgatttctcaattttttccccacccttcccgcctttctattccacaaaaccgccattgtcatcatggcccatccccaatgagccgctgggcacacctcccagacggggtggtggccgggcggaggggctcctcacttcccagtaggggcggccgggcagaagcgcccctcacctcctggatagggcggctggccgggcggggggctgacccccccaccaccctcccggacagggcggctggccagacagaggggtcctcacttcccagtaggggcggccgggcagaggcgcccctcacctcctggatagggcggctggccgggcggggggctgacccccccacctccctcccggacggggcgactggccgggcagaggggtcctcacttcccagtaggggcggccgggcagaggcgcccccacctcccggacggggcggccggccgggcggggggctgacccccccacctccctcccggacggggcggctggccgaccccccccccccccgcctccctcccggacggggcggctggccgggcagggggctgacctccccacctccctcccggatggggtggctggccaggcggggggctgacccccccacctccctcccggacggggcggctggccgggcagaggcgctcctcacttcccagtaggggcggccgggcagaggcgcccctcacctcccggacggggcggctggccgggcggggggctgatccccccacctcccttccggacggggcggctggccgggcggggggctgacccccctcctccctcccggacggggcggctggccgggcagagggatcctcacttcccagtaggggcggccgggcagaggcgcccctcacctcccggacggggcggctggccaggcggggggctgatccccccacctccctcccggacggggcggctggccgggcagggggctgaccccccctcccccctcccggacggggcggctggccgggcggggggctgaccccccacctccctcccggactgggcggctggccgggtggggggctgacccccccacctccctcctggacggggcaactggccgggcagaggggctcctcacttcccagtaggggcggccgggcagaggatcccctcacctcccggacggggcggctggccgggcggggggctgacccccccccacctccctcccggacggggtggctgccgggcggagaggctcctcacttcccagacggggtggctgccggacggaggggctccccacttctcagacggggcggttgccaggcagagggtttcctcacttctcagacggggcggccgggcagagacgctcctcacctcccagacagggttgcggcccagcagaggcgctcctcacatcctagacagggcggcggggcagaggcgctccccactcagacgatgggcgggtcaggcagagatgctcctcacttcctagatgggatggcagccgggcagagacgctcctaacttcctagatgggatggcggctgggcagagacgctcctcactttccagactgggcagccaggcagaggggctcctcacctcccagacgatgggcggccaggcagagacgctcctcacttcccagacggggtggcggccgggcagaggctgcaatctcggctctttgggaggccaaggcaggcggctgggaggtgtaggttgtagtgagctgagatcacgccactgcactccagcctgggcaccattgagcactgagtgaacgagactccgtctgcaatcccggcacctcgggaggccgaggctggcggatcactcgcggttaggagctggagaccagcccggccaacacagcaaaacccagtctccaccaaaaaaaaacgaaaaccagtcaggcgtggcagcgcgcgcctgcaatcgcaggcactcggcaggctgaggcaggagaatcaggcagggaggttgcagtgagccgagatggcagcagtaccgtccagctttggctcggcatcagagggagaccgtggaaggagactgtggggagagggagagggggagggggagggggagggggagggggagggggagatgaatttttaaccttaattaaattagtttttaaatgcttttgttttgccttccttagaaaagagtaacatttttctcaccacttaaggggttaagtaatgcttgagattaacttctaattcacattaaaattaagatgaaaaagcagtgttggcacatgtaaaaatagttacatgcttctgagtaagtagtcattaaaatacactgcagttgtggtgttgttctttcatagattgagtagatgatcttaatatggattatttattgaggaataaaatatgtttttaagtggttatacttccaaatgtacaagtacataacactgtataattgaatgagtaaaggataggcagtgggaaggaccctgaaaagtaaatactgctaattcaaatatttgcacatagaactggcaatagccaaattatttttcaatgaattggacatttaattttagcaagaatgtgcaaaaatgtgattcatctggtctgggtgtgatggttcatgcctgtaatcccagcactttgggaggctgaggtaggcagatcacgaggtcagagtttgagactagcctggccaacatagtgaaaccccatctctactaaaagtactaaaaaattagctgagtagtcccagctactcgggaggctgaggcagggatcctgtagtcccagctactcaggaggctgaggcaggagaatcgcttgaacctgggaggcagaggttgcagtgagctgagatcgcaccactgcactccagcccgggtgacagtgcaaagtctcaaaaaaaaaaaaaaaaaaaaaacagtgactcatctgttcttagtgccagatcagtcctgatgttcaagagatcatttatctgatacgcaagggtatctttttttgttttttgttttttgttttgagatggagttttgcacttgtcgcccagtctggagtgcagtggtgcaatcttggctcactgcagcctccacctcccaggttcaaacgattctcctgcctcagcctctgcctgccaccatacccagctgatttttgtgtttttagtagagacacggtttcaccatgttggccagattggtctcgaactcctgacctcaggtgatccatcctcttcagcctcccaaagtgctgggattacaggcatgagccactgcacctggcctgttttttgttttctcaagacaaggtctcgctctgtcacccatgctggagtgcagtggtgcagtcattgcttactgcagcctcaaacccttgggatcaagcagtcctcccaccttagtctcccaggtagctgggaacacaggcatgtgccaccatacccagcttttttttttttttttttttttttaagagatagggtcttactatattgcccagactggtctcaactcctagcctcaagtgatcctcctgtctcggcctcccaaagtgttgggattacaggcatgagcctctgtgcctggctgagcaaggtatctttaattgttttatttctttttgacttcaggctaatctagacgaaatccagatgagttcacctacattccttagagctttaatgactgctgtttgtaaagcagctattataggtaagtaacatttctgaaggcagctcataacatctgaaatccccattatgtcaactactaagtatacagtttgattttacattgttttcaaaacttctcctatgtagctcacttttctgtgcactgtcctttctgtctgtgatgcctggttgtctcaagcgtggagacaaatagctgctccgcctacagagaacccagatctaaccagctaccacatgccttgcatgctccttgggttgtttttcactacgttgcgtgtagctttttctttatcttttcacttctaacattcagggccgcctcctccttccaataatgaattataatgaacaggttgaatattcttaatctaattatcagtatagggttattctcatcaaaaaagtcatgttatataagtacatacatgaagaaaaaaatatcaacagtttgtcctgttctttgttgactttatttgatatgataagacaattttattggcttatgaattgttaatattgataggattagggtcagtagaaatcccaaatattccaagctgtatacaatgtttaacattattcaatgaagacatctctttagtttcagatagaaattcatacttctgtcactgaagcgagaaaaaaaaattcatcagtgcaaaggtgtctcagaatttcaagtctgtctctattttgaagatggctttctgccacttaatatagcttcagaattgtaatttaagatttgcaatgaatttattttcaatgttctttaatgagataaataacaaagctaagtagaaagtcttcatgaaatttttaaaaatcattttcagtatccatagaaccatcataagactttcatgttttaaaattcgagttgggaagtccaaaagctgtttggtttttgttttcttgagatggtgggggtcactgtgttgcccaggctggacctgaactcctgggcttaagcggatcctatcgcctcagcctcttgagtaactggaattacaggcatgagccacgatggccagattttaaaagcaaaatctgcttttaaaaacaaaattgtgtcttagtgataacttacagataatataaacccgtatgtgtctttgtactgaggatgcttttcatttctcagcccctttttatcattcctttccctcaaaaggcctagattaggtatgttatctgccactgccacagttagtttttatcctagtaataacaaaatggttccaattattttagccttctgaaaagatttgtattaagtgtcactttaatttccttttctaatgttgcttttttatgttgctttttttaaatactcacttgaaattcctactccatgtttcatttatttttgattgacaaattataattgtatatgtttatggggtacaatgtgatgttttgatatacatgtccaatgtggaatgattgaatcaaattaattaacatatctatcacctcacttacctttttttatggtaagacatttgattaattttgcttttgtagtttgtcataaaaccacagtcactgtttcattacaattaaagataattgggtacgctactcctgagggaaaccagcattcaaaatgcatcccctccatagtttttattatttgtgagagaatgtctcattaataatttcagagcattttggatttcaaaatatttgccttagaccttcttgcctcctcttctcttgtagagccatatgggtcctttgtactcagaaaattgaaaatgagccaggttgcagtggctcatgcctgtaatcccagcattttgggaggccaaggcagaaggattgcttgagcccaagagttcaagaccagcttgggcaatatagcgagaccctgtctctattatttaaaatctaaaatagaagaagaagaagaagaagaaaggccaggagcagtggctcatgcctgtaatcccagcagtttgggaggctgaggcgggtggatcgcctgaggtcaggagttcgagacaagtctgaccaacatggtgaaaccctgtctctgctaaaaatacacaaaaaaattagtcaggcctgggagcaggcgcctgtagtcccaacaacttgggaggctgagacaggagaatagcttgaacctgggagacggaggttgcagtgagcttagattgtgccactgcactccagcctgggcaatagagtgaggctctgtctcaaaaaaagaaaaaagaaagaaaattaaagataattctatgttaactccttaaatgtaattcctagttcttctatcacctttagccgactcttctaccttcagagtggacactgctgttatcaagcagagagtgccgatcttactcaagtacctagactcagatacagagaaggaactgcaagcactttatgcactacaagcatcgatagtaaaacttgatcaacctgccagtaagtttatctcatgttacagttaatctaaccaatgagtgagatttatccaagccaggacttagagatgatttagggttcgaacaaaggacaataaaagaatcactaataacacaaactcatataactaactttaataaatttgaatttggccgggtgcagtggcttgcgcctataatcccagcactttgggaggccacggcaggcagatcacttgaggtcaagagttcaagaccagcctggccaacatggtgaaaccctatccctactaaaaatacagaaatggctgagcacggtggctcacacctgtaatcccagcactttgggaggccgaggcagatggatcatgaggtcaggagatcgagaccatcctggctaacacagtgaaaccctgtctctactaaaaatacaaaaaattagctgggtgtggtggcgggcacctgtaatcccagctacttgggaggctgaggcaggagaatcgcttgaacccaggaggcggaggttacagtgatccaagagcatgccactgcactccagcctggcgacagagcgagactctatctcaaaaaaaaaaaaaatacaaaaatacaaaaattggctaggtgtggtggcatgtgcctgtagtcccagctacagctactcagaaagctgaagcacgagaatcacttgaacctgggaggcggagtttgcactaagccaagatggcgccactgcactccggcctggacaacagagcaagactctgtccaaaaaaaaaaaaatgaatttgttatatgtttgtatgaaaatatcacaacaagaaaactatttagattaggttatttcatccccattccagggcaggcctaataaaactttccacagtgatggtagtatatatccataccattgagtatggtaatcatgagccacatgtggcaattctatacttaaatatgtctgttgtgacttaggaactgaattattgactttaaatttaaataaccatgtttgactaatagcttccatattggacaacacaggtctagggcatgaaaatggttaatgatgttgaggatgatactctagaatctttagacacccaacaaagaccctaagtgtagtgtatttaccatgctatatttactaaggagtttcagaatagtttttagttaagggttatgattaattcttggctaatgaaacaaagtaacctgtacacttaagtcttagtgatacttggtgttaactaatgatttttattacatcttgaaaattcagttggtatttgttaaagcgggcagtacatagctattagagagagcactcaagtagttctttggtacttccttattttcgcttttgtaaaattccttctttcctagtcctgaatcgctcttggagataaaggaaaagatgaaagcaaattatccttatagtgtaactgaagagacaatctaccatgaatcagataatttgataatattagcttaactaatataattacaaagataagtctttttaaaaaaaggccgaggcatgcagatcacccgaggtcaggagtttgagaccagcctggccaacatggtgaaaccccgtctctactaaaactacaaaattagctgggcgtggtggcgcatgcctgtaatcccagctacttgggaggctgaggcaggagaatcacttgaacccatgaggcggtggttgcaatgagccgagatcatgccactgcactccagcctgggcaaaaagagcaaaactccatttaaaaaaaaaaaagttaatacgactcatgataaacctaatattgattagcatttattgtttattccactgcctccctccattaatataaatgatcggagagctgactataataactataagctaataacttattatatatgataactataattctcagttttactatgagagtaaaaccgagaattaaaatcacacggatagtttggacgtttaaaacagtaaataacaggtgtagtttcactggataaaatccagatgagatagcttttactcatgttttccatgtgaatgatcacctcttgttcttttttgagacggactctcgctctgtcacccaggctggagtgcagtgatgcaatctcagctcactgcaagctccgcctgccgggttcacgccattctcctgtctcagcctccctagtagctgagactacaggcacccgccaccatgcccggctaattttttgtatgtttagtagagacggggtttcactgtgttagccaggatggtctcgatctcctgacctcgtgatccgcctgtctcggcctcccaaagtgctaggattaaaggtgtgagccaccgcgcccggccacctcttcatttttaaaacaacattacaaggaataaaaagcatatcctgcctttctcccttcccccaaattttgtaaaaataatacagtaaacttgcagcgcagaaaatagtaaaaagaaagtaaaaaactactcgtatttaaattttatagggtttagattgagataaacatgatatgaaacagcttcactggtatcagaagatagttcagattgggccgggcacggtggctcacgcctgtaatcccagcactttgggaggccaagatgagcggatcacctgaggtcaggagttcgagaccagcctggccaacatggtgaaatcccttctctacttaaaatacaaaaattagctgactgtggtggccggcgcctgtaatcccaggtacttgggaggctgaggcaggaaaattgcttcaacccaggcaggcgcctgtaatcccaggtacttgagaggctgaggcaggaaaaattgcttaaacccaggcaggcgcctataatcccaggtacttaggaggctgaggcaggaaaattgcttaaacccaggaggtagaggttgcagtgagccaagatcgcaccactgcactccagcctggggacagaacaagattgtctctcaaaaaaaaaaaaaaaaaaaaaaaaaacagaaaaaaagttcaaattgtacaaaataataggaataaaaaagaatttagactgcttcaatctttttttcctcttctttaaacaagttgttgggctgtttatactgtcaagagcaagtatggtgaattgtcattattgcttttttctgggggaattaatgcacatttattcagtcattcattattttgaaatatattcttttcctcataactacagtgtcccaaagcttatagtttattttcacctccttgcagatttgctgcggatgttttttgattgtctatatgacgaggaggtgatctccgaggatgccttctacaaatgggagagcagcaaggaccctgcagagcagaatgggaagggcgtggctctgaaatctgtcacggcattcttcacgtggctgcgggaagcagaagaggagtctgaggataactaaaacttcaaatacacaaaatgaaacaaaagaaacaatttaagtatttttttaaaaagtttcacgtcttcgccaatcacagtgcagcaaggccaattctcgcagaaacccccacgtgtgcacgagtgggagaggggaaagagaaaaaaaggtgatcatggaggaaaaaggtactggataaaagtaaacttcaaaccttagggcgggagcactaaaaccaaaatacatgtattatttatagaaaatattttctgttttaatcttttctttttaaacaaggactcatacttaaaaaaatgtttagcaaaaaaaaaaaaagttgagaacttttaatttattttaaggactgcaaatgccagtgtaattttttaatttgcagtttctgtaaacaacttgtataatagaaaagcagagaaataaatttccctccccttcaagatgcacctcatgtttgttttaaggtatagcatttagtccagatttgagaaagtttggggtgaacaaggtaagaaagatttttttttttttggcatcaaatctttctgcctgcctctcagcttgcttcagaaaatttaaaaaatcacaatagtaatcaaaacatacataacattgaaacagaaggaaatgctgtggaccacagaactccaagaattgtttaaaaaaaaaaaagtgctaccctgagaaaagtactcttaatactcttgaaatctttagagcaactttaaggcttgtaaatacatagaacaaatatttaaaaaaacaaaaagaaattgactcagtactatttcttttcactttgaaaatataaagaacaaaataaagacaaacattgcaagtttaaaagaaagtaaagtgacttctcctttggacagctgctgcatgtgtgcccattcctgggggtgctgtctggctatttattgtctaattcaaatcactcctgaggggagagagataaaacgagagagagtgagagagtgtgtgtatgtgcgtgtatgcgcacgtatgtgcatgcacatgtatgtatgtatat

SEQ ID NO: 330 - DNA, 123749 bp, Homo sapiens
  source 1..123749: mol_type = genomic DNA; note = NC_000010.11:c49942027-49818279 PARG [organism=Homo sapiens] [GeneID=8505] [chromosome=10]
agtgtgcgccccggaagccggaagcgcctgacggcagctttccggtggtgggaaagtgaacgaatcccgaatcaaagcggcgcattgaggcaggtggggtgccagtggaagagggaaggcaggcgagtgtttacggcctgacttgggaggccggcggatcagcaattgcagaagcaggcagcggcagagagggaatggtgcaggcaggcgctgagaaggaggcgcagtccatctctctcagggttagtgaatgaggctctccgcccgggccggcccggggacagtgcgctgctggtcccagcatgaatgcgggccccggctgtgaaccctgcaccaagcgaccccgctggggcgccgctacaacttcgccggctgcttcggacgcccggagctttcccagcaggcagaggcgcgtcctcgaccccaaggacgctcacgtgcagttcagggtcccaccgtcctcgccagcctgcgtcccagggcgggcgggacagcacagaggcagcgccacctcgcttggtacgtgggaaaataaaaatctttgtccttcgcctcggcccgaaccttctggtctcagtctgaggacccaggggctccagtcactcctttctggtcttgtgtgcatcgtcactcttgaggtccacttgctgagctaccaaagccactagtgggtgaatggggccgcatttttcccagtgcgattgatgtgagaaactctgatgagcagtcactcacagggcggaaaatggcaggagactccaccacctgtttgcttcttcaggtttgattgagaaattgccttagtcgtcaaggagatctaattgtgtatgtaaaacagtagggcgcttcagcctctagataggaagaaaacaacttcacttgttcagattctgggtcccagggtgcagagctattagtttaagctggcattgtacccgtccctggtatacagtgttgaacgagagaaacttggcctctgccttcataccttaaaatctatctggagagatagacgatagcaaaagttaatataataaaaggtaatggatgttctgatagatgaatgacagattgttttacctaactgaatttatggaatcgaaaatagtcctccagaagatgagatgcttattctgaggactgtagaatgagtaggagttagatgaagaggaagtaagaagtgtttcaggagtgcaaccgaggccgggcgcggtggttttgcctgtaatccctgagctttgggaggctggggcgggtggatcacctgaggtcaggagctcaagaccagccttaccaatatggtgaaaccccgtctctgctaaaaatacaaaaaattagcctagcgtggtggcgggcaactgtaatcccagctactcgggaggctgaggcaggtgaggcaggagaatcgctggcatccgggaggcggaggttgcagtgagccgagagggcaccattgcactccagcctgggcaacaagagcgaaactccgcctcaaacaaaacaaaacaaaacaaaacaaaaacaggagtgcaattgatatatagagtgaacgcaagagagtgtgagagatgaggctgcagggtggtacagaaaagtcagatcaaattggatatgtagacattgctaaggattttgaactctaagggcattgataagctactcaagggtttttagtaggggagtgacttgattagacttatttatttgttgaaaagtctgtgtggctggtgtgtggaaaataaagaatggattgaaaaggaactcaagtggagcatcaagactcagttaaggagttaatctaggttggaaataattgtagcttaggcctggatgctggcaatagggaaggggatggattcatgaaagaatgggatacttgagaagaaatatttctgtgctggagaagtagattggggagttcgtggcataaacattataatggatgctatgggcatagataacataaacatgtagagaaagtaaaggtgacctagggcagatgccttaggaacaccaaagtttaagagtagactgaagagaagcggctgtagaggtgggaggaaagcctggcttgtgttgtgtcagacaaaggagatcatttcaaaaaggatgcattcgttaacagtgtaagaggctgggcagagctcgggcagttctctggtgaagagtctacacttagatgtcttcatacttaggggcagtaccaagtagacttgcactaggccttgaaggatgaggaagatttgctgtataaatcaagaggagaaagaattatacatgcagaggaaataagacatgcaaaagttggtaagactggagcataagatgacagaggagtgtctgatgaggctgggtggcagacaggagcttatgaagaaactcaaattccattttaaggaatttcaaccttattctgtggttaatggagaaaccactaaaaagcttttaagcgtgggaataccatttggttaatattttagaaaagtggcttttggacttttctaactgcaacccacagcataaattttatccagtacacagagtaagaaatatatgtaacctggcaaataagccatatttataactgaaataaatgtttcatgaaataatacttaaccttactatgtgtgatgcattcttatattgtctgtgttatttcattgaaaaatgactggtcatttgtagtttgtagaacactggatagtcaaggctgtagacagggagactagttgcaagaaacaaatggcagttgtctagtaagcgatgtgtttaaagggtatgaggaagggatggatttaaaatttaggatgtagatttcagagaacttggtataggggagagagaactgaaggtgaacttcaggtatacgttcaggtgtacttcagcttctgtgactggataatttgtggtttcattaaccttatttgcatgtaaaggaggaggagttagttgcaaataggggtgagggcagtcagtcctcactggttggatcttaattaagatttctgcagaagaggtaccaaatgaatacttggggctgtatttcgcatgtttaaatgttttctgtatacctggcacaggacaccaattaacagaatgttcgaagactatatttgtatcaaaagcccattgtttgaatttttgggattcctttaggaacttggtatttaaatttttatatataattatcttaggacaagtaggcggggtagcgaaatggatatttattcagtatctttaaattttatattctttatcttcctggatatatttcttgtattgactgaaatcgctaattttgctgggcatgcacctgtagtcccagctacttgggaggctaaggcaagaggatcacttgagcccgggagttcccgtccagcctgagcaacatagcgagaccccacttctgaaaaaagaaaaaaaaaatctgcaaacctgcatattggcagaactcagcatgttattcacattgtgatgacgcaggtttatccagatgtgttgctatagactttttgtgaaagtggaatgttcctttgacatgcaggtgaattttattgcgttttgtgccttttggctgtatctatagctattaattgaatgacttgctgattaaaatatactgggtactgaataatgttgctgatgagagtaaatgtaaatggtgtgaagtcaaagttggagaattactgatctcagtggaaaaaaaaaagactgggtggaaatgtcgggagataacatattgagtgctttgtgaggctgaacacaatattttctctaatttttgctttgtaattgatccacataacccttagaagtaggtgttgttagcttcattttctgggtgaggaaataaaggcttaacgaagtgaagcaactggaccaaggtggtactagtaagtgactgaacaaagatctcaatccaagactatctgactctagatcttgtatcttttcatcacttcttattgccactctttttgccttgctgtgactatttctagttaaaattcctaggaaacctggaaagcataattttatgcttacttcaggagtaagagggataaagctctgacacagtcctgtggtgtgctgggaaggaaaccttaggaagccagaaacagtgatattgcaaagagcagtaagcagtcctttctctgaggccctaagaaggactgatcaatgttttattagcagaagatactggttccttatctcttgcttttcctccttcatcccttccccaggcttcaggaagcctgaaactagagagagaacacattctcagggtcagggctacaggagagagctctcttcttctttgccatcactggaacactcctggtttttcatgaaatgatgtgtgcagtctttaggttctgtagacttatcacaggagtacgtgcttcgtgtgtgttataggaacctagtcattgcatcttaacattaatccttacatttatggaaaaaagatgttttaacttctaaaccaactcaaaaaatgaatgttttggcatattactggtttgtaatttgaggatttttttttttttttgagacagagtctcacactgtcgcccaggctggagtgcagtggcgcgatctccgctcactgcaagctccacctcccgggttcacgccattctcctgcctcagcctcccgagtagctgggactacaggcgcccgccaccacgtctggctaattttttgtatctttagtagagacggggtttcaccatgttagccaggatggtctcaatctcctgaccttgtgatccgcctgcctcgtcctcccaaagtgttgggattacaggcataagccactgcgcccggcccaatttgaggattttctaaactatacttgctgtatttgatataaagaaaataaatagagaatacagaactatagaaaaagtttcagaatcaaatggtttatcctcttactccctctgactgaagctcattttttctctgaagcctgatctgctgcagaaagctaaataaaatcgtggaagtaatggtgtttaacaataagaaatcactatgcgtgattacttttttgtgatagaaactattaaactatttttgaaacattaatcaaagatttttactagctggattataagtattttgtggaaggtaaagattatatagcaattgaatatttttctggtataaaattctccccatctgaaatgtatttcgattatgccattatttcaatgaaaaataaaccattgatttttgtatatttgagcctgcatctgttttgctccatatggtgttttaggagaggtaggtaaataagaaagatcctgtgacttaggatgctaagattcttacattgcaatttagtgagtatctcaaatcttaaacatttgcgaatgtttaagattttatttctgatactaaaatatgatgtacatttaatccctattcagtatattaaattttgacagcacacttatttctaatgattatataaaatgtggcttgtatttatttatattgcatctccctctcctgagctatcaattctacttttgctactgtctgctgatgtgttaggaaggaaaccttaggaagccagaagtagtgatatggttttctatctagttacttctttggcatctcaaatttagtataggcagaatcgacctaatcgtatttcttccctaaacacaattctcttgtattccatatttctacttaaggctgtcatcatttttcaagtctctcaagctcaaagcttaaagtcacttttaacttcccctattattgtgaagtctgtaatgactctcctcacttttactactctcacaaggactagtttatgttcttggccagtaactgttcaatctagtggatcatcagaatcacttttggaaaaaaaaaaatagattccagctcccctcatgccttcatcctactcacatatagattctgattcagaaggactggggtgtggctggcttcctgatgatccagatagtttgggaaccactgacctggactagtagcttcctccctagtttctggcaataagctcttccctcttgcccctcagatttatcctccaggctgtcatgcatgactgtgagcctcctagatgagaggaatcatgtctttcaacacattttttgtgcttctctttgtgggtcattcaagatcctattgtatggtatgatcctggctgacttttcaaccatattttcttttgctttctttttaagttctttatatttccctgatattggtgcctttgcttataattttctctttatgtgactgcatgtttacttttcaaggcataagtcaagccttaccttttccgaagaaatcttaccgattatgcccatgttctcctgttcactgaagtagtgtcttcctcagaaataaccttaattcctttatcaggacctcttttaataatcatgataattaagaatcaacatttactaagcgtaaaccagataatgccctaaatgctttacatgaactatttttacttaattaagccttatctcatgagatagttattttgcatgtttacaaatgagggatctgagatacagagaaatgacccctcacagagtaacataggaagctaatgggagaatcaggatttgaatacagatgttctgattccatagcctatgctcttatccattaggccataccaactcttttaggcaccagtcattttctaccctgtgtcatatgtattaacatttatgttcctgtcttacccatatacttgagggcaaatacttgagttattaatcttttgtttaacctgtagaacctagcatagttccttgcatgtacaatatgctgtatatgttttatatttgaaggaatgtatgaatatacatttttttttatagttttcaaacaaaagactattaccagttggatggacactaaaggaatcaagacagcggaatcagaaaggtatagaaacattcctatgtagagaaatgaataataatacatggatgttttatcttgttgctttaatattttctctctttgttcatgcttttctgttctcctttatctatgttaattcaaaatcaacttataagtaattttttagagagtcctgtatgccagggactgtcctgtatacttgagataccaagatgagagaggaatagtctgtgtctttttttttttttgagatggagtctcactctgttgcccaggctggagtgtagtggcgtgatctcggctaactgcaagctctgcctcctgggttcacgccattctcctgcctcagcctcccaagtagctgggactacaggcgcccaccaccacgcctggctaattttttgtatttttagtagagatggggtttcaccgggttagccaggatggtcttgatctcctgacctcgtgatctgcctgcctcgacctcccaaagtgctgggattacaggtgtgagccactgcgcccggccagtctgtgtctttaagatacttacagtgtagcagtggccacagacacaaaaacacataattactgcctggtgtgatagatgcaatagtaaaggtatgagcaaggcacagtggtggttagtgtgtagaagaaacaaatgttcaactttacctttggtccctaaaggaagactgcacagagaggtgagtgacatttatgacttgaaggaaaggcgggtgtttgccagacacacagctgcagggagggcattagggatcacatacaaagacatggagtcatagaagacatgctgtgtgctcagctgaccacagggagtttaattactgctgtgacactgggggtatgattggataagtgacttttttgtattataagttgtttttagttctttctgttctcttgtagtttggatagtaaagaaaacaacaatacaagaatagaatccatgatgagttctgtacaaaaagataacttttaccaacataatgtagaaaaattagaaaatgtttctcagctaagtcttgataagtcacccactgaaaaaagtacacagtatttgaaccagcatcagactgcagcaatgtgtaagtggcaaaatgaagggaaacacacggagcagcttttggaaagtgaacctcaaacagtaaccctggtaccagagcagtttagtaatgctaacattgatcggtcacctcaaaatgatgatcacagtgacacagatagtgaagagaatagagacaatcaacagtttctcacaactgtaaagcttgcaaatgcaaagcagactacagaagatgaacaggccagagaagccaaaagccaccagaagtgcagcaagtcttgcgatcctggggaagactgtgcaagttgtcagcaagatgagatagatgtggtgccagagagtccattgtcagatgttggctctgaggatgttggtactgggccaaaaaatgacaacaaattgactagacaagaaagttgcctaggaaattctcctccatttgagaaggaaagtgaacccgagtcaccgatggatgtggataattctaaaaatagttgtcaagactcagaagcagatgaggagacaagtccaggttttgatgaacaagaagatggtagttcctcccaaacagcaaataaaccttcaaggttccaagcaagagacgctgacattgaatttaggaaacggtactctactaagggcggtgaagttagattacatttccaatttgaaggaggagagagtcgcactggaatgaatgatttaaatgctaaactacctggaaatatttctagcctgaatgtagaatgcagaaattctaagcaacatggaaaaaaggattctaaaatcacagatcatttcatgagactgcccaaagcagaggacagaaggtaattttctctcagcagtatctctccaatagcataatatgctttatagttttgtaagggagtttaacgaagctgtgatttctagtaaagcaaagaaatggttttgtttcttgttaactacttatgctaaatttaaacctagactccaaagtttaaactctaaaaaggctagaaacagaaaacaagaaataaaataaatattagaaatcagatttttagtttcatgagtttccttttggtatttatgggaattgctagaacatgaaaatactaggttgatagtagctactgtttcttcagccagacattcttctagaccattgtatattacacttttttttttttttttacactttgtttaatgccgtgacaggcagacagatggtattatactcactaaatgagataactgagatttgggtaagagaattcactggaatcatgtaccttctgagtggtaatgctgggatttaaatccaggtgtgtcatattacaaagcttatattttgccgttaccccatatggaatcttaaatcccatccatgatttctgtgatttgagtttcctgagatagtgcaatcagcatgcaatagtgagttcacttcattgaaaattactgtgtagatgatactgtgaaccatgactcatttctgttttgagaaggtgatttacatgtgtttggaactttcttccacagactgttgaaaataagctcttgagttttataagctttataggtttttcttttgattgtaaatataatacataacgaagtgagtgaccaagtatggcatactttaaacaataacgtctgggtaagttttgtgcttgtgtatctaagggaattaaaacagtaaataatttgtgactaaatacatttgtcttgaccttagaaaagaacagtgggaaaccaaacatcaaagaacagaaaggaagatccctaaatacgttccacctcacctttctccagataagaagtggcttggaactcccattgaggagatgagaagaatgcctcggtgtgggatccggctgcctctcttgagaccatctgccaatcacacagtaactattcgggtaggtagcacctcttatctatgatgagagaagactggaagtccttatttattgtgatatttattaagtgagaaacagaccaaggcttagaaagttcttctgttttctgcatatataaaatactgagaattctacagaatggagcaatataatgataacttacttagtatagaacttaacaaattagcaatcattagcaatcattatcagctgatggtgaagataattttttttttccagtatttttaagaaacctcattggattctttttttttctttttactcagttgatagtattgtgtactgactgcagaatcctgcattcgtccctaaatttcaaaattacgtatggtttagtgtccttaaatcattatccagctgtgcctttttttttttttttttttttgctggagaccagagttttcttattactcaaatcagtctcctcgagcattcggggatcagagtttttaaggataatttggtgggttggggaaggccagtgagtcgagagtgctgattggttgggtcagaagaagaaataatgggaagctgaagctgtcctcttgtgctgagtcagttcctgggtggggacaagatcagatgagccagtttatccatctgggtggtgccagctgatccatcaagtgcagggtctgcaaaatatcccaagcactgatcttagcagtttagggcgggtcagaatcttgtagcctccagctgcatgactcctaaaccataatttctaatcttgtggctattttgttagtcctacggtggcagtctagtccccaggcaagaagggggtttcttttgggaaagggctgttaccatgtttgttttaacattatattataacattataacaacattgtaacaaaacataacaaaagactaacattataacattataacaaaagactataacgagggctatgggagttacaagccaagaacctggacaaaaaccaatgtgaatatcataacactatactaacagaaactgtacatattaaacatattaaataattaaacctccttccctgcttcccctagttcttagtaacctcttttgtactttttgtgtgttcttgcttttaaaaaacaacttcattgaggtatataaaaattcacccattttaagtgctcgatttggtgatattgagtccattttttgagctatgtgaccatcaccataatccagttttagatttccatcacttgctgggtagttttaaacattcatctcatttattagtcaggttttatatagatttcacacgcagtactaaaaaaaattgacatgatcccttttaacatacaatttagtgtagatgtgattaactattttgaaattcagaattctttagcatatttagaggtgagagtaacattgagcagagttatggggtttgagctgagctctaaaagataagcataaatttctgaggtgcagttagtaagataggagacttccagacagatatataagatttataagaaaaggctgtgtggttgaaaactatctgttttagaaatggaaaacagtgcctttgctggagtgtggaatttgggtggggaatgaggaagagacttgaaaattggattgggttcatatcacagggggcttcaagtgccaggaaccagacttaagtcatgtctgtgcagacagtatctgtgctgtagcaagattaatcagacagctgcatgtaaggaaaacagaagtgaggatacactgggagacaggagaggtaatgtaagagcccagataagagttaagtaaggtaacagtatgtaccgaattgtgccacatagaggtgcttcaggggttcttttgaagtttgatgcaaatttcatttctaaattatatttttaacagtgaaaaacttgttaaaaaagaactgcacaatcaaatttgaagatgcttaattccacatttgaaccagctgtttttgccaagataacccatttttgtgcagaccacagagccaaggttcccttgctaccattcatctgaagagttagcttaatatcaaaataaagtttgtaaaatgttaccatttgcaactgtatagatggatgaatcaggattttcttaataatgtgtaagagagataaatgtaaactaaatggtagattgatgtaagctttaactctcatccctaactcctactttcaaattttgtatttaaaactgtctcatcatcacttattgatattagagtaagtaaaagttactataaaaactgtatttcttttttttttttttttttgatggagttttttgctcttgctgcccaggctggagtgcaacagcacgatctcggctcatggcaacttccacctcccgggttcaagcaattctcctgcctcagcctcccaagtagctgggattacaggcatgcaccaccacgcctggctaattttgtattttagtagagacggggtttctccatgttggtcaggctgatctcaaactcccgacctcaggtgatctgcccacctcgtccttccaaagtgctgggattacaggcgtgagccaccgcgcccagccaaaaactgtatttctaaaaatagctttggtgtgactttaaatgactttatgtcaaatttcttagggaaaaaagggattctgctattttaaaaagcttgaaaatcactgagataataatcatggggataaaaaagaaaatagaaggttgcattattatgaggtaaaattgatagaatatggtgaattcctaaatatgggtgacaaataaaaaggagttgttgataatgcatgtaaaattaaggttcttagtctggattactgagatgatgttaatggtgaggaactggagaaaagatggacagagggtgttaagtgatattttagctttttctcttcctcctctctcccaccctcccacaaagaaaacccaaaccatcctgtaccgtcattatatctctctaatatctaccatctctaccatcaaataatctctatagttaatgtttctttcttagatacccaggacccttgagtttttaaaatcttctattttattacaacagcaatgcaagactattgtaaaaaatacacaactattatatgaaagcatgtaactcagaaaacccgtctgtcagtcttattcccagagtttaacagtttgttgtattttcttctagattcttattcctgaatatgataataagatataaatgtaattaacagttacttaatagcagtgtttagttacattattaagattccagatgttaatagttacagattttgaaatagtaaaatgaaagttgggcatgatagctcacacctgtaatcccagcactttaggacgccaaggcaggaggattacttgaggacaggagttcaagactagcctgggcaacataggcagagcccatctgtacaaaaagttaaaaaattagccaggcatggtggcacatgcctgtagtcctagctacttatgaggctaaggcagaaggattacttgagccctgcagtttagcctggatgacagagtaagaccctgtttcttaaaaataaaaccaacatttagctttagaaatgtaaggcaatctgaaattgcacttagtggtcgatttccaacaaacacatgcatacgtgcgtgcatgcaaacacagagccacacacaaagcatattacatgtatgttccccttttgtgaagctcaactggtacctatgctgttttatcagatgatatggaacatccttataaaatcacctttgggacgttcttatgagggtgaaaatactttcagcataactgctgattctgtcacatctgactttttttttttttcgagatggagtcttgctctgtcacccagactggagtgcagtggtgtgatctcggctcactgcaacctctgcctcccgggttcaagcgatcctcctacctcaccctcccaagtagctgggactacaggtgcataccaccaaccttggctgatgtttgtatttttaatagagacggggtttcgccatgttggctaggctactcttaaactcctgacctcaggtgatcacccgcctgggccccccaatgtgctgggattacaggtgggagccactgttcctggccttcttctttttttttttttttttaaagagacaggatctcactccgtcacccaggctggattgcagtagcagtggtgtgtgatcttggctcactgcagcctccaactcttaggttcaagcaatcctcccacctcagcctcctgagtagctggggttacaggcatgtgccactacatgtggctaattttctaaatttgtagctatgttggcccaggctgattttgaactccaggcctcaagtgatcctccagcctcaacctcccaaagtgttgagattgcaggcgtgagcaactgtgcctggccacatttgactccatagacatttcttttctccttggaatatactcatcctttggctccgtgacacaatataatcctaaatttctttcttcctccttagccaattcttattttccttttaggctgttcttctgtatgtgacaagtaagtgttgttggagttcctcaagcctttttcataggtccttttttcttctgtctctctctggttggtctcacccacccttgtggttttagtgatcacctatatagatgactcacaggtttatttttctttctttctttctttctttctttctttctttctttctttctttctttccttctttccttctttctttccttccttccttccttctttccttctttctttctttctttctttcttgacagagtcttgctctgtcgccaggctggagtgcagtggcgcaatctcagctcactgcaacctctgcctcccaggttcaagcgattcgcctgcctcagcctcctaagtagctgggactaccgacgcgcggcacaatgcctaactaatttttgtatttttagtagagatgaggtttcaccatgttggccaggatggtcttgatctcttaaccttgtgatccaccctcctcaacctcccaaagtgctgggattacaggcgtgagccaccacccccggcccaggtttatttttcttaagttgcggtgttactaaactgaacctgagtacactcacccagtgcagtaaagccaaacaccgacactgacgtctgtagcaagagaagtaggggtgtttgtttgcagggcaccaagcaagtagaataagatagctattgcttaaaacctgacctccccaatggcttacaagcaagattttttaaaggcagagatatattctaggaaagcagaagttattggcaaaatcatacatcaatacgtgggggttatatattggtttggtcccaaaaggcaggatatcttgaagtggggttgcaggattcggagattctttgatttgcgattggttaaggaagcaaggctttgcctagaaacttgggatcagcagaaaggaatgttaaggtttggcatgtgggtgtcactgtctccaggcccctcaggaagaaatttagaatgaagaacgtcagtcagagttcagtcttcagttcccccttatgtgatgatggtggttggcactttccatttggcgggggtctgagtttctgaaaaataactcagggacctatgtcaagatgttatctttattttctatagggagcaacacatcttgtggctctgacttccatgagtggctattggtttaagctgttattacctccttgcttatctggtggctcatttacttctcaaggctagataggtgcctggaatttcccttgaagctttcagatatgatgaggtttctcttcaaataacctgatcagtcttttattctttaattcatagtgccccccttccttttttcctttttctcctttcttccattttgcctttgttagatgcccaggcacgtcacagtaccaagcattatcaataccagctcacattcctttccttatttggaaagagaactaactttctagcttattacagacatgccttcccctttcctctccgctttctttcacatgcccaccttatctaaaaaaatcaaatgtttagctaaccggaattagtttagattgtacgacccgaccccagccaatggggaaagggtacaggggcaggacttgcatcaggaataaaggctcttgtgcccctttgttcaggtgtgctctcatggcgactggccaaggaggcactcctctgtgcagaagtaaaattgctttgctaagaatcctttgttcaagtgttcaatttccttaggattttgagcattattcctaacaaagggattcgagattttcttttatttccttgcttgagggcactcctggcaggcccctaagagggctccctgctctgtctcagtagatgtttttacgaagctgcctgtttgacagtcttctttccatagttcttccctttttaaggaatgttggtgaatagagtcaaactctgtaaaatatttaaagaaatttattctgagccaaatatgagtgaccaatggcctgtgacaccgccccaggagatctgagtacatgtgcccaaggtggtcaggctataggttggttttatatgtattagagaggtataagacgtcaatcaatacatgtaagatgcatattgatttggtccagcaggcaggacaactcgaaaggggcttccaggtcatagattctctgcttggcaattggttaaaagggttattatctaaagacctggaatcaatagaaagggatgtctgggttaagaagggtttctaaagaccaaggttttatcatgcagttgatgcttgtaggtaacaggcttcagagctcttaccagatgcttcattacttctctcctggactggatcagggaagacctggaaagggaaggggattctctacagcagcagtccccaactttttggcaccggggaccagttttatggaagaccatttttccatgggttgggggatggtttcagaatgaaactgttccacctcagatcatcaggcatttgttagattctcataaggagtgtgcaacttagatccctcccatgcacagttcataatagggttcttcgtcttatgagaatctgatgttgccactgacctgacagaaggcagagctcagccttgctcacctcctgctatgcagcctggttcctaacaggccatagacccctagtccatgcctgtctggattccggggggttggggacccttgctctacacaatgtagattttacccacaagacacagtttagcagggccatttcaaaatatttcaaataaatacattttggggtaaaatacttccgtttctttcagagcttggtatctgtcatgttggtatcttaattgctataaagagtctgccttgtcagtcttaaagtacctgttttaatgttaatgctggtcagtcacatctaaatttcaaagggaggaaggtataatgaagcatgtccaaccacccgttcccatcatggcctgaactagtgtatggggtttgctttagaatgcccttggctgagggaggggcccattcagttggttgcggggcttagaattttatttttgtttcacccttttccttgttaattttttagcctttagagttaagctcagttgccacttcctcaaggaagccttacctaagtttaccagataaactaaatctgagctggtctcataacacagtgttcctcgtattcataacatattacaagtgaaattatatatttatgtgattatgctctgcagtgaagtactcatacatactaccacatggattaatcttgaaaacattatgctaagtgaaaaaggccagacacaaaaggccacatattatatgatttcttttatatgaaatatccagaataggcataatgttaaactttaaaccataatctctttctcttaccagtggcaaatctatatgggtctgcagcaatgttaatactcctccttagaagaaaggatttgattgagaggcataaggcagaatgagagaccaaggcaagttttagagcaggagtgaaagttcattaaaaagctttagagcaggaatgaaaggaagtaaagtacacttggaagagggccaagcgggcgacttgagagatcaagtacacagtttgacctttgacttgaggttttatatgttggcatgcttccagggggttgtgtccccttctcccctgattcttcccttgagatgggctgtctgcatgcgcggtgtgattactggagttgtacatatgcttgcttgaggtattcttcccttaccagttgagtgttcttataaggtcatataccagttaaactttgccattttgctccctagtacacatgctggagctgacttgcccaactcctaagatcttaacaggaagctgctgatcaccaatttcagatttttctatctattgggtgactcctttccctggcgccggctgcttccaattattttacagaggcagtttcacaactccctgtgcatcacttgagggttgtctgacattcctggtagtggtaggggccctgtcctgccctgctcatgtctgactggctacctactgtaccacttcctcaaacatttacttaatagttattatagtagcatatgtgtgtatatatatatttgcatgtgtacacgtacacatgtacacataccaggttctatcttacatattcagaatacaaagttaatatggttattttcaggaagtttgggatctagtgagggagaggaagacaagtgtgctctagcatgataataatctaacaaaacaagataaatagctgactactttgaagtttctaaagacttcataaagataatgaaaatctggcagagctatgaaggtgacaatagagatttaaccagatacagtgggggaggtggcaattggtagtagtggtattaaaaagagaggccacagtagtatgtatacaggcatataaatatgaaaatgaatttgctatgtttaaggaattttaagtgttgtttaagatttgtttggaatgaatggtgttttgataagaacgtatatgaaaatcaggatgacacttagaatcagagtataggcgttatagcattagaagcctgggagttctttagaaagggttttatgggggctagatgtgtctagcaacagctggagttagggagaaggataggaaacacttagtaaaagctgaggcaaggaaggattcctaggggatatggagctagaatatatactatatctggtgacttggacctggttgaatggaggtgaggaatgggaagaactgaagggttctttggtgatttcttgcctgggagctggtctctattttatagcatttgctttggttacttaggattattttatagaagatacattttgtttttatgcactgacaattttgtttaccctcaatttcaggtagatcttttgcgagcaggagaagttcctaaaccttttccaacacattataaagatttgtgggataacaagcatgttaaaatgccttgttcagaacaaaatttgtacccagtggaagatgaggtaagaacaaaaccgagattcttttagtctctgaaaaatggtttggtacttgcttgtttgacctttgattctgtgatgcaaaacaacttagaatagcttcctcatatgtttttcttttttccaaaagaatggtgagcgaactgcggggagccggtgggagctcattcagactgcacttctcaacaaatttacacgaccccaaaacttgaaggtatgttgtttttaccatgcttgcctgtttatgggccctgtgtctcctctttcaaagactttttggtcttaatagactcaggtagcaacattgtttagatgcaaaatgcttgcttcctggcactaaggaaggccccttagagacattctactaggaaatgagaagaactgagagttgcaaatgccttgcctggagccacacagaataatttggagaaccaggaataatacctctgtttcttgattccccatccaatttccttcagtgcaagcttctctttcttttttttgttttaaaattatcatgtttctgaaatatctttaaaagtaaatcaggaaagaattatgacttcagcaatatttgcccaaagggaagctgagtttcccaatgattaaagtatatgttaagcattctggtttttattgcccttaatatagctcctagcagtttaataatttattaatcttatattttggcaataatttatttttgatatatttatatttcatttatgactgcaagggtaactagtagattgtttttctaatatctaaaatatgagtgagagtgtgtgtgtatatatatatatttatatttgggggcactatagccatgaaaacttttcatgtttttataaatataaacagtgacagaattttttatacttctatgaaaatgagttttattttctttcagagacttaatttgttgtatatagtttctcagctttcttaatgttttctactgatacttgcaagttattgttaaactttctatacctttctgtagctcctgttttttttctttacatggaaaacattgatatgttatatcataatgtattttgaaggctttattccttggggacagtgtttctcaatcttctaatgggctctttttttaaaaaaagaaaagaaaagcagactgtttatttttcttttttacagtacaaattgatttatttaaaacagttacaaaaaaacaaaacaaaatagagattatcattagaattattaatggtttgttaaaaatcaggtaggattacggggtaagaaatggtattaggtgggaggagcacctgactagttctaaggctttagatacaatgcagttgattacgtattaattcagccattacatactggggatagtagatgggggatcagtaatttatctacagggaactcctacacagatccatgaagacctccccagtgccatccttttccactccttagaccctaaaaccacctgggtgacaacatttccgtccttctttctccaccccattccctatccatatattcttcccacacctaaggtgctgtgcaagctgagagcagtctgctctctgcagctggaacatatactgttttggctacagggatcctgtgtgactaagaaggttttaggggcagccttattttaatatttcaggttagccatgagtacagtcagtcccttccctaacacaatttagattgtcttgaacacaagtatcaggtgagggatcaaccctgcctccagcaataccagcaatacgctaaccactcaggctcacagctacaaaaagcaaaccctttaaatggaaacaatctcaagttctgctagagtttgcttagttttagtataatgttaattatgtgtatgcaaacatacaactaaatataaactccatatatatacgtatatgtgtatatatatacatgtatatatatacgtatatatgtacgtatatatgtatatatgtgtatatatatacacgtatatatacgtatatatgtatatatatgtgtatatatatacatgtatatacatatatatgtgtgtgtgtgtgtatatatatatatatatatatatatatatatatatttttttttttttaatttgaggctgggtcttgctccatcacctagggtggagtgcagtggggtgatcacagctcactgcaacctctgcttcccagactcaagcgatcctcatctcagcctcctgagtagcagggactacaggtgtgtgccaccatgcccagactaattttgtttattttagttttttgtagagacggggtttctctgtgttccctaggctggtctccaactcctgggctcaagtgatccacctggccttggcctcccaaggtgctggctgggattataggcatgagtcactgctcccagctaactccttatacctgtagtgcttatacagctatatcagtgtgattttttttaaaatttcaggtataatgaaccatcatttgatttgtatttattatcacagtgaaaacaatttgtagtcattattcctttttttgcacagaaattttcaaaccgctgatccaaaccccaaaatagtatgctgagaaattctttaaaatactacataaagaagaaattattttgcaattattacttttcctactaatcatgaacagttgatggatgttggtggatacaaagatgggatccttatatagaacatcagatcgcagtggcacgatctcagctcactgcaacctacacctccctggctcaagcgattctcatgcctcagcctcctgagtagctggaaaaaaatctcaagttctgctagagtttacttggttttagtataatgttacaggcatgtgccacaggtgcatgccaccacactgggctaattttttatattttttggctgagacactgggtcttgccatgttacccatgctggtctcaaactcctgagctcaagtgatccacctgccttggcctcccaaagtactgggattacaggcatgtaattaccacatctggatgaaggttcgttagaatttaacatacctgtactgtggtgtatagtaggacagctcaatcttttcactattttttctattaatagtactagccttcattcgtacagcgtgttgttatttggccattgttctctaaaaacaaaattataaactcacatagaagcaggctgcccaggaatactacccagagtccatttgatgaacactatcttaggttctttatttttattcttctaaacagaggctgtttttaagaatttttatatttcttcaactgcaaatagaataattatagtgaggccaggtgtggtggctcaagcctgtaaccccagcactttgggaggccgaggcaggcaggtcgccagaggtcaggagtttgagaccatcctggccaacatggtgaaacctcatctctactaaaaatataaaaattagccgggcacggtggtgggtgcctgtaatgcccgctactcaggaggctgagacaggagaattgcttgaacccaggaggcagaggttgcagtgagccgagatcatgccactgcactccagcctgggcaacaaagagcgaaactccatatttgaagaaaaaaaaaagaataactatagtgttttaacttacacagtctgcttacttctctagcaattccttagtgcaccatgattatttcaggaaggggtaattgctttaatctgaatttcctttttgcgtttcccttatggtagattcaatagaacagagtaatccatcgagatatttttctatctgcttatggtaattgtttcctttgctgaaagaatgctttgagagaggaagagggaaacattaaatccctctaattgaatataatgatctttttgctgttcatataccatttgatgttggatttagagggattagagacattcagaattttaaaaagtaatagtgtcctcaaaagttgatttacacagtagtacttatataaataatgtgtgtgataatttgcacagaaagaattttttgtgcttattgtgaattatgaaccataaagaacttattcagtcgttgataactcaagagtacagagtagtatccagtttttctaatgacaagcaatctcatggtggactacttttgagacttgaagactgaagtaaaaataaatacaagctaaagcttaatgctaattataaaacactaaaataatcagagaattacagtgaagaattagaatgcaattgctacttaaaatttttttccttaccaactttgaggaataataacatatggataagaaagtttatccttttaaagtgtgtcatttgatgagttttgacatttacacatacccatgaagctcccattataatcaagatacagaatgtttgtatcatccccaaagattcctctccccactttgcagtccattccattttctgctctggccccagacaactactaatctgttctttttcactatagtttacattctgcatgaattgaatcatagtgggtatgtctggcttcattcactcaaaatgaagataattttgagattcatccatgttgttcaatatattgatagtttgctccagtatatgcattgtttattccttcacctattgatacacatttctatttaatactttatgaagttttgaaattagataccagtgattggaaaaaaaaatccttaaaatcttttaattttttttttctttcttttttttttttttctgagacaggatcttgccctgtcacccaggctggagtgcagtggtgcaatctcggctcactgcaacctcaacctcctttgcttaagcgatcctcccatctcagcaccctcatgtagctgagactgcaggcacgcaccaccatgcctggttaatttttgtatttttttctaggggtcttgtcatgttgcccaggctagtctcgaactcctggactcaagcgattcacctgcctcggcctcccggagtgtgctatgattacaggtgtgagccaccgtacaggccaaaatctcttaattcttttttctttttttctttttttttttttttttttgagacggagtctcgctctgtcacccaggctggagtgcagtggcacgacctcggctcactgcaacatctgactccctggttcaagtgagtctcctgcctcagcctcccgagtagctgggattacaagcatatgccaccacacccagctaatttttgtatttttattagagacatggtttcaccatgttggccaggatggtctggatctcctgacattgtgatccgcccacctcaacctcccaaagtgctgggattacaggcgcgagccactgcgtccagcctaaaatctcttatttcttaatggaaaatgttatgtatgacttgtgagtgaaaaataaagactctttcactctttctggctatcttattttagggaagatttttctttttcttttatcttctcttctcttttcttttcttaaggaacttggatgtcccctgattccaagtgaataagacacattttgttggctcatcttttaacctagatacttagtatggcatgaagtactattcaggaagctttgacagagtattaattttttaaaaacttattcaatgataacgaaatttggaagatttatagtaataatctaacagtggttttcagacctgtgtgcctcagtaaaaaaattttgagtgtgtgttaccaatataaatagtcatttataaattctacatatctattactttattaatgtagtatgtacagtataaaataaaaccaaagtagatatttaaaaggatgagataaaaggtaattataaataaatagttgtttctgcacatctagtggattgccttatgcatacctgactctggaaaccagatgtatagtattgcctattcaaacagttaaaagctacaccagtagatggcataatattttgacttttcattctacataaatgtgtaatttatgtgaactgctggaggaagataataatttatatatagtataaaaatactttatagtaaaggaaaaaagacagtttttaaatactttttttctaatctcctcatccccatgaaatttttattttttattttttacaaaaaaatttatgcctcaaccctattaactgacccatgaaattttcatactacaaatctgctgtgtatgtctgtgtatatataatctgacgctttcaaggaccaccaacaattgtgataactaagtttattttttacccctcaagatccagtttttgtctatttggagtatatcaccttatttagaatgcatgctttagggtgtaattgtgttttttcacctattacttgacctttctaatctcatttttttaagtgagtaataaattagtattcattctgtttgtctgtagctactgatgtccatatcagtagcagggggaggtagtaggaagcttgtctaacattatgaaatgtactggaggtaattcataagagacaggctcttcataggtcattcacttggccataccatgacgtttttttgtttctgcattttccacaggatgctattctgaaatacaatgtggcatattctaagaaatgggactttacagctttgatcgatttctgggataaggtaaaagtatccttatttctttatgaaaatattattgacaactcaataagaaggtttgagaagaatacccataattctgccacactaagataattatcttttagttttataaatttgctgttattttatatgtatgttttaggtaaatacaattaggagttaatattgaattttgttttcatctcttagaatacacattttctgttatattttcataccattatcagcattatcaaggaatgtataatagtccatgattagattttgagaatataatggttcttatattctcaaacatacaggttgcatccagttttaccttcagttacattgtggcaacatcattatatatgtatatatattttcccatatttgatattgtttctttaggtgatttccagaaattagatgactaagtcaaagggcacaaaacatttgtttaaaaatcttttaaaaacttttgtcataaaatcatttttccacagattaattgtagcaatttactatgctgccagtagtggataagaatatcactttcatagtaccattagcagagagagtcttttcatttgtctattggccatttctatatcttctttggagaaatacctattcaaattttttgtctttattattgaattttaggcattctttgtatattttagatgcaggttccttaccagatatatgacttgcaaatattttctcccattttgtgttttttttttttctttttcttgatgttacactttgaagctcaaaaatttttaattttgacaaagtcagtttatcattttttttcttctgttttcgggatcatatttaagaagctaatctaagatcatgaagatttatgtttcttctaagaattttatagctttagctcttacactatgaccattacccattttgtgttaatttttgtatatgatgtaaattagaagtccaattttattattttccatgtgaatatccatttcgagttaattttcatatgtggtgtaaggtaggagttcaacttcattattttgcatgtggataacaagttgtcccagcaccatttgttgaaaagactcttctatcccgtgttgaattgtcttggcaccttttcaaaaccagttgacgtaaggattgtttctggcctctcagttctgtgacactgatctatatgtctatccttgtgccagtaccacacagtcttggttgcatagctttgtggtcagttttaaaatcaggaagtgtgtgtcctgtagctttggtctttttcaaatttgttttggctatttttggattctttgcatttcactctgaattttaggattaatttgttactttctgcaaaaaacctaggtgctaagggcaactcttacatcacgttaatagaatccaaactaattctgcatttcgagatagtgccagtaatttcagaattatcttattgagcttttgacccatatggcttttacaaggcaggcataaataatggaagacttatccttgtgtctggaaattggatatctcagatatccttgaatctaaatgtctttcactgtaacagcaatgtaatatctgatatgatgaaaagtagatcaaaccgatataatcgttatccttgtcacttaagttatcaggacataacatttgtattgtaactttctgagcttaaattggacatgatggttaattggggtaagaagtaatgtataatttgataccttgagatggcagtaaaacatgccattggttacaatacctctgtcaccttgctatgaagtagtcatttgtttctctcttcttaatcagaatactcagacaggaccttgtttcccctttatctggtgaccttgcccagaagcatgcctgaaacgggtaatatatagcaagttttggtgtgtttagtgtagatcataaatatgagatgattactcaggtgctgatgatggttttacagttatttagggagaagagtccttgcgttttcgaccttctaatatttatttatttatttatttatgaaatggagtctcactctgtcacccaggctggagtgcagcggcacaatctcagctcactgcaatttctgcctcgcgggttcaagcgattctcttgcctcagccttccaagtagctgggattacaggtgcccgccacgttgcccggctaatttttatatttttagtagagatggggttttgccatgttggccaggctggtcccaaattcctgaccttaagtgatccacccaactcggcctcccaaagtgctgggattacaggtgtgagccaccgccctcaaccagaccttctgatttgtatttactttgtaaacatatggagggttggagaagtccccacaactacactaagtatttatttcttgttgtattctttttaagtctttgcccatatatatgatgtcttatagctagacataaatgtatgtttaaaatttatgctgtattataaaatcttctgtgttatataattttataatgtttagccttaatggttgcaataatattccatcaaattgataaattgtctgctcatccattcctgtgtttgttggagatttgaggaaatttgtgtaaagcttatctagagatttgaagggggttctccctgtgattgtttgctattctgtcattatcagtgtacttaacaaaataccttggatgtttaatacacttgtttatttttctatccatcaaatctccagatattattctagaactttagcaagtcatgacccacagggacaacattgcccacgcttgcagtggttagtgagaagtaagtgtcagacatacctatataggtgggattggtggaagaaaagatttttagcgcaagggaaacaattgtttgctttggttttaagttgaaaatatatttggtttgcattttcagtgtcttatgttctgtactaggaatgcttgtttataaagggttcttttatttttttatttaaagccaggctatagtgcagtggtgctgtcacagctcactgcagcctcaaacctccggggctgtatacttcctcccactttagcctcccgtttagctgggactacaggcatgtgctaccacacctggctagttttttgtatttttttgtagagatagggtttcaccattgttacccaagctggtcttgaactcttgggctcaagcaatcttcgctcctcagcctcccaaagtgctgggattataggcatgagccactgtgcctggcctataaagcgttctttattttcgagatggattccagctctgtcaccagactggaatgcagtgatgtaatctcggctcactgcaacctccacctcctgggttcaagccatttgcctgcctcagcttcccgagtagctaggactacagacgtgcgccaccacacccagctaatttttgtatttttattagagactgggtttcaccatgttggccatgatggtctcgatctcttgacctcgtgatctgcccgcctcggcctcccaaagtgctgggattacaggcatgagccaccgcgctcggccttaaactaagggttcttaaacattgtttattagcagggtttcgcaatattttcaatttttattttctaattttttgttgttttgagacagtatctcactctattgcccaggctggagtgcaatggcatgatctcggctcattgtaacctccacctcccaggttcaagcaattcttgtgcctcagcctcctgagtagctgggactacaggcatgcaccaccacacctggctaatttttggatttttggtagagacagggtttcactatattggccaggctggtctcgaactcctgacctcaagtgatctgcacacctcggcctccaaaagtgttgggattacaggtgtgagcggctgctcccagccagaatttggaaattctttacttaaatgtcacattgaactctgagtggcttgttttattaaggaaaagaattaaatttgacatcgtattaagattaatattttgcagttacgtttattttgaagctgttgatatttatctccttaaaaccttcctttgattaattctgtaagtaaaggattttgtaacccaaactaccttacaacgagaggagttcatgtcaacagtcattgtgaatccatggtactgtaattacctacattctggtctctagcacaagaggtaaggtgcccagaagcccaccctggtgtgtgagcacctctactggaatggaagtaaggagtattacctaagcttttattagtttttcagaaaccagcaaagatcacagagaccaatctgttaatttgttatttataattatatatttaggtgctactgagtcgaaatggctgttatttagtgttttctgcaacttcagggctaatattggtcttcctcactgctagctgctggaagtgctacaaacacacaatctgtgttttatggccctcctgtgtggtgtttcacaaaattaaattcaaacacttctgtaatttatattctaaatgaatcaatatacttactcctggcatttttcactggaaagttgaacaaaatgttctatatgttataaaagtcctctatcaatgcatcttggaggaatttttaaatacttctcttttttttttttttttgagacacagtctttctctgtcactcaggctggagtggagtggcacgatcttggcccactgcaacctctgcctcccaggttcaagtgattctcccgcctcagcctcctgagtagctggaattacaggcacccaccaccacgccaggctaatttttgtatttttagtagagacagggtttcaccatcttggtcaggctggtctcgaactcctgacctcaggtgatccacccaccttggcctcccaaagtgctgggattacaggtatgagccactgtgcccagccaaatactcctcttttacaacacctgtggcactgtttcatttcacttatagtgtgttaacttgtgaaatttacattaaagctgtagtaactgaagggcatgggggacgtatttttaagggggtttcttctgtttctgcaatgttggcttctatttctggacttggatatttgttttatatttattcattagactatacatatatatttttatgtactttttgaatattcacaataagtataaaatgttattataaagagctttaaatctgcaattgatttatatagcaaacttcttaagaaaatggattaattgttgaaaggaagcctaaggattttagtgactatttcatcttcctttccatgttgagttttatgtctggaattgaaaagatagaaatgtataagcctttcgtttcatccttccattggtttttccatgaaggctgtcataaataacaaaatgaagtggttttggttttgcttttgttttttgcatctgtggctggtaaaggtagagagtgagagataggagtacaggaaggagaggacatttaaaagtaaaaaatgaaaaacctagactttagaatgattttgttgctgtgatgaggctagtaatatgtttctctttgtaaaccacaatttaaatatagatatatagcataaagtctttacttcaaatcatacatacaaaatagattattgcaacttagaaattgtgcatcttttgtcttcgctgtagttattaaaatatcgactacgcattctcctatcatctcttgtcctatgacttgtcagagaaagactgtttaaagcctctatcactgtaaataagagtgtgtaattctattagtattgaacttgcatttttatttatgtgctacttaatttaaaaggtaaatgggacatcatattgagttttgaatgatgcaaattaagttgatcatgttattatatctgtctttttcttcagaactgtttctgtcatttaaatttttttttactttttttttttccaagagcacaaatccacttttatttatttacttttcattaatttaaatgcttgaggggtacagcgtcacacagattctgtgtccagtggccttagcaggaagattgcttcagaatttggcatgaaccatgccactatttccctgggaccaagttacctttccctagattactctggttttgtttggtttgccaccaggagtcactttgttgttctttgttttgtatatataagtacatcttatgcccgaacagaattctgtttcattttgagcataagcaccttctattttaaaaagagctgtgtgctgtctttggttctggagaccccacttatgctcagcaaaaatggccttggaccacagccttccagacatacttccttttagtattcctgttcccagcaggcctccacaggctccaagttggcagaaagagaaaggccatttaaaattttaaaaacaggtacaacataattcattgtctccaaaattgaggcatgtattattatacctgtgtttagctaaaataacagtttttgaacttgtgattatggaaaactttaaaaatgataatgtattgacagagcatcagtagaaactcagaaaaaagaacataaacttgtattaaaatagattacaaaaagttatttcacatacacaaagtaatggctggaagaaattaagttttgatttatgcctttattatataataaaaagttaaaatatatgttgaaattattaggcaaaaatcacagcacaaatcagctatgattcaataacgtaaaacacaatagttgtatgtttatgcatcacttgagcatcaatgcattcatgcatatgtggtatactgtggacatcctggctttctgaggtgtggcatgctattatgagtagcttatctcatggtaattttaactgtatcaaatatactcagtatttttgtgtattaaaaattttagaacaaaaatattgttagaggatttttcttctctcttcattcctcctatccccacccctttatcctataaactgtctataaacatttcatggagggttagtgctttttagaatagtttgggaaaagctgacctaaggcggtaaattgttataactgctgttttaaatcacaacagatttcgttattcagtaactgaaggaatgtggcctccttccatgatagccttttggtggtcattttttgttttgttttggtttggttttttgataacactgaagtaagtttctgaatgtatataaacacattattacttagcttgatttaacattcttcgtagataatctgttttctgggattttcttcaaagcttaaaaaatatcaagtatctttgttatatttgtcacaaagagcctgtaccaaactcctaatcaaatgaaagcagccttaaatgtttcataagactacagctaatgtctttatctctctagctttcgaacctctgatttggagttcagtggaaatttaacctttttggacctcttcccttggtgactcacagtctctggaatcataaggtctgcattactttacagctcaatttaattcatgagaactataggagccaaaagggaactaatcagaatcactaaaatattgaaacagatcaattgtgacttttatatttgtatggaatatgtggaatttctctccctggtttggttaatgagtgcttttgaattgggacatatgttgatggtctcatatttatgatttatgatttctaaatagtgcatatcccaaaggacagattactccaattggaactaggcactttgcttttataaacttgatgagttaccatggaatatcagtcttagttgagccctctatgcactagatcactgatgaagttagagttgttattttgtgtttgcaaaacactatctggattgtatttatttatgtggtggacaaagaggttagaagttatagatactgaaaagtgaaaattcattcagtagactttctcttatattctaataatgaaattaagctagtacttagtttgtcctataactctaacccttcatttgggtcaaatagcagtagaagttattccttttaaatgttgctgtggtgttgatttcattatccaaaaatctactgttagaggagtgaagataattctgtgttttaatcttgcccatgatttatatctctatcagctagctctgaagtgttttgggttttgttttgttttgtttgtattttattaacacagttaaacatgatgccttgatttataatttctgttaatttgcatttattcttcttatgttcctactcataaaaataaattctatagtccttttgagtatgctttgaacacttatctacatgtaacatttcatatttaaccctggaaggactattgtagtatttttatctgaaggtaaaaataatgagtaaataaaaacagaacgttagatctgtttttcaaatttatatattgtttcagtgtgtagcctatctaaacaagcggtaaacttgctcatcaaagactaaataggtccattggtccttttatatgagggggtgctgttagtgctgtggtttaccaaagactaagccaatggtctttctccttattttactattagtactagtagagaaaaatactcatcctcgatttattgtgatgataatgacaggtaatgatttactacaagagtctgtcagattctaagctggctaaataatttttctttatagtgtgttaatgaagtttttagtaagctgagtgacatagtgccttgtcaccacaaatgctctttgattacatgaaaagtgttacaaaaagacattttctgccacaagggccatttccagcataatgaaatatggaatattttcaaatgaactccaaagtgatatgtattgaagtcttgctcttggtctaatctgcctcagtcctgagaagcctagctctaagataaacaaagggcatcttccactgggagtgcaatgttggaactgctcactgccttaagtaaccatatgcatagcctctttcctgatagttggctcctgtctccctttgtaatcctttccttcttccatgcctgctgcttaagttgcagactattccagcctcacttctcttggacacttctatctgttgcaggcataggcctgtctcatcccagactcacctcttctacaagatcctccctgtaaatatctcctttgtgtttgctggatcatcttatttggttatctttggcgatggaggtggtagtgcttattactgagagttttctatgtaccaactatagtgtcagcagtatgctttatctgatttaattctaacaaccacctcatgagttagatgctattaatatttctgttttacaaatgaagaatggaaaaccaaggtttagggagtttaagtaactaagtgacatctcatttttatctatggactgtggcacatgctgtcagagtcggtctttgacatagcacctaggaaagaagctgaatcagattaaacatactacccaaacattaggtcaattgaaaatggctagggaaaggggaagattcatcgtaaaaactaattgagtaaagctagggaggcccaataagttcaaagatttgaattcaaggtagaaagaagaagaaaaccctctagcagaaggcggccttaatggcccatagccttagatctggcatcatttagaaccacatggctggacatgtggctcaagcctgtaatcccaatactttgggaggctgaggtggacagatcacttgaggtcaggagtttgagaccagcctgaccaacatggtgaaaccctgtttctactgggaaaaaaaaaaaaaaagcggcagcatcacagcctcagggaaagcacctaccagcttccaacagtcttcgttcctttgaatcctttgccatctggttatattccctcttcccattcttgttatctgcccatctctgacacctcttttcctctctcctgttacttggcatcgccttgggcaacttcggttcagttgatattcatgttgatgaaccatttactagtcaaacccagtctgtgtgtgagaccttctactttattaacccatgtgaccacaaatgaccagagcttggacctgattatcccctgggccagctccttctctaaagccatgagctcagaattcttctcccaccacagcctcctagttttctactcccttattcctactgtgctttctgttttttgagtctccactgcgttcatcccttttcttctggtccactgtgtcccaggttgtattacgcaaatattaacacttcgtaagtaaagggttaatagttaaggtgggggaatgtactgcgtattatatcctccttctgggaatagctctgaggagtcttacagtaaagaaacatgcttagctttatttaattaaacctctttttttcaaacttatttataaacagcttccatgtaacagcttttgacttcctttgtagcaagtattccatggagcacactttgcagagcacagttgtaatggggaaggaagggaaggaggaagaaataaagggcgagaggagagagggaaggagggagagagggaataacaaatcttactgataggccttgctaagagttcatgttattcaatcttaactaggcctttgtttcctgttgccatcttttatatatttccttattactctaggattccaaaccttttcattgttttgtaacatttactgacattccactatcagtctgctcctacttaatacctctcggagagatttgaggacatctaaaaggtaaattctttaagtttctttattttaagggtttcaacatacctcatgcttctctttcttgttatctcaaaggaaaagctcgtcttattccattcctcaagggcagcatgtccaaaacaattatactttaggatacatatgtcactgtttcttttctggccttgtccctctttccctgctgcctggttagtgcttgcttgacttttagtgttcagcatgactatcacttctgcaattgactttatttatttatttatttatttatttatttttgagatgttctcttggtctgttgcgcaggttggagtacagtggcatgatcttggctcactgcaacctccgcctcctgggttcaagcgattctcctgcctcagcctcctgagtagctgggattacaggcacgcaccaccttgcctggctaatttttatatttttagtagagatggggtttcaccatgttggccaggctggtctcaaatccctgacctcaggtgatccgcccacgttgggcctcccaaagtgctgggattacaggcatgagctatcgtgcctgacctagactttctttttttagagcagttttagattcatagcaaaatacactgatttctcatatatcccccactcccaggcatgcacaccctcccccattatcaacatcccccaccagagtggttcatttgctacaattgatgaacctaccttgacacatcattaccactcaaagttctgtaattgatgttttacagtcatcttctataagcttccttgtatgaggctgtgatttgttctttgttatgttcctagcacttaacatagtgagaactttcaataccacttaatgcaggttatatgcaaatcttttttcttttgctctttctctctgccatcttctaattgactattggatttattcacctggatattccacaagtacctaaaactagccttgtcaccactcttccacattctgtcattgaatgattccaccatttatctattcattcactcaagccagaacttgttaatcatcttagctgccctattctgcctcagccacctttttctgctcatctaccatttcctcatcttacagtatgatgtcataattttacttcctaaatacttcttgagtttcggctctatttctgttacacttgtctcctccataccatcgtcatgactcagctagtatattgtaagagtcacctagtcgacccctgtgtgcagttgatcccttcaaatccatccttcatgctgcttacacacagtgagctatctgaagcatagatcttaaaacctccatggcatttcatctcttttcaactctattggtgatatttatggcattccatgaccttgcctctgcccacctctctggcatcatttcatgccacttttcctgcttgaaacctgatggtctaatgactctaaattacttgtggttctctgtcatggtgtttgcctgcttcttaatccagccttcaagactcagctcagtttttatctcctctgagtatccttttttgtcctctcagccgctactaaaaactcctctgtgtgctcacagtagtacctgtgcacaactccatgtacttgttacattaggcatcatatagccacgaaatgtctgaatattcatgaggcccaatttttccagggcatcttactattttctagcccatggctaatgcacagttaatgtttcttgaactgagttcaggatattcagggagagtagtccagcacacaaaaatgtgggccttgaaccacaatcacttaccgagagatttaggaattattttgtgtaaggtgatagttgatcatttgcaactggtgattggtagagagaaaaggtaaggccagtatgcataacctttactatagtcttttttgtttattttttttccagagacagggctttgctctgtcctccaggctggagtgcagtgcatcgcaacctcaaattcctaggcttaagcaagatcctcctacctcagcttccagagtagctgggactgtaggtccataccaccacagctacctaagtaaaattttttttggccgggcatggtggctctcatgcctgtaatcccagcacttcgggaggctgaggcaagcagatcacgaggtcaagagatcgagaccatcctgacgaacatggtgaaaccctgtctctactaaaaataaaaaattagctgggtgtggtggcgtgtaagttgcagcttctctggaggctgaggcaggagaatcacttgaacccgggaggcagaggttgcagtgagccgagatcgcgccattgcactccagtctggtgacagagtgagactccgtctcaaaaaaaaaaaaaaaattttttttgtagagaccgagtctcattatgttgcccaagctggtcttaaacacttgcccttaagcgatcctcccgctttggcctcccagagtgctgagattacaggcatgaaccactgtgcccaggctttatagttgttgtgtagcatttttaccctaaaaagtagtaagtttctagaggacagacaccttgtattgtttgtcttggtgtttatttttcacagtgctcaatctaatgtcctggacaaagtgggtgttcaatatgtgtttggactaagtagcaataaatgactagaattcagtagaagggagaggctgttctctttcttggatttctgagctctgtaagttcacgcttcaggggcccatttacctctttaattccctgcatgcaaaagggggatgaatgccctagatgatagattgaacctgacttcttaatgttttatgtgatatagctacgtaccacatcggtcctcatatgccttcatttttatatgggctataaaaccaaaattacttcaagaggaatatttgaccattttcatccttcttttaaaatgaattggagttaccaaaagtagcctgatgcagttgaataaaattaggtgtattttagaacctctaaacaaaaagctacagatttaatcatctgtagttgtatctacatatgtctgaaaacccctgaatcttctttcagttgccctggtgactgtttcattagagtagggtatcaagaaagactacatctgtggagtccaaacactggctactatccacgtaggctatttaaatagaaattaattacaatgaaataaaatttaaaattcagttcttcagtcacagtagccacatttcaaatgccacatgtggctgccggctgccatcctggacagcacagatatagaacattttcatcactgcagaaagttagactgaatagaaatgtactaggtcatccctaaggatccttctgcatctgacatccttctactgggaaacctgctcacagggacttctgagatttctcaacattgtttgactgcattttgaatttttttagattggatattacttcaaataattgagttgttgagtagaacttgtccatttttaataaagatcttttcattgtaatagcatttgttttaactacaaatgtatttgcatttttattctttctccaaagagtgcgcttccagagagtgtcctcaagccttttaggaaaattagttttgtttcatccttaataagagtgaagttcaaactataatattgttatttcatactggataatttaattaaattaagaattaagcactataatatgtatgtatgcacgttacttgatttgcatggcacattttataatagcgctgtgagtgtgctaagctgtccttgaactaccataaaaattacttaagtctgggtgtggtggttcgtgcttgtaattctagcactttgggaggctgaggtgggatgattgcttgagcccaggagttcaagaccagcccgggcaagatggtgagaccccattgctacaaaaatttttttaaaaattagctgggtgtggtagcatgcatctgtagtcccagctacttgggaggccgaggcaggaggatcccttgagcccaagagttcgaggtggcagtgagctatgatcacaccagtgcactccagcctgggtgacaaagtgagacccccatctcttaaaaatatatattactgagaaataagtatttttcagggtacttcttagagttgaaaaaacctgctaattatttaaaagtataaactataataaaagattgaagttattgctcacctgtatttcttggacaaattacatccattttacttctagggctggaaaacttacatcaccattagctgtttctctgaaattttgtcatgttgagttttactgcctgtctataaagatggataataatgtgactatgtggtattgaaagtatccattggcttggacataatagcaatgtggtttggtggtgtttacaaaagtgattgatggatatggccatgtagtcgtacagtaatagaagtgagaaataggaaagacatgtcagagcgtcttgtgccagtgtgggtttatttcctaaggaataatcatttaccataatagtactgagaagtaaattctttggaggcataggataatgagggtgtattattacgttttgtcttttctaaagtaagaattctgctgtttattattagcatgaaaatagatatgattgtgcaataaatattgtttaaagaagaacttccttcatgttttataaacctacacaattctattcttcatgtttaatgaagtttgtgtaggaaaatagtgtgactgtttttgattagaggcatattttgtttcaagaattggatgaagatcttcttcctaaactgattgtgttcccagactagttgttaattatttggaattaggagtcatgatggggaaatttccaccacatccagaaagtctgtgaattttaaacctctgatggcttgttttctgaagtgaaaaactaatgcagagttctgtcactagaaacacagcagtgcttaggagagattggaagtagggttgtggtgagaattggcaggaggactctttctcccttcattcctcctccttcgtcctgcactagctgataagagctgggccataggagtggagactaaaaatgaaaggaggtttcattgcttagcacttcttttcctcttttcccccttctgctggcaatccttgatggggaggaaacaaagtgtctgtatagcagcccgattatttcatattaagcaactgtcaaattaatataaggacaactgcaggttatttccagtgtgaattacagagtactttaaaaactcggtatatttcatttatctatcgttagggcaaatcattttaaatgcttataatgagctgtgatttttatcagtatttcccagatttgagtcataaacactttgaaaattcataggaagactcttaatagctgtttaaagaggaaaaccaaatcaaaccaaaagaaagtagaggggcaaggtgatcctcagcacagccatttgtatgtgtcaccacagctgacccctggactcagcctttcacaccaccttgccctctgctaccacactgattttgtacctctccatgcacagtcttatttaggtccatgaactaaataagttagctgctaattggtgaaatatgccttcttaaatatgaccatgttaacctggctatttcctgaaaaccggttggagtttattaaaaatggagaccatttttattgaagccataattgtcatgggcgatacacatgagagatcaccctgtggctggcctgtcagactttcatgagccttcagaaattaaggggaatgagtgagtttgttttcttgtaagctgtcacattctgctcttcaaagtgtcagcctgagttgtgcacagataaatgttagaaattttcaccttctccagttgatttttttacccttacgtaatttagtagtatgattgtttttcctctaacatttaatgtttttgtacttttaatttttgaaatgtgagcttgtgctttagacttgggaaaacttagaggtagttccagtatggaaagcttagcctatagacagtttaatcaacttacacaaaagaaaactatgatatttttgctgagtaatagagattctgaaaggcaatggagaggaggaggatgagctttgtaaaatcagctaatccagatagaaagtgtcagttaatttaacatatttttattgacggttttacatatgaacaccactgttgtaggaatggtgaatcaatcataaatcttgtcttaaaggagcttctagtaagggctagaatgcacgttcataaataacaacagaaagcagaaagtcttaagtgtcttgtgaaaaaaagttcaaataaattacaagagggagaattactttttagctggagagtaaatttggatagacttgaagcaaactattgtttgagcaagatcaaaaggttggataagttttggagttaagaaggaaagatattccaggatcgtatctgtagcagcacaaacagatgctatagaaaaatgaatttctgagtttctagtatgtaggctgcacagaaggtagagtttgtgtgtgtgtgtatgttatatatatgtgctgaatgagactagataagaatctagggtaagggagcttgactgttagttcaagggatttgttctgtattgaaaaggcagcagaaagccattgaaagctttgaagtggagcagaagcacatcatagtctacttgggcagaaactgaaggtgggctatcagcagggcagcagttagattattgtagtaatcttgatgagactggatgagggctgagggtagtttagtagtgattaagatgaggtaataaatatgtgagatcctgctggatcaatcaatataggacttggcagttaattgatatgggggtgatcaaagaagaaggaggctccagaaagtttgtgaattactggcccattagacattaatactttttatatggagctttagaattcataaaacactattatatctgaaagctttcgtaactctgtaagttaaagttatagtagaattatccttactatggatgaggaaataaagaatttagggatttttctgtggttaatacaagagtaaatgcacatctaggcctataactagtcttccagtttcttggccagtatttcttttatatccttccttgtgaacctgggaagaaaagctctggcatctagtcccaatgtctttgtgtttttttgttttttttgagacagagtcttgctctgtcacccaggccggaggtgcagtggcatgatctcagctcactgcaacctccacctcccgagctcaagcgattctcatgccttagccacccaaatagctgggactacaggtgtgggccacaatgctcagctaatttttgtatttttagtagagatggccaggctggtcttgaactcttgacctcaagtgatccacctgctttggcctcccaaaatactggggttataggtgtgagccactgcccccaaccaccactaagtttttgaatgtggacaaattgcttatttcttggagctttagtctctctagatgcccttatcctttctatcttgcaaggatactttgaagataaaatgcaatgtttttggttttatcaactctattcagcaaataatgagcactaaatactatgcttagtactggggggccacaagatgtttaaatttttttgtgtgtttcacagatcagaggacaggaaatgcagataaataattgtaataaccgcagtaagtgttctaatacaagtatgtacatttggctctagagtcatagagtaaggggcagtcaggcaatcagtgaaggcttcccagggagatgggaactgagtcctgaagcatagttcgtggtttaatggtagtaaaatgttaaacaaggcagagggtaaaataatgcatcatcatcatcataatactagctgttatttgttgaaaagcttataattctgaccacatctctgcaagatattttcattttataagtaagaaaataggttcaaaaggttgtgatttgatcatagtatttaatgaagtcagtatggtacaaatgaagtcaggaggtgcaaatagttaagtatcactggacagtagcaaacaagcaacagaaaggataaagataaaactgaaaaaggggctcaagtatgctatattctagatattaaaaaataataaaactagtggtttcatgacagacaggggagactattttaacatatgtgagacaaaggattaatacctagtaaaatatgcctaattaaacattggttactatgtggaccaagatgttttcactgtcagttctccgaaacatttaaggaagatataatactaagttcacagaaactcaaataagagaggaggagggagcactttccaactcatttataaagccatatatatatacctccgatactagtatgtgacaaagattttataaaatattagcaaatgaaatctagaaatatgtaaaaaggataatacatgattactaagcagagttcatctcagaaatgcaggattggatttatattttaaaagctgtatgattattgtgataaatgcagaataagcacctgacaaaatttagtaaccattcagagtgaaaaactgttagcaggccgggagtgatggctcatgcctgtaatcctaacactctgggaggccaaggcgggtggatcacctgaggttaggagttcgaggccagcctggccaacatagtaaaactccatctctactaaaattacaaaaattagctgggtgtggtagcatgcacctgtagtcccagctacttgggaggctgaggcaggagaattgcttgaatccaggaagcagaggttgcagtgagccaagatcgcaccactgcactccagcctagttgacaaagcaagactgtctccagaaaaaaaacaaaacaaaacaacaataacaaaactattaacaactatgtcctcaatctgttaaagagtatctgtgaaaaacctactactaaaatcatgcttcatggtgaaatatgaaatactcttcccaaagattgggggaaaagcaagaacacccatgctcttcattcttattaacattgtactagaaatcctagccaatgcagtaaggcaagaaaaagaaataaaatgtttgaaaatcagaaaggaagaagtaaaactgtttctgtttgtagttgacggtgtttgtttatgcagaaaaacccaagaaacctaaaaaataactattagaactaatttatttagcaagacataaggtcagtatacaaaaatcattatatttttatatacttgccataaatgaaattttaaaaatttcattaaaaatagctttaaaaaaccataaaatacttagaaataaatttaacaaaaaatgtgtaagaccagtatcttgaagaccgtaaaacattgctgagagaaattgaagaaaacctgaataaaagaatatctaccatgctcatggaccggatgactcagtgtggttaagatatcagttctcggccgggcgcggtggctcacacttgtaatcccagcactttgggaggctgaggtgggtggatcacttgaggacaggagttcaagaccagcctggctaacatggtgaaaccccatctctactaaaagtacaaaaaaattagccaggcgtggtggcgggcacatatactcccagctagtcaggaggctgaggcaggagaattgcttgaacccaggaggcggaggttgcagtgagccgagatcatgccattgcaatccagcctgggcaacaagagtgaaactccatctcaaaaaaaaaaaagatatcagttctccctgtatgcagttccaatcataataccaagcaggcattttgtagaaaatgcaaagctgattactaaaatttatatggaaacacaaaggacccttatttacaaagaaattgtaaataagaagggcagagtttgcagactaacgtgaattgctttggatacttacaataagactacagtaaacaagacagtatgtgtggtgagttgaataatgtccccccaaattaatgttcacctggactctcaggatgtggctttatctggaaatacagtctttgcagatgtaactagttaagatgaggccacactggattatggtgtaccctaaatcaatgactggtgtccttatgagagaaggaaaggacacagagacaaagacactgagggaaaacgcttatatgatgatggagttagagattggactgatgtatctgcatgccaaggaaccccaaggattgctagaagccaccagaagctaggaagagaccaggaagagccttagagccttcatagggagcgtgatactaccaacaactggtttcagatttctagactccagaactgtgagataatacatttttgttgttttaagctgcctggtttgtggttctttgtcacagcagctcaaggaaatgaatacaatatgatactgacataacaatcaaattgatcagtggaacgaagtagtaaacccagaaacagacccatgtttatacagtcatttggttttcaacaaaagtgccaaagcaatacaacaagggaaaagaagtgtcttttcaacaaatggtgttggcgaaactggatttccatgtgggcttaaaaaaaaaattgccccttcccacatactatacatagaaaataattctaaattctaactgaaaaagcaaaaactataaagcttctagaggaaaacatctttgtagcttgggagtcgacaaagatttcctaggacctacagcttttatagctaatgggaaaccttagctataaaagaaaaaaacttataaatacttgtgacgaaaagacattaggaaaataggcaagctaaagacagggatgccaggcgcattggctcatgcctgttatcccagcactttgcgaggccaaggcagagggatcgctggagtacaagagttcaaggccaacctgggcaacatagggagaccttgtctctacaaaaaaaaaaaaaaaaaattaattagctgggcatggtggcacatgcctgtggtcccagctccttgggaggctgaggtggaaggatctcttggaggccaggtgtggtggctcacacctgtaatctcagcagcttgggaggctgaggtagatgcattgcttgagcccaggagttcaataccagtctggacaacatggcaatggtctctattaaaaatccaaaaattaggccgggcatggtggctcacacttgtaatcccagcactttgggaggccaaggtgggtggatcacgaggtcaggagatcaagaccatcctggctaacactgtgaaaccccgtctttactaaaaatacaaaaaaaaacattagctgggcgtggtggcgggtgcctgtagtcacagctgctcgggagcctgaggcaggagaatggcgtgaacttgggaggcggagcttgcagtgagccaagatcgcgccactgcaccccagcctgggcaacacagggagactccatctcaaaaaaaaggaaaaaaaaaaaagtcaaaaattagccaggcatgttggcacacacctatagtcccagctacttgggaggctgagggtgacagggttgatgcctgggaggtcaagactgcagtgagatgtgattgcatcacgacactccagctttggcgacacagtgagaccctgtctcacataaataaatagaaataaataaattttaaaagacggcgaaatatttgcaaaatgtttatctgacaagggacatgtatccagaatatataaagaactacaattgaaaaataaaaagacagccaacctcgctagaaaatgagcaagagtttgaaaggatttcacaaaggaaggtatacaaattgccaataagcacattaaaaaatgcttgatattatttgtcactggagaaatgccagttataactagaataagatattagcctgcaggcactagaaagactaaaagatcaaatgtaggtagcgatatggagcagttgcaactctcatactttgttgttgggagtttaaaatgtactacaatgttggaaaagggtctggctgttttttagaaaaactgaacatatacttaccctattacccattaatttcatttctttctctacctacctatgagatatgaaaatatatgcacacaaaaagatttgtagaagaatgtttatagcagttttacttataatagccaaaacctggggacagcccaggtatctatcaacaagagaatgaataaacaaattgtggatgtattcataccataaaataatttttgtatttttagtagagatagggtttcaccatcttgcccaggctggtcttgaactcctgacctcaagtgatccacttggcttggcctcctaaagtgctgggatcacaggggtgagccaccgtgcctggcgtgaactctagttgctgatctgcaaactgaagtgatggggtggaatgcttgcaacttacctcaaaacgcattaaaaaatgcattgatatgtggtcagaagaatggactgatgacaacatgacaaaagccaatataaaatgttaatcatagaaaccaaatagtatttgggtattcagtgtacagttattttaacttcaccatatttttgaaatttttaaaaatgttgggaaaaatggttctcaaaggggaatgattacaaaaattattgtacttctctactttggaatactgtgtagcatttgtcattgtataatacagaaagactttttaggctttctcttaaggcaaaaacaagttgtagaaaaatataatattttaaaaattaaggtaacacaaaactgtgtgtttatatgcacacacacctaagttctcagaagaagtttggggaggaaatatgcatctgtttatatctgagaagaggatatcttggcagtgggcttgtgggtaatatttcttttctttttgtttacattaattttcttcagtgaaaatacatgacattttaaaaaacattttgcctttagtgatgtaaaaaatgccttttttgtcatatttggtgagaaaaaatacgaaattgagcaacataatttcaactgataaatgcacctatgtatgaggaaaaagaaacttaggtataaatattggttatgttactattaggaacatagttgatccacccacctcagcctcccaaagtgctgggattgcaggtgtgagccaccacgcccggccaggaaatttttttttaaagaagcatttcagacatatacaaaaataaaatggggtaatgaacctccctgtttccatcacccatcttcagtattacaggctcatgcctgtcatcccagcactttgggaggctgaggtaggtggatcacctgaggttaggagtttgagaccagcctggccaacatggtgcaaccccatctctaaaaatacaaaaattagctaggtgtggtggtgtgtgcctgtagtctcatctactcaggaggctgaggcaggagaatcgcttgaatctgggaggtggaggttgcagtgagctgagatcatgccactgcactccagcctgggtgacagagtgagacgctatctcaaaaaaaaaaaaaaaaaaaaaaaatatatatatatatatatatatatatatatatatggaccataggattatgaggatatttcctctttgctatttaggttttggagtggtgtacttcttattgaaaaattgtctaaaatttcacatcctagacgtttcatatagattttgattttttttattaaagaggattgttagtaacttttcacaattttattagtatctaactaggtttagaccaatagagaaaatggagcagcttgtgctatttcttgtattcattgatttgtgattgatttttttttatttttttattttttatttatttatttttgagacaaagtctcactctgtcgcccaggcggaagtgcagtggcacgatctcggctcactgcaacctctgcctcccgggttcaggcaattctcctgcttccgcctcccgagtaactgggaccacaggcatgtgccaccacgcctggctaattttttgtatttttagtaaagatagggtttcaccatgttagccaggatggtcttgatctcctgacctggtgatttgcctgccttggcctcccaaagtgctgggattacaggcatgagccaccacgcccggcctgattacttttttaaagctgtttgccctaaactgtttgaaaaagatctatggaaatattttcttttattgaaataacactggtcttctcatgttgcaagctacagatttcacttattaattcaaagttcagtagtcaatatttaatactttccatatgtcaggtatagtacttagtcatgtataaatatgtctttcataaatattagagcacatttaacagatgtatgtagttaatcagatattcaaagaaagaagaaataagtaaatatctcttttctatttggatgtttgtagatatttaaatatttataatgttttgatgtttggcagatttagttcctttattttagtagcttgtttctatttgtggagagaagaaaaaaaaatagcctgtccacagtcactatgatgtggttgcagttattactgccctcctaggttagggctgatgtgttgggggtcacagggagaggatagggctttgtgccatgagattcatgaggtcagtgaccacgtctgttaactgtttactcttctgtcatcttctggcacaattcctgacacataatagttcctcaggtatttgtttatcagccaatcgaatgaatgaacagatctataatctaaggaaaggagataggcaaaatagcagtataattttgaaatttattgtatcaatcctgactgaaatatatgtataatatatattacatatatatacagccaatttgtgggactagaataaaaagttgctacacacacacgcgcacacgcacagatcaaaacacttgctgtgtgtaattatctatgcagactatccagtagagggcagggttttacttgtgggagaatttaatacaactttctttttttaccatcatgtaaatgcttacctcccttataatcatcattatcatcataataagtaatacatgtttatttttctttaattgttatggaagatttgaccaatggctcttgcttttcgtgaagttaagaaatgacgtacatcttaaataacttttccctacttgcatcccagtttgcgttgtacaggttataaggtcatggtgatattttagattatgcattccatctcaaacagtagtttagtcacttatgttcttaaatgacatttttaggttccctttttgtgtttccaaagcagcattagacataggtctggagtgttgacagttgtgaagaagtacagtgcaataatgcttcatcagataaataagcaacattgtaaagcttgtcagcagagcgctgcagtagccactcatgtcagttttaaaagacaaagatggatacccaaaggagacgtgtcagcctgttaagacacttaaggtttaatatctttaggtttaacatggttgaataggcacttctctctgtccttcccactaattacagtgaaaaacaggggaccttgtatgtaaaacaaacataagactctgaaaggtagaagaccactgaccagcagggactatgggaccctaggagagtacatggcaccaaagtggtatcagtaaagacctagtggggagcttgaactctcaccccaacccagcactatcaaggtacctctctcactttccactttgggtactaaaggctgactggggaacatgaatttttaccctcaattgctggtaatgaagtagctatcccattcccctgctggcacagtatcacagaaagcctgctctggctgaagatttaaataagatctaaagatttataataccccaaatatccaaatttcaacaaaatgtccctcatgaccagaaaagaatcaggaaaatctcaactgaaatgaaaaatgaacatcaatagacaccaggagaatacagatgtgaattgtctgacaattattttaaagtagccatcacaagaaggctgagcaattataaacatacttgaaacaaatgaaaaaaacagaaagtcccagcaaagaaaaaaaaaaaaactatccagagaaaccaaatggaaattttagaactgaaaaatataataactgaatttttaaaatggaatagacaggtttaatggagaatggagatgatagaggaaagaatcagtgaacttggaagaaattaagagaaattactcagtctgaacagcagtgagaaaatagatgaaaaaacaaaacccagagtttagatataacatttgtgtctttgtgtggacagaaagggaggggaaagagggtgggactgaaaaaatattcaaagaaataatggctgaaaacttccaaaatttgacaaaagtcataaatctacagattcaagaagctgaccaaaacttaagtaggataaacccaaagaaattcataccaagacatactataattacatttcttaaaaccaaaggcaaagaaaaaatcttgaaagcatcaagagagaaatgacacaatgcctatacagaaaacagtttgaatgacaacggatctctcagcagcaaacatggagaccagaaagaagtgacacaaaattttgaggactaaggaaagaattgtcaacccagaattccatatctaattaagatgttcttcagaaaggaagaggaaaccacaatgttctcaggtgaaggaaaacagaacttgacatcagtgaacctaacataaagtaatgtctaaagaaatttcctgaaacagaaaagaaattataaaaaaaaggaatcatggaacatcaggaaagaagaaagaacaacaaagagtaaaaatatagtaaatgtaatagactttttaaaaacttttttgagtgttgtaaattatgtttgacttttttcactgttttcaaatattgtaaaatagtatagttatcaatgtatgtagaggaaatattgaagattataaatggagaagggtaaaggaatttaaaggaaggtaaagtctacacttcactggaactggtgaaatgttgacaccagtaaatgttggtaagttatatgtaatgcagtccttcagcagctactttaaaaaaaaatctattcaaagagatgcagtcagaaacattttagataaacaaaaatggaattttaaactatgttcaagtaacccataaggaggaagggaaaagaaaacagataaaagaaagaaaatgaaataacagatttaagtttcaacatatcaaagactacattaaacataaatgacctaaattcatctattaaaagacagatgtgcagagtgaattttaaaaatgacacactgtgctgtttacaggaagtgatttcagacaacaatatagataggttgagactaaagatagctttatttataatagtacaaaactgaaaacaaccaaagtgcctctcagtaggtgaaattgctaaacaaaccatggaatattatataatattatattcataccatggaattctacttagtaatgaggaggagtgaactattgatacttgcaataacttgaatgccttttaagggcattaagccatgtaaaaaaagtcaatttcaaaagacttgtatgtttccatgtaggtaacatggcaaaatttttcagctgaaaaacaaattagtgggtgttaggaatagcgagaggaaggaagctgagtgtgactataaatgggtagcatgagatctttattgtagtggaatggttctgcatcttgattttggtggcgattacagaaatgtacgtgtgataaaatggcatagaatgatacacattgtactggtattcctggtttttagtatgttatagtaatgtgaaatgtaaccattgagagaaactgggtgagaggtatactgtactataacgtcctgtaaatctataattatttcagaatacatagttttaaaaagcaaaaaggcctgtatagtcctagctgctcaggaggctgaggcaggaagagattttttgagcccaggagttcaaggttacagtgagctatggtcatgccacagcactccagcctgggcaacagagcaagaccctgtttctattaaaaaaaaaaaaaaagataaattataaacaggaagagtttgaatattttaaacaaatgcattaatatattttatacattttcatacatttcagatatagagaagccagtatctttagtgcatacctgtaaaatagtagaatgtcatctatgaatatatgattttttaaaaatttagtttttttatttttaacagagttaaagaggcagattataaagaggcagtcatttgactactctaaagtctttttaaaacaagtcccactttagaagattaggatttagctcttattctcactttctccactaccatgaatgcaaacatcatttctacctccgcattttctcactatagttttcatactcatttcaattacatcagtagttttttttcagttggatagtataaacactattcatatatgggctgtgattgcttttcctctcttaagcaactttttgttttctccagaattaataattgtcttttgtttaattttctgtatgcttatgactaattgaatttccaactctctgaattacaaatatccttctcttcattctgaatgtgtttactcattatcttaattttaaaagagaagtaaacataggttgggttttagagttttggtgtaaagaaaattcttagtgttagaatttactggcaaaatcagggcaaatattctttgttactttttctatttacacacataccctgtccagctgcagataaacaaatggttttacctttatttcagtttagttcctgatttttgtcaagagtctgtttcttcatcgattccaaacattggtcacatagggaagtaggaagagctgtggcatagaggccagaacacttaggttcttgttctgatttggttttaattgacctcaatgtaggatgatcaggtaacctccttggcctcagttttctctgtaatagtgacaagctcagaccagattataactgaggcctcttctagttaaaatgtgatttcaagtagataaagtatttacttcagtcctgactgtatatgtagtatctctaaattaagagtgttgtcatttccagtacttttaaagaaataccctgatgtttagaaagacattagattaaaaggtgttatagagaggggaaattttataaaagacaaaaatggaccatgcatggcatctttgttgtgcttcaaatttttatatgggaattgtggttttcacttcccaagggtgtctggaaaagagaaattctaagaccatcagaaacctcattgtttattacccaacagattagatttgacccatagagtatgctctgaagtcattaatgtggcttttatggagatttcttcaattgtagaccattgaaactagatgggtccttgggggcttctcagaaagtccttggtgtctagcagtttctagttgatacaaccaagggcagaatgtactgttttccatttgcaagtgtttttactttattgtgaatgttgtgtgagggatatttgatatttgggatacttacattttttttcagagggcattaaggtgaattgccttaatgccaaatatacatttggaaatgaatttggaagtttatttgtatacacctgttgatgcatttgtacatgtgtttggtgatgctgatagggtgccactttatggggttccatgaaaagcagatatgtaatttaatttcataacaaacatattcattagttattatatttactggttattgttattcacataacttattttattggttttcaggtacttgaagaagcagaagctcaacatttatatcagtccatcttgcctgatatggtgaaaattgcactctgtctgccaaatatttgcacccaggttagtggatgtagcttcctcagtagcttccctgagactgccaattgaatttcccttaaactcgaatggccagggtcacacagagagagagagagagacagagagacagagagagagagagagagagagagaggaagagaagagaagaaatgggaaacagtttttgccaaagagtatagtaattttgctgtattaaggaaaaggttagagggtagagagtactacaaaaggacattaaaaatgcagcattccattcctcagcttctgtttacactgttgaagcttgtttactttgacttttttctctctttgtttaaataacctctaacttaaaaaagtattcattatttcaaaacatactagtggatttggaatagcgtattttcaaaatggcttaatacgacccactccttcctcaccctcccccaaattctacaacaaatgagttaatgatactttcttaactttttttgagacagagtcttgctctgtcacccaggctggagtgcagtggcataatcttggctcactgcatcctccacctcctggattcaagcaattctcctgcctcagccacccaagtagctgggattataggcatgtaccaccatacccggctaagtttctttttttggagtgcgatggcacaaatcccagctccctgcaacctctgcctcctgggttcaagcaattcttgtgcctcaacttcccaagtagctgggattacaggcgtgcgccaccacacctggctactttttgtacttttagtagagacgagtattcagcatgtttgccaggctcgtctcaaactcctgacctcagatgatgccttggcctcccaaagtgctgggattacaggtgtgagccactgtgccagccttaacttttaaaaataaagaatcctgtattttattttgtttggagtacgttaattatatattgctacataacaaattatgtcaaaattaatggcttaaaacaataaacatgtattatctcacagcttctgttgactttgggagcagattagctgactgagtggttgtggatcaggatttctctcgtggttgcggtgaggatgtcagccagggtttcagtcatctgaaggcttgcctggggctgaaggacacacctctaagttggcttacttacagagctgttggcagaacgccctgacatgggcctctctataggctgattgattgtccttatgacataatagctaacttccccagagcaagcaatccaagggagagagcaaggaagctgcagtgtcttctatgacctatttttctcaaggtacctagcatcacttctgctgtttttctgttcattggaagctagccagtacccagggggaggggtattagaccacctgtttttttttttttttttctttttgagactgaatttcatccttgtcccccaggctggaatgcagtggcatgatcttggctcactgcaacctctgcctcctgggttcaagtgattttcctgcctcagcttcctgagtagccgggactacaggcgtgtgccactacactcggctaatttttttgtatttttagcagagacggagtttcaccattttggccaggctggtctcgaactcctgacctcatgtgatccgcccgcctttgcctcccatggtgctgaaattacaggcatgagccaccgtgcccaagactccacctcttaaagagaggagcatcaaagaatttgtgaacgtattttcaaacctccacagggtttgttttgttcataattttattcctgtgtttctcacaaccgtgcttgaatttgcctttgtcttttatttctagggccaacgcctcttgctgcatggctgctagccagggttctgctagcattttactccacaggggccctatggacatttgggtggaacaatttctgaatgtgtataatggtcccatgcattgcagtatgtcattaggacaccccaaaaaccacaaatagggtcactggggcaaccagaaaacaacgcatacatgtccaaatgccttcttggactatgccaccttcagttgagacccatgaaatgttttccagtgtgatgttttcaattttatgtaactttaattttacctcagtaatgcattgtgcctgaaataagttttactattgggcaggggaaatatattttaaaacatatcttcttgtttctgttggaagttatttgcttgatcatattccatgtttgttctttttcctttctctccttacttagtaaattctctccctacctcctaggtatgcctgtctgttacttcccctgtgaagccttccctgcctcccaggcaaggttcatccctcttgaagcactcaaatcattgttttgtaattcttgtcattatatatctcttgccactggattatagtctccttaaagggagatcctctttgtgtccctggtttgcatggtgcttaattatatgctttttgaattcaatatgtagttcataatcaataataggtagtaggtagcctttgggtgtgggccatttaatcctcttcccctcgtgcatatgagagtttccatattttatttaatgagaaatttttgttcaaaggtatctaactttgtaagctataacaagtcccttggaaccaaaatcagacccctgagtcctcagctttttgtcctggcttctcccagtgactttcttctccattagcatatcaacggggagagcatggaaattctgtgctttgccccctattgaaaagtcaatctctgctgtgaaagttaagatttttatttgagatcaaaatacgtcttgtggcaagttaaattgtatatgttggtgtttaataatttatcacattgaagtactctaggccaaatctaaagggtaaattttagatttatcaaaataaaattaaaggaaacaaatttggtcaggaactttttgaaatatcttggttcacagtaaccagcctcttattttgttgagccgattgcttgacagtaagatttacatctcctgatttctccaaataatgagtttttaggcatttctcctcaccaagagaggagaaatcattaactctatttaaaattatactatttgtttatttgggagacaggaaatgtttgtgtttgaagtccattaatcctgaaatctttactattaatttttaaaatcatttttctgaataacttggtaaatggtagttaaaaactcatttcttcctaaaaccaagcagcactttgcttgaagccattgatgcactgtcaccttttctaaactcgttgcttggttgtgaacaaatgcacgggatggaaaatggagatcaatatgagctctctatttttctcagaaatggtgattgctaagacctgaaggggagagaattttgtataacatagtgaaaatattctttaccttttgcttatttgtttacctttgaatttttccaagagaaatagttgaattgcaagtttaatctgttcttttttctggcaaactcttattctagcagtggtgtgtacttctgtacttagaaaagcattcattattcagcaccgcagttttggtttgtcttgcctgccctttcctcaggttcattctgggtgtccactcctgaggtatgatcaggacagtttgctctaggcatgccattttgagatgagtgcagttacctgaaactcttagttctgggtcttactgaaggggagaatgaaatgcatctctaaatattctgtgggagcattttgaaacttaacagctgaaggataaactggtagttggtctttgattttatcagcatgtctttaaaaacatagtttaatatttaaaatatgttgacaaaaagagtcaaactctgtaaaatatttgaagagatttattttgagccaaatgggagtaaccagtggcctgtaacacagccccaggagatctgagaacatgtgcccaagatggtcaggcttggctttatacattttagggagacataagacatcaatcaatacatgtaaagggggcttacaggtcttaggtagattcaaagattttctgattggcaattggttggaacagttattatccaaagacctggaatcaacagaaaggaatatctgggttaagataagggtttgtggagaccaaggttttatgatgtggatgaaaccttgtagcttcagagcttttatcagatctaaaaaggtaccacgccctttcttaattctcacctggaaaggaatagggattctttacagaatgtacattttcccaacagacagctttgcagggctatttcaaaatatgtcaaagaaatatattttggggtaaaatacttcaattctttcaaggtctgctatctgtcatgtgatgctatactcgagtcaggctggaattgagtcttattattataaaaagatttgtttcatcagttttaaggtctctgttttcttgttaatgctggtcacttgtgctgaattctaaagtgaggagcatataatgaggcgtgtcagacccacacttcctatcatggtgtggactagtgtttcaggttaactttggaatccccttggtcgagaggaggggttcattcagttggttgggggtcttggaactttatttttggtttacaaacagaataaaacccactgaacacaatactcaggtcgtgtggattatactgacaataaaaggtaagtgaatttggtggcataactagaagacattttagacataaaagatttgaaggaaaaatgtcttacatcttccttgacttggaatgtttggttatgtaagaaatgtcttatctttttacaacttatgcatgtccgtatggtggtttttacatgttctattaatagctttaatgaagttagatttgattcttataaagaaattgtgagtatgaagtgtaatttggaataagagggtcaagacttatttgttgaattatcttagatcattttattgaggactaagaaagattattctggccaataatttttaatataaataagaacaaaatttagcttaaacaatgttatatatttttgtttcatcttttgttttaatttttcattacatgggcaatgtgtttttatttacttgctgaagcaatcttgtttttcactaataagtaatgttttatattctcttcactatcattattattgattagaaatctgcagtttgtcaaataagtgcattttctgaatcatccctgataaacagcccttgacttttacaatattgctgatttaaggattcaagaatggcctgaaattatttctgccttaatttagcaaatgcaatttggtgcctctgcttttgaaattgctaaactaattattgctcttctcgtctgtatttttttgtttcttttatcagccaataccactcctgaaacagaagatgaatcattccatcacaatgtcgcaggaacagattgccagtcttttagctaatgctttcttctgcacatttccacgacgaaatgctaagatgaaatcggagtattctagttacccagacattaacttcaatcggtatgttttcagaaaacacctctttaacaatgaaaaagacaaaggtggaaggaactaataatattttttgaatgaattccataggccaagcattttatatgcagttgtcttatttaatttttacagtacttaagtgacattttcaccattttgcaggcaaggtgattaaagttcattgaggttaaaagaacttgattaggatccaggagctagtaagtcacagaactgagattttatttcaggcctgtcttactccagggcccatgttctttctgtcctctcagatgattccccagttctctggactccacatgcctcttcagtttgattattcacgagaacttttgttgtgcttatattccttaatgctgaaatactgtgaaaggtagaggaaaagtcctcctttctacaaaggtcttataaaatgagagtctaaagtcatgagctgtcttatgagacttgaaaaatgtaattgttttgatgaaaagtgaaaggtgattttgaccctttatagacatggttaatttatcagtgtaatatttttaaaagaaaaacaaaagaatgttcaaactgctcgactaaattaatacagtgtgaaggtattgataaagttctagattccagccattttcccaggtgactgctttctctatcttctacacaaacaaaaatattttaaagaatcttcttggcaaactaatgttttttcttccctcctactcactactcccatatccccacctctgtttctttcttcacttgagaattatctttataggacccatgaatagaatatatgagttttcttccctgatttcagtgtgagacttgagaaaattgctataatctgtgcccctttcccagcaggctgtgtgtaatgcccttcactgcctctggtcacccagagcctgcctctgagggtggggcagtatgcagagtaggagataaagtcatagagcggatacacaaacaaaacccacttttgtttgccatactgcttttgtctccaaagtagaatgatcagtaacaccacttttttttttttttttaattttaagacggagcttcactctgttgcccaggctggagtgcagtggtgcaatcttggccaactgaaacctccacctcccgggttcaagcgattctcctttctcagcctcctgagtagctgggcttacaggtgcatgccaccacgcctggctaatttttgtatttttagtagagacggggtttcaccatgttggccaggctggtgtcgaactcctgaccccaggtgatctgcctgcttctatctcccaaagtgctgggattacaggtgtgagccactgcacccagtctgattctaccagtttttctagtatcctttttctgttccaggatcctacccagcatcccagttacatttaattacctagtctcctccaacatgttccttgttttttcttttctttcgtgatcttgacagttttgaagagtactcatcacagttattttggagaatattctcagtctgggtttggctgatgttttttcaggattggaatgaggtcatgcatttttgggagaataccacagaaatgatcctgtgtccttctcagtgcaccgtatcagggggatcatgatacttcttattactggtgatcagttggcgaaggtagtgtctgctgactttttccactgtaaagttaccatatttccttttgtgattaataaatattttccaaaagataaaacactatgcaaatgttgttttgcctcacatttatccctactaattttggcatccattggtgcatcttgtctgcaatgattattaccatagtgtttgcctgttgtgaattttctgcttccctcttctacatttgctaattgaaattccattgtaaggaagagctatcccttttcccccgtttttaaaatatcagaatggactcatggatatttattttgttgtgtcagtttaaattaaacagtattatttattttactgctttaattattctagctttggccattagggctcctttaggttgactcctatgttcttttgataagccctatcctttttttgagcattaactttcattctggaatcatacattgttccagattcatcttacattttccatgcctcaatcctggaatgaaccattttctcaaggattcctggtctcttttattgtacaacggtatttagagaccaacatctaggtgataggtgtgctcattgctgctagagtgtcattgtttctaatgcaacttactttatgtgggcagcatttcttataactccacatggcagcagagaaatgaattcacaattctctccaatatcagagtgtcagccccgaagaccatattttttagccttttaaaattggagaatgttttactctcttaagatgagaagaattctagaattcagctggttagttcctaatgtaaattttaattaaacttaaaaactagacatttcagtgcatttattgtgtgtttagcagatgaaagtatagcagatgacttgaatataagctgctcttagactgtcataattcttgggttatatttttatgaccttcaaacattaaaatattgatgataatttgttattatatatggttaccctctactatcaacactaagaaaggggcagcaaagaatgaaaaataatgttatctaagaaaatttctttaaaatcctagtgttagcaaacaggatagttttttttttttatatataatatgctccttggttacataaatattagttgcaaggggcatatttttaatctatttttcaagtttgtacagtaggtaagtttgtttttagatactggtatttagtcaatgtttagttcaaatgtacaatgagcaactgcaatattccccacagtgtattaagtgccataaggttacagagaaaggagaagccagtttctgagttcttactgttatgtagtattgtctcattttcaaacctcacgtcacagatgcccttctcttttccacatggcttttattcctcctccagtactcagttcacgtatcagtttttctggtgtctcagattctgctaggataggtttgctactctaggttcctatgctagcctgtgtgtacctctggagaggtgcacagcaccatgacgttttattaaagaaagatataatttaataaaggaaactttcctcaaggaaataacttttcttgctgttgttgttttgagactgggtctcattatgttgcccaggctggtctcaaattcctgggctcaagagatcctcccacctcagtctctaaagtaactaggactacaggtacatgtcaccatgcccagcgcaacttttgaattaagtacaaaagggtgaataagagttttgccaaggagaaggagaggtggttgtattctaggcaggggaaaagtatgtgtaaagtcactgttgcaagaaggacctgacatgtccagagactgagagaagacagtgtggttgcagcacagagagtgagaaggagcatggagatggtagaggctacagaagtagctggaggctggaccatgctgtgcctcactaggccatctgaaaacaacaggaagtcattggaggattagatatgtgggtagagggagactagcacatgtgttcagatttacattttcaaaagtttattttggctgtaatgtgggaatcaagcagagaggggccagagtacatgagtttacccaattggagaggctactgcaatgcaccgggaaagaggatgttagctgggatagtgtaggggaggggacagaggtgtggagacatttgaaggggtagccagagtgatggtgatggacaggattggtagatgggcagagagaggcatccaaggtactccttaggtttgtacagccagatgtgtgcctttactgtcccctacttttcctactgtactacctagactacttcataattgcttatttaatcatttcagtgggacagggatcttaactgtctttgttattttcacaaagtctcatgcattgtaggccttcaataaatgcttcttgaatgaatgaaaagaaattttacagatgaaatatttgagaattaagtgacttgttttgagtaatggagctggttagtggcagagtgctaagactataatttagaccctttgttctcagtctcttgtcttttacttttcatattatgtcttagtcttaggaattacgagatgttttatttttaagccacatataatcaaacatagcttttacttctgatttcgttagtaattggggtagaattgagagaaaacacagagcattggaatctgcaattgcagttatataaaaaacctgtttcacaggcgtgagccactgcgcccagcccatatattacttttacgtgcagaagaaaaaatagttcagggaagaacaagtcagttgtcagaaatcaagctgaacacaaagttaataagagtggacaatttttgtaatttgattttgagggtggaatttcacagattttttgaggcttttccaaaaaagctagtgtggatagcttctttccaattactcctccatagacacattgtcattgtgtctacttcaccctattttacttattcagcatatagcattttatttcttatggaagaaatagaatccacagagttctgtagggagcaaagacccatcgctgctggatggctgacaggcagaggtcaagatgtcttgggaaggcttggctttggtgacttccaatttcctgtaaccaattaccagaatttacattcatatatatatcttttttgtttttgtttttgttttttttgggacagagtctcgctctgtcgaccaggctggagtgcagtggcgccatctcggctcactgcaagctccacctcccgggttcacaccaatctcctgcctcagcctccctagtagctgggactacaggcacccaccaccacgcccggctaattttttgtgtttttattagagacaggatttcactgtgttagccaggatggcctcagtctcctgaactcgtgatccaccagccttggcctcccaaagtgctgggattacaggcatcagccaccgcacccggccaattttattatatattttaattttaaaagacctttgtttttcagccaaccttctgagtggggaagtctggggcttcttggcgatggcaggtttatctttttcattgtacatggtcatttatcctgaagactgagctggttagcgctgaaagtcagcatgttgggcttgatgggaatcaaggctgggccatttttttaaatgaagggaatattaattagaaccatgcaactgctttatgtaaatgaatgttgattttttttgcctgggcattatgtaatgccttattttagcgcaagtaccttagcttactcagcattatctgaaattcatttacttgtcacattaaccatatgaattagaatattgattaggaattgttgttacactcatttttaaaatgaggtggaagtttagagaggggaggttacttcaccaagttaacacagtaactagtagacttgagattcaaacgcaggatgtagtctcctttgagaagctgtgtcccttaaccattctgctacacagtctccctttgaatgaactgaattaataattcttacctcatgactagtcaaaaattagaactatttttagaaataattattgatctattaaatgaattaaagccatttgtaagtccagagtgaccgtgacggatttaagcttgcagcaaatagcattctcaccaaataagagtttaagtagttccgttgaagatttgaaatcaggcgtattcttgtcttcctaggtgatggatgttcttttggatagcagaacatgaaaaatgaattaaggcaggtaacctagtgttagtctccacaatgttgtagagaatcctaagcagccaggatgtctgcacttgcctttcactgtgagatggtgtgtgttttaatgagcctaagctagcaaataataggaacaacaactgtacatcaccattgatactgtcttttgatggcttgctttgattctgtctatggaattttctaggtagggaagcctctctactgataaggttcagggagaataaatgaattgttagcacaactggaacttgatcactgtcttctactcaaactcagttttcttttattgtatctcaaagcctgtcatgagcaaaatgctctgagtgctccggaaatgccaaacaactgaaagtccccccacttttatgtggcttctgaaagatccagtacgtaatctgatgagccatttgttaagctgattatgtagcattttattgtgttatttccttttatgcatagtttctacttatgattatagtttctagcagtggggagttgtgtgtgtgagagtgtatttaatctcaaaagagaggtatggctagctagttgaataagaaaaatggtaagagtatgtggtgggaggctgaagtcaataaattgaatatgtcttcccttttttatttattgctgtgttctttaagccctgcttagttatggtaaatacccctgacctttttccctgcttgcctttcaggtcctaaacattcatataaaggcttccaatgtgattagcatcgatgcttctgagtttgcatggaaactagatggtcagagataaattgtgggtctcagcagtggtcagcccaggaggtttttacatctgcctcttccctgtattgaaaatgctgctggggccatatggcagagtgcctcacagaagagccaggaatgactttctggctgggttccggactatcacttgctcgtattttaaaatggaggttgtagtgctttgggtttgatttactgtatactaatgggattattacttaacttgaaatggcatagtgggtcatggtgggggtggggatggatatacctagaataaaattccagtaatgttatcagtattccattcagggaaagattttattcaactctgtttctccttataagtatgcaaagaaaaacaccagctaataagtgtctgacctttgactgatgtctgtctttgaaaataccaacagttttgtttagaacaaagtaagatttcctgactggctttttgtgtttgatttctttaataatctgtaattatctttcaattaaatgcccaaatgtcctccctacatgtagaggagttattgtggcctggtttgtgtgcacactgctgacttaaaatatgccttcaaatatacatacccaggacttgaaaaatctaaattaaaaaagaaaggtgttgggaagtttacaaaaaaagtgggggcgggggaatgatgcttaatgattatgagaaggcctcactttctctgagcctgtttgtgtatgtctttctctctgtgtgtctgtctctcatgctctctttctctaaccccatttctatcagcctttctcttctctctatcttccctgccccatctttcttctcccccttcacccgtttcttgggctccagcctcagtccttttgttttcctcctcattcccaaaagctgtccctcagattgtatatcactcctgggatgactttcattcatgctgtttgcctgtctatttatgttatttttacttgcttccatatcaggataattcattttatttgagtggctgtgcatacaactttaaaatttcacaacagccaagtctgagaattgtcacaaggattttaaacctgcttcatctcctctgactttatctccacttcttacccccgacacccaccacgacacttcccccacttccccctgctctatcaggaagatgggaaagtgtatttggttacacagtgatttgaagttaggattggagcagtgaataaacagagtacattgagattctgcttgatttgtacctttaagatttgtacctacaaaataaacagtggtgttcatttgtagtgggtgataataacagccataaaatcttccaggaaagtctgtctcgccaggataataaatctgcagtctcacgaggctcctaaagttaataatttgtcatcatggttgtgaagtatgtgaccttttatgtgattttatacagatgaccgcatatggaagctagggacacttttcctatgttttagagaattatttcttaagagcaacagccattttctcctcactatgcaatagttctattgaagaagaacttttatcctttaattgaattgtatagtacatcaattcatctctaggaaaaggtggtggctacttttgtattcatattgctttcctctagtgcatagtgagcctagaaagagattttgcagtggagccttaggtattcatttagtaaatcatatttattgatataggatgtttaattaaactgccatgtggcttcttcattttgacttaaataaactctgttctagaagaagccatgctgaaacctgcaccctcaaagagcctttctttcagctggcaactggattataagagtatgtgtattaaatattttagaaagataggttctttaaataaaaattatcacacaggctgtcttaaactatttttaaaaagagatctgattttagatttggttaaaatactagcatacattagtattctttttaggaaataaatattcatataaattgtttttccagaaattgaccctgaatacagatttcagatcattgaaaacggaaccatttgaaatgtgcatttcctttccttttcctaatttatttcagtcgctcaataggattttctcatggaattaacttttccctctcagcgtagttacataagcttgctgttgtaatcatgaaaaataattacccatttcagcacttattaacatggactttacttgaagggtctctggttttaaagtcagagcacatgactagaggcagatgaagagtacctcatcattcatagccactgagtctctataatttttaaatgcctttggaaagctagatcttatgctcaaaagcatgcttttgtgttagaaatcttttagtgagctacttactcaggtcataatgcttttaaagccctgcttttctttcctcagaataaactgaattgtatgttaccaataacaatgccacatcatttcaaagaaaacggaattaagtaatccaagtccgggttgctgaaaactagatgacacagggtaggcactgttgtggttaccatgcaaaggatctctattagtcagcttgggctgccataataaaataccatagaactgggtggcttaaacaacagaaatttattttctcatggttctggaggctagaagctgcagatcagggtgctgctgctttggttcctgatgagggctttcttcctggcttataggttggctggcatcttgtcctcacatggcagagggagagtactgtagtctcaccttgctttttaaaatgacaccagttctatcagattagagtcccacccctatgacctcatttaactgttactacctgctcacaggccctatctccaaatttagctatattagggattaaggattcaacatataaattttgagaggtcacaaacattcagtccataaaagaatctagttgtttaattaacaaggattgttgagccctgatatcttgttatacctgcctgtgtccctgcccccattcccctccactctcatttcctcacaaacactcagataaggattttttttgataccgtttttgttacttatcaaactacgtagtaacattatgaattataaatgtttttagccattgagaaagtagctgtgcactgactgactgaccccagttgactgggagggctggatggtgccttctctgtggtggaagataggttggagaaatgtggttggtagtaaatgatgtctgatttgagcagctttgaagaagtctggttctagttggtttcagttctttccagatgccatttgaatctaaaccaattttccagttcttatcattacagaattgtcttctggaagaattatttctttgtattacttggtagcaatatggatgtagttttgtgaatcattaaggcattttaacttatcttccattctcttttattttttatctcttagattgtttgagggacgttcatcaaggaaaccggagaaacttaaaacgctcttctgctactttagaagagtcacagagaaaagtaaattcctttcattcttactgtaatttttcttgctgatgggaacagttcaagtcaagtgacatgtgaggaacattttgtgtttaacgtaaaccttcctgtcccaaccacattgaaacactagtaatgatgcgacaatataacctagttttatgcttatgttgtgtataagcataaacgtgtgctaaatgtaggggggcggggtttacatactctgaaatcggacccatattctctgaaatctgtaatatacatcaaaagattttcatgaataaaaaccagagaaagtatattgaccaggaaataaattttggatgctctttatttaaagaagtattcactagtttatttgcataagtcaactaacgcattgcttttctacccattcctctcttttgtgcccccctaagccctttgtggagttcttataaaactgttttgtactgagttttatatctccatcttcctctattgaaccttaacattcttgcttccccaaaaactgatagcagctaagacagtaatagtaaatgtccaacaaatactggtaatgaccagctgataatagattggtattgccactcttatctcagaagctgaatgaccatggtcaagtttcttgacacctctaagcttcagttttatcacctatgaaataatataataacggccattaccttacagggtagttatagatattaaacaagaagatacatgcttaataaatgtaagctattatcaatgggtagcctttcctacaagtggatgtaaaccagaacacctcaaaagtttctttgtgctaagtaggtaaggtcaacctggtcaagtgaaatggctttttttcagttctgggtcataggattgtcttaaaatatgtctttgaatcattttaaggtcatttttctcatatccttcttttactcttgcattacagtgtacttggcatcttcccccttgaatgtattgctattggacattgttaaatttttagaatgaaatcaattatcaggattttgatatttaagggaaaattacatgcttctctgatatggaattatctcatagcttatcgaatttcagttttgtgccctgtactgaatgaaatattacaatgcagaatcatttggacctatgagacacaaaatcaaattagaatttgtaatgacttgttaaaaagatgactacgtaaggccaggcacggtggctcacgcctgtaatcccagcactttgggaggccaaggtgggtggatcacgaggtcaggagttccagaccagcgtggccaagatggtgaaaccccatttctactaaaaaatacaaaaattagccaggcgcggtggcgggagagtgtaatgccagctactcgggaggttgaggcacaagaatcacttgaacccaggaggtggaggttgcagtgagctgagattgtgccactgcactctagcctgggcgacagagcaagactctgtctaaaaaaataaataaatgactgctttttttggctattctaggtctaattagaattattactattggttttttttgttttgtttttacagtactttgagttgccattttaagtagaattattataacgaagtagtacagagtttacttttttgtcctgggagtcaaatcatgtatgtcttctctaaaaactaacttggctttctaaattttaggatttcagatactttgaggaaaaagcttaaagtttgttttttcagctggaaatgtatatgccattataagtattgggaatttgaagaaataaattataactagacattttattttctgactttttcactgtacatgttaattaagttctttgtagaaatacagtacaacattgctcttggtcttcagtgtgtaaagctaatggtttgaagaggaaatactaaagagaataaaagaggttgcagtataatgagtggttgtgtagaagttctggagcctactcaatagacttcagaagcttatttaaggtaccgtatttcatcgaatctgagatgtcatagatgactttttaaaaatgctcttatattatatacctctaagaaggaaaaaacactcaggacagggagtttagtaggagacatgacccacaaggctggtacacctaaggataaatgagaaattaacttgaccttccaggaaagggaccataaagaaacgtgcaagtctcaaccttgacactaaatagagaaaggaaaaaaacatttctctgagaatttgaaccacaagccctaagctttgagtgtgcagccttaccaccagtgtggtccacaaaggcctgccacaaaggattaattcagatggtatcaggctgatagtgttcccagacgacagcagaagcagatgcacatcttctctgggaaaattcacctctagtctagacctatggtaagatacctccattataaaagatgtgttccagtttcggaaatgtaacgtgaaaaaacatgccttttagaattgataaactagaattccatcaggaccaacttttcagtgttgttaaacatgtgtattttatatctgatgaagatcttgagactgaagtattttaaaaagccttctgaattaaattactttctatatagttttagataaagtgtcttatagatgaggtttttgaaaatttatgacctgtatatagtatatattgtgattttatgatgggaagtatttgattaatcaaagtatcctattctgagatgaaagttgccttgttacgaaaaaatgctaacagacgtgctctcaaggcatttttgttaatctaagaaaccatgttcttctgccttttcttgctttgccagcagtgtttatgaatttcttttagcatctcttagtatatattaaggacatttgatgttcttctctgctaagttaccgaatgacaagagagatgttttctattatattcatggaattgcttcactagtgtttgagttgtttgaccacttacttgtgagttttaaatatgttatccatttatcttaaagttaggtatctaaaagacgtaagacccatcttaacaaaaaaatttgttttctactgcaactgctccatatggtttttgagtgtttcctgcttttgactgagaacaaggaaatgtggaattgtgcacaggaatgaaatgatggccaggctttcactgggttatacactgtcatcactaatagttcctgacatctctctctttccttaagagcttttttgtattcaagaaaacagaaatggcatggcctttttagtttgttctttgatttgaatcagacaaattacttctggccagctgatttattagtttcttttgctactagctttaaaaaataaataaataaatctgactagaaaaggatctcatcctctaaaattattgactacattaatagtacttcatttagatcctcccagatttattgctccttgaaaaatatgtcatctttgttctgtaaactcttagaaccagtaatttctcctctggctacgactgctactaacaagtagagtgattgcccactatttaagcctgagacttagctgtactaactccagaggatgtgcaaatgatttcctttttaaatctgtggcatttcactttaccatatagtacataaatgtgtatttattctccagtctttgaatgtagggttaagtcctttctttgtaaaggagtctacaaatttgaattcaattttgtctttattgcattagctgtaccagttatacatcctttttttcaatgcttttttttttaaaaaaaagtgtattcagcttcaaaaactttaccaaaaataccagcactcaaatcctactgttgtgctgttatttgtatagtttcgtttagtgaagtcttattattttatagaaggagtttctactgtaaggatattattttcaatcaatattctgttattttccaatgctaggctttgtatttcctggttagttttatagccaatgttagacctattcttttaccgagtgtgtgtgtgtgtgtgtgtgtgtgtgtgtgtgtgtgtgtgtgtataatcttttcaaaattgaaacttattttgggtatgtttttcttttattgcttctgtagaacctactgggttggtgacatttacaagacagagtcttgaagattttccagaatgggaaaggtaacaacaataataaaaataatcctagaccccctagaaatagaaggactcttgcaccatgagaggattctattttatagcacctagaaagatggttttccaacctctatttatcctagtgccagggaatttcttctcataaatgatccattgatagctctcatgtttgaaaaggttatgccttttaaatcaaagtctataaccctttgatttctaccattttgtcttggttttgtcttctgaaacaaagtcctgtttaaaattgagaagtgttgtatgtgaagacactaatacaaggaacaccaatatttaaatgtttctccttaccctttttttttttttggttagtgtttgaactttatggcttttctttctggaggacaagattgagaaaagtctttttattatttacattttagtaaacagtaaccatctagagttcgtcgagtggcaagaattttgaagtttggctgcccttgtgtactactggtagattttgtggaagttgctatttactgtttgtttcttatttatcagaaaatattgaggagatagcagccaatatgagctaattcagatttgtaaagtccttagtgtcctgaaatagttaacatatttcttaatctaaagcaagtctcccaatatacttaaagaagggtcctgaaatagttaacatatttcttaatctaaagcaagtcccccaggacacttaaagaagtgtagattaactttttaaatatgtttgaggacatgatgaagcatactaaatacatatttaaccaatgcctcccattttcactttctaataattttatgatagtttgtaattgttttgtttggaattagtgatgaatggaaatcacttaaaaaaacgttaacttgagaagtcatatctgcttaggtggctttcctgcggtgttttcatccatcaaagatgtttatttgtgaagtgaaagataaagaaatttacttcagaagactgagtgcgtggtttagatgattattaatagagggaagtagataaaaggttaagcgacctgaagagagaaaaaaaaatgagccagaaaaagatgagaacacgtacagcattttggcatcatggcatgttagatctgaaaggaaccccggccgcctgctaaaactcttgatcagctctgtaatacctgcaacagacagaagactggatagcttcagtgatggcagatccgctgtttcgtatcagtttgttccattggtggctgcttgtgttatcatctcatgctttcattcactaaaaatgttttctacattcattctccaccattcctggttcttccttctggagctacataaataaatctgaatttctagttttctttaacatttgaccctccttcatgtatcttaatggcttcttaacctacttccctctctaacagtgcatacaagttcatactaaactgattcgtttcttctatttcacatgtaatatggattctaaaccctttatctctgctcttaacatactcccattcattgggccctcttaaaatatagtgcctggaattaaaagtaccattctgctgtgtcatctctatggtgcagaggattgtttttcttcactcttctattaatctctaataggaatgcatatgttttgttcctgttactttggtgtagattttatagatcaatctgagggcttatttttaagtcatccaggatctctactttgcatctgatattcatttggcactaatgtgaaagaacacccatttgtataccaccatgtgggagagaagggacaggtcaaaatgcagagactggcaaggctgctgtgtcaatgagacacagtaactttgcctctaagtgagacgaagattgtccccttaattttgataggcagaatttgacttatttttatttcattgatctcttttttgttttagttgctttataagtgagttggagaatataattaaaaccagtctcccagactccacagaaccagaaacatgcattcacttaaagagggagaatgaagaaaagataaggattgttggtgttcccaagcgtaaggggctaaatgggtccaggaacttagaggctttcctgaattccatgtttgtggcatgttatagttaaccctttgattatcagcaaatactttagccaggcttaatcacagagagccagaatcatctacgtctctgactcctggggcgggggtgtagaggatgacctactgggaagttagaaaatgcttcaaaacaaaaccaagaaaaggtttctagcaatttcgtgattttattaagagctatactataaagtttctagcttcagtcatggagaatagttgacaacagatggaattcccattctgaagtcctgactgacagcccagagatttttagattatgcttctttatctttttagtagtatgcttacaggggtcttcctctgaataaaatggctaggaaagtaggaccaaaaaaaggaagttaaaaaaatatatcaaacttacgatactgttttctacaagagactgggaaagtaatttttctaaaagtgtagcatactgattcagagcttgagtgagtctacctagtttcacatctctgctgctttatttcactagtcttggttagcttacttagatgttctgtgctttgtttccccgtctataaaaggagatagtaatagggttgttgagaggattcaatgagttaatacaaataaggctcttagacagaacctgtgcagaattaccttctgagttaaagctatcagcctgttgggctggagttttgccagaaatgtatttaaactcattgaaaccaggaaggaatcaaacaattctcagtatttttccagctaacctcctagactattttctaaaaatataatcatctcctccctcccaaaaaagattatgggcactcttatgtgagttagaactttggatctcctctgtttcattcatttatattttttattcagtaagtgatcaggggaaaaatatctaataaggcaaataatgttaacaaatacttttgatacaatggaatttgttgttaatataacataagtcaatacctcagtggccatggttgaaagggaaagaaaataattatgccttctaaattacaggtactaagtttatctgttaaccttattaatagaaaaataccattgttcagaatttctgtcgcaggtattttcatcaagacacacacacacacacacacacacacggttatgaaacagtgaaaatagaaaatggaagccagaagagaatcatatatgatttattgccaaattttttctacatttttcctcagattgccaactctagccataacaaaatttcatagatcttaatttttttaatattttgtaatgtttttcaactgttttaaagaagaaaaactttcatattatttagaggaaaatcaggtttcaaactatgttatccaattttaatttaaatatgtatatttacatgtttgaataaaggaggatcaataccaagaatgttaacagtaggcatctgtttctgactttcgagatttggggtggtttcggtttttgaatagttacctatattttcacttttgtccgcagtgaacaacttgtcattaaaataataaataagggaatgtctttttatattgtagatgtgaaaaacccttgacacgattgcatgtcacttacgaaggtaccatagaagaaaatggccaaggcatgctacaggtaggtgaatcttagtagtgtctgtgtatggttaggactttttcttgtcaagcttctgacagcaaaagaaatttgaaaaactgtttatttgtctcctaaactgatttaatgcaaagaagcatgatagcagaatgaagaaaaacaccaaacagatcactttgacagccttggtaatgttgtgatttgccagtgtatactctctgtttcttatatgtgcttctctaaaaagcctttgacagaaaatcccaagatctggacagcatcagcctcttggttcagacattgatagtaggttgacagtggaggaagttcccagggtatagtcttgacagactgtcaccaggcatttttattctttttccttaaaggctcttcttgctctgccccagttgatgaccagatggagatgtttttctgccaccaacagctttgtttaggttgagggggcagacatctaaaactgattgataagaaaggcctctctctcatatgtaacagtttcacgcacgtgagctagctgtttgctatgtcttttccctgttaaaagcaggtaattctggtccacttctcaatctttgttaataatctgttaccgcctttacctttaaaaagtatttttggagaagggggttaacaaaagccccgtgtttaaaatatagtaatatctaacctaatcttttgatttataatgcttctttaacattcactaatgttagtgttttgtgttcttatcccatttataagagcattgtaaactgagttttctttgaaagaagcttgtataccatctcatttatactgataatagtttatttttcttcttagattcttatttggtgcttatattggttcagaatctaaagaaagcagttgcctgaaaatggactgatttgtttgaataacttaatgctcactataagatttacgtctagttattatttaaatgaaactgagattcttttttaaatggccttttatttggacatatttgtaattaaaatcttcaaagagacaaactatgttttattctaaatcaccttctcccagtggttatttgagcttataaacaaaaacaaaacatatttaaatttgcatttactcctataccttttttctgtttaaaaaataatcttaaaatatgcttaaatattggttcaaattagtatcactttttcccccacattcccctcttgatgaagttctttccatctttaaagtcttggataaactgagagattcttaatacacatgaactaaacaaagttactgctagttagcaccacaggaatgctgacctttcattacaatacaattcaacaaggaattatttaacaacagttaaggttgagatcctccccacttcctcggaatatattatagatggaaatgtgagacctcggtagattagagaataccgtaagggcttcttgctattaattgttctccctacccatgccatgtctccgcaggagatcggggaatattgtattgcaatgctacagagctccttgtgtagcatataaattacatgatgctgaatggcaacaacaacaaaacctctctgaggagctttatcattcctgtcttttcatcaagttataattcagaagctgagtaatctgaatgagtagctttaaagtgacttggaaaataactggctaaaaataaggatgcattcacattcttgttttcatgtactggaacaggtttctcaactgttgtagagggtctttattgttaagaacttttttaagtagtaaaactttggttttctaaaagactttggcatttagaggcatactgagtttagtgtctttatttctgtgcacacctttcaagttaaaaatgtgggccttttattcaaagagtaaacaataacatacacattgaatgtatttcatcatcattatcaagtagtacataagttggatagagcttatctttttatttttgttatgtaccttattccagtaaaaattaagttaggccaatcttaaacctcgtctgtttctcatttgtagtcacaatatcattatacttttaggcactcagccagtctcttagttctcaagtacagtccattttatttctttaccgagtttcttctctttcctttactttaccactttcctgtttgaggccctagtagtgcctgtataaactatttagtactcacctaaccagcatttttacttttagttttacagttttccatttattctttaaactctagcctgaattatcttcctaaaacataggtccaggtgttacttgaatctttcccagaaccttcagagggaaattgagtaaaaattccctagacctcagaccacctcatcaccaactgtaagcctccacctactctacactgcaggcaagcacaatgaatctgtttaccattcccctcatatagtgatttacatttgttttttttttttgccctgtgtccttgtgcagctatgccctcagcctgcatgtcagctgccacatccccttgtaaagctttcctatcttcctcccatgctccaattttagttaattgtattattagaaagtatcaaatacatagtaacaagctcttcaataatcatcttctcattctgcttatgctcattctgactgccatctaaattacaaatgccgtgaggccaggaaccatacataccttattcatctttgtatccagtgattcccagcacaatactcagtaaatatttgttgaattggacagtttaagccatgaatcacccagtgcccatagacctcatatgtagtaggtagctaattctaatcaacagactggtttcaccaaaattattttcctatttaagctaaagagttactctggttttttagcattggttttagtactccagaacacaaatccaaatatatgattctctctggtagctcaattgaagaactcctcagtggtatgttttagtattttctaagttctcctgtggtaaaagaagactgcttcgccttctattaatttctgtcttttgacatatatttttacatatcaaacgattcatactattgttttactattttgtaaaataggcttcagattgtcatttagtatcagttgctttagagaacactgaagttttaagaaatcgtatattttaaaatagtttgaaagaatataagcctcatggtatttagtaaatcctattttacttgtgtgtatgactatgtatatacacaagttgtgtgtgtgtgtgtgtgtgtgtgtgtgtgtgtgtgtgtgatctaactcctcagatagtctcactaaggaaaagatggttgctatttcttacatactgcttcatgaggctggcatagtgctggacacactggacaaacggaaataatgccagcaagttgagtttgctttctctggaggattgtgtaattcttctttattagtaggcatttggggatcccatcatactactccacataaagcttaagagtttccaacctaattggaaatattactttaattgaatctttgttgctatactgggttttctttcttccttttttccttagttatatttttaaaaagtagtttgtaatgttcatgtagtttggggtttggggttgaatttagaaggacaaaaattcgatctctttattcttacaataaagttggaaaaggttacccaaaaagttgattactaaacttttcagttctttagggcaagtgtttggttaccatattacataagaaaagtttaattatattaaagtcacgtgaaatacataaagggaagttgagtagtgaatgggggagaatgactttgaaaccttcccagataaagacctcccttgatttgtggcccatgagacacaaataggtttataaacaagagtctgtatgatacataatattttgcctaaaagctccattttccagattgcttctctggttctgggatccagaaaaatgtgcagagatgttaactgcagtgaggtggaaagagcttaagcaaccaaaatctgcccttcctgggaagattacttatttggggattgattttcatgggagaggaaaagatgagagcttagagactatgtgcttcttgatcatatgtgtaggtatttttgaccattatttaatatgtcacatttccccaacaggtggattttgcaaatcgttttgttggaggtggtgtaaccagtgcaggacttgtgcaagaagaaatccgctttttaatcaatcctgagttgattatttcacggctcttcactgaggtgctggatcacaatgaatgtctaattatcacaggttagttttgggaagcctggaaaatggggtagtcttccccatctgtgaatatctgtcatgaagactagagactacccagtatagcttttatcttccatgggcatcagtcccaatatttttatccattaatttatacttagtttttgaaattattacagccttattttcctaatcttaagtaagacatcttatttttaccttttctttctttcgtggcatctttatctgaggaacagggattaaaaactattcagttaccccacagtttgaatttttttttttttttttttttttttgagacagaggtttgctgttgttgcccaggctggagtgcaatggtgcaatctcggctcaccgaaacctcctcctcccaggttcaagcgattctcctgcctcagcctcccgagtagctgggattacaggcatgcgtcaccacacccggctaattttgtatttttagtagagacagggtttctccatattggtcaggctggtctcgaactcctgacctcaggtgatccgcccgcctcggcctcccaaattgctgggattacaggcgtgagccaccacgcttggcagtttgaaattttatgacataataatgctcttaagaagaacatagtgatatgcctctagtatgtattctgttgtaattcttccatttgagagtgatttgtttctattaaaaataattttcaagtggtttcttgtactttagtatgaagacattgtgtaaatataagaagcacaggaacagtatttagagaaatcagtaaccttttgtttaccctattttgaatcctaaaagaaaaagttcagttatcatggccaggcgcgatagttcatgcctgtaatcctagcgctttgggaggccaaggcagacagatggcctgaggtcaggagttcaagaccagcctggccaacatgatgaaaccccgtctctactaaaaatacaaaaattagccaggcacggtggtgggtgcctgtaatcccagctactcaggaggctgaggcaggataatcacttgaacccgggaggcagaggttgcagtgagctgagatcgcgccactgtactgcagcctgggcgacagagcaagactccatctcaaaaaaaaaaaagtctgattatcttggtgtttcttcttgtccttcttgatttctttacgctaatatgggaggaggaggggggaaatttagtcacgtgtatgctttaggtctgttatagagatttaatttttttttgtttcttcagactgagatcactatgtaacagtattttctttgaataagctatcaagaaaaatgatgattacctcatatctcttaagaaactcttaatcaggcaccatatgtaagttgagtcttttattcaagtacgtaaaagaatattcccacataagtgccgttaatgcaccatgagttgctggtactatttttttttcctgaaaaagtggattttttatttccacttagaatctgttactgcttggagatgagtttcggggtctaaacactcacctgggttgtagaatttagtttattgttattcccaaaaattataataggagaaaaaccctccccatgagttatataaaatgtgtacccaaccgcattacctccaaagacatacatgacaaaaccgactccaaagtctaatcttgaagccacactgtgcctcagatagatttgtagacaaccttcagaagagtatattttcttatgttttgcttttaagattctctttgactttcaatggtttgaatatggtgtgtctacatgcagatctctttgactttatcctacttgaagttttttgaacctctctaatgtttgttatatttggtaaatgttgggccattatttcttcaaatgtttgttcttcccctttcctcatcttctgggactcccaaattacgtgtttgttgattcacttgatgttccacaggtctcagaagctctgtttatttttcttcattctttattcttcttgttcctgaggctcagtctcaattgccctgtcttcaagttcactggttgttttttctgcttgctctaaactgcttttaatctcactggtgaattttttatttcagttattgtacttttcaattacaaatttctgtttattttttataatttctatccctttatttattaatattctctatttgagaggcatcattcttatactttagttttttagacatagttttctttagttgtttcagtatattttaaatagctcatgtaaattctttgtctactaagtccaacatctgggctcctcaggggcagttactactgactgctttttttttttgagtatgggccatactttctcatttctttccatgtcttctaattttcatttaaaactggacatttaaaataatgtaatgtgaccctggaaatcagattttcgcttttcatcacagttcatccttcttgctgttttttcaatgacttttctaaactaattttgtgatgtctgtgttctttctgtgtgtggccagtgaagtccctgcttgttagattagtagtcagctaatgcttgaacagatttccttagatgcctgaaactaataagtctcaatgaagtctaatagtctttgttgaagggctgtatgtgcaggtgcagcctaccttcaacactgcactaagcagttgatgcctctgccttagccttcacttcctgtcaaggtcaggcagaggagagagctgagggctttctctagtttttcctgagcattcatatggccatgggcacgcatgagccctctagattccttcttgttttaatatattagaacttttcaaagccctttgtggacattctcattcttcaacttttcctttgaagcttttggttagcctattgtttgccccagctgtttgccaccacctcaagaagtttcagtgttaaacaatccctgtaattgttttcatcaaaccctcaaaagaattacgcttttcctactggccaagctccaagtcctgtaaagtaaagacagccttctgagcggggccctccaggggaccaccagacaggtcaaataatgacagttctctgagaattgggctttgaaggagcttcagctttcttttgccccctctgatggcttctgattttcactgtgattcaggaaggttagtttttaaggccgagatggagcttgggagagtgggatgggaataaggcaaataaaacactgcaaagtttattgtttttaccaagattcagctggtttttcttgaataagcactccctggattgctgcaagcctttggctacttttcagttgattctcacagtgctcatcacagtgttcacattgctttcatggaggagagagttttcagaggtttttactgcaccattttttactgatatctttttatcttttgtaagcacccatggataaaggagctttcaatgagttattctacatcatttagacatcctatgtaaatttttatccctgtgattctgcttttttggtgaagtaaggcaaaaaataaaaaattgtaaattgtctgagtttatgtaggaaattaagattggaacttccacaaaggaatttttttcctggacagagcctcagtcagccatttgaagttagtgacttggagtactgcattcagaattctgagattatgatccaaattatactgaaatggaaagataaactccttttgtactcaacacttcctcaactcacattttggccatctgtctgcatttgttagttatcatggatgcacgtgggaagtatataattgggcaaggtactaggggagataagattgcaaggaattacagaacaaaaaaaactggcataaatctattgttgagcaaccagcactttggctattggtctcatactattgtagggaagctctgcaggtttggaatatggctgtcttcatcatttacgtacatcaaataatactttaaaagattgttattccggctgggtgcagtggctcacgcctgtaatcccagcactttgggaggctgaggcgggcggatcatgaggtcaggagattgagaccatcctggctaacgtggtgaaaccccatctctactaaacatacaaaaaaaaattagctgggcctggtggcaggtgcctgtagtcccagctacttgggaggctgaggcaggagaatggcgtgaacccaggaggcggagcttgcagtgagccgagatcacaccactgtgctccagcctgggcaacagagcgagactgtctcaaaaaaaaaaaaaaaaaaattttttttttagctgttaaggtagatttggattgaacactgagaacaaaatatcccatcagtttttaagatgaatttacattcttgaaataaaaaacttggtaaaatgcatttaaacttaaagctaacttgtttcatttgcttaatttctctagaaagtagtaagaactgggctgggcgaggtggctcacccctgtaatcccagcactttgggaggccgaggcagggggcatcacaaggtcaggagattgagaccatcctggctaacacggtgaaaccccatctctactaaaaatacaaaaaattagccaggcatggtggtgtgtgcccgtagtcccagctactcaggaggctgaggtgggagaatcttttgaacgtgggaggcagaggttacagtgagccgggattgtgccactgcactccagcctgagtgacagagtgagactccgtctcaaaaaaaagaaaaaaagaagaagaagaaagtagccagtacattgtcatcctccattaatgttaatgtaaataaaggatgtcattttccttgggaataaaacaggaatgttaaaaggaaaacataagaatattttctttttttaaagataatttgtccccagtctaaaaaaggattctaatctccttttacgtaatctctaaacgttcctgcagctattgtaaaatgaatggaaaattgcagatccatgactcaccttcagatctgtaattacctcaggctaaggacatatggggtgacttttaactcagcattttcccccacatccacttaactttattatagtgcctcctaattaatatctgtgatgtgatgttaccttaatggaaatggccatttcatcatctatttgatgtctggatttctgccatctccctccttaggagactcttagccatgcactacaatctatctgcctgatcaattccgttccttcaatgatgcatccagctcagtgagctaatggctgtgactgtgctgcctgaatctgtagaagagtttgagaaattggaaataaattaaatttatcatcattgtgggacatctggttggtatcattattttaaaagaatatgaaacaggtcatgcaaacaggcaaatacttttatacagacagtgttatccctctgtttgttgtgatcctgcctggggcagccatgagttaaaaacctttcagtaagtatagatagagggaaagagttaaaattccaatcttcccatttcttctttttttttttttttttgtcttctcttacttgtttctgtacaacatccagaaaatagtttcaatactaaagggtgttaagttttctgagagttgtttttctgcttctgtttggtgagcacataaaccaggtgcctagacatgaaacctactgggcagagtattcctgtatttaacgtaaaacctgcctctagtgaatcagattatcccagacatcacaaatctttacatcttttccaaatgtcagcagagctgatagaaatgataacaagtagacaccattgcttataggactggtgacatcttctagagttaaagtactagaggtgcctgtcaagacaccagctcattgggaaaggtccaaattcagttggagttttccaaaaatgtttggaaattaaacgtttttatgcttgtcttttctaagtttttaataatcattagaattaaaagcaagagttttctatttactgcataatcactactgtttgagtgatgctaataaaatttgggtaaaatggtgtttatataaacctgctttccaagggaacaatccattggtaagtagaattttttttaatctccgaatgttttttcccatgatcgttacaaactcttattcctaataagggaaaataaccatgtttcttactactaaatctaaaaaatcatgaagaggtcatgaactcctcataagattttaatggattccttctagttttttccttaagtgaaggtctttgactatgaagtcttaaaggcccatccctagtgagagctatcacaatggtcattcagtcttctgtctcagtagctgttaccagtttacctttatattttcatcatagttcattaatttaaattttaaacaagttaagggcattcacttttttcgaaggagacagttggcatgttaaaaggtgtctacttagaaaacccagggtttaacttgtttagtacaaaagtgtttgtatgtgtattttttatttcccatgaaggagggaaggaagtaaatctaaccttgttcctctcagagaagaacactgaaactatattaacatgaagtagaaacatgataattgatattttatatttttcagccactttcttttaaaaagacagaacaagtatttgttttccgagttaacagatcagaataggcagtttgtctttttatgaacaggaaaaacgaggcttgtctaccgctaggcagaaaacaaaagaaggagtagtccttgctgtcttggttcctatcaggcaagtagaccaggttgcttttcaccctcgagtaaatagaatcacgcatctgtggtttctctacccccttaaaaaaattatttctaatgacaccaatactgatggctttgtgggtttgaatgaattttttacttgtcttatttagtttcccaaggaattctatgatgtaaacaaaataagaattattaagaaccctgaatttcagatgatggaatgatgtccagtgaggtttggttatctaaggtcacctagctagtgaagatccactttgagtttctcacgtttcctaatctcagtgcagtgctctttttaccataccatgcatttattgtagatgtgaatttttagtatgcgtcagttatgtagtgccttcggattatttctggactcattgttttaatcatcagttaaatttctttggctcattaattattatgtttattcggcaagttcttactcaactgcttttatattcttgcattacaagatgctaatgtagataaaaatattatttattttttctttttttagacacaggatctctgtcacccaggctagggtacagtggcacaatcatagctcactgttacctcaaattcctgagctcaagggatcctcccacctcaaactcctgagtagcaggaactgcaggctcacaccactgcacccacctaacttttttttttaattttcagtggagacaaggtctcattctgttgcccaggctggtctcaaactcctgggctcaggcagtcctcctgcctcggcctctcaaagtgctgggcttaccggcatgagccaacacaccccgcctataatttataatccctgcccttgaggagctgagagtctagtgagggagtcagattccatttcttaagacagatttattgaggtataattgacataaaataaactatttgtttaaagtatacaattatgtaagtttggacgtatgactacacccatgaagctatcttttgtttaagttttcattgttttttgttttaattgagttttgaaagctttatatattttggatataaatcctttatcagatatttctagcatgtcttttcattctcttcacagtgacttttgaagcacagaagttttaagttttgaagtaagcttattaatgtgttgttttctttcttcctgttttggttgctatatctttataataagtcttaaaatcaggtagtatgggtccttcaacttttttctccttcagcgtcgttttgccaagttttagaatcagtatttcaatgtttaccaaaacagcttgctgaattttgagaatgctttgaatctgtagatctgtttggggagaattgactttttttttgagacggagtttcgctcttgttgcccaggatggagtgcaatggcgtgatctcagcttaccgcaacctctgcctcccaggttcaagcgattctcctgcctcagcctccctagtagctgggattacaggcatgtgccaccatgcctggctaattttgtatttttagtagagacggggtttctccatgttggtcaggctgctcgcgaactcccgacctcaggtgatccgcccacctcggaattgacatcttaacaatgttttgtctttgacacatgtctaggatgtatgtctctgtttattcatgtcagttttactcactagtattttatattagtattttatggttttcattgtataattcttccccattttgtcagatttatccgtaagcatttcataattttgttgctgttgtaagtttttaaaatttctgtttttaattattcattgctactatgtggaaatgcaattgattttcagattacaattcaatatgttaagtgctctaccaatgttatgtgcaaaataccttgggagcatggaggaagaacaatcaaccctacttatggtgtcaaggaatgcttcataaaagaaataacataaatcttctagttattttcttgatttttagcatgaatatcttgtccaaaattctagataaatgtctaataattaaaatacaaattatttttagaagtagtatattaaataatagactggaaactctagtattgagtttaaatcttggaacttttgattctggaaatttttaatcatatatgaaaatagagtattttcatagctttatttatattatgtggtttttattgtgtgtttttctgtttgttttgagacagagtctcactctgtcaccaggctggagtgcagtggcgcaatctcagcttactgcaacctccaccctccaggttcaagtgagtcccctgcctcagcctcctgagtagctgggactacaggtgcacgccaccacgcccagataatttttgtatttttagtagagatggggtttcaccacgttggccacgatggtctcgatctcttgaccttgtgatccgcccgcctcgacctcccaaagcgctgggattacaggcatgagccaccccgcctggccttatattacgtgtttttatgtgtatgtatatgaaacttcagacttacagaaaagttgcaggtataatacatggaatttccatatactctttactcagattcacagaaaagttgtaagaataatacatggaatttccatatactctttactcagattcaccagtttacatttttgtcccatctacttcatcattttctctattttcttttcttgaattgtttaggaatatgttggagatactgtgcccttttatccctaaatactttgttgtatatttcctaagaactaggacattgtcttacatcagcacagcacagttagttatcaaaatcaggaaatttaatttgatacagtactgttagttaatctacattataatataattttgttattccaattatgacctttgtagctttctttccagtcttcaattagtccaggctcacaccttggtattctttaaactggaaccatttctcagcttttccttgtgtttgttcactttgatatttctcaagtggataggctagttattttgtagattgtccttcttgtgtttgcccactgcttcttcctaattaggttcgggttattcatttcggtaggaatcccactgaagtgatactgtgttctatttagtatatcttttgaggagacatgtgatagcactttgtcccaatatttgtgacaccagtgtaatgacttggttaagttgggttgaccaggttcctccactgtcaggttatactttttcattctgtaattaatgtatcgctatatattttatatactttgaaactgtaaacatcttgtcctcatcaaaccttcacctactaattttagcagtcattgctaattttttaaactcccattctttctacatttagtagttggcattctactataaggaaggattttccctttttccttatttgtgtatacttatttattaatatttattatttattaatatatatgcaagtatagacacttgcattcttattgtattcagtggattatgatccattgctattttctgtttggtgctaaattgtcccatattccatcagtgggaatgccttcaagttaactattgtgtgcctttgacatgtgcccatcattctttaatgcactttcttctttgagcatctccatctttttagcacaaaaagatgttgtaggctcatcttgtatattccctgcaccagctctggaatcagccatttctgcaggtggtcctggattttagttagtttttggaagccaagatttgaactagaacatatatgttacaaacacacacacacacacacacacacacatatacaactgtgaatttatattgatacctcccattcttaaccagcttcacagcctatattatagtctttccccctttccataattggaactctcttccccaacaatgaagaatgtggctcccaatatcttcaatttttctcgtttgtttaagcctaatatatacaaaaggtgatttcagaacttctaaaccatgccactgcaaaaagtaaacctgttaaatagagttcattatttgtttacagttcttttatttttgaagtaaaatttacacacattgaagtatacaatgttaagtggataatatggtgagttttggcaaattgatatgcttttatatcccacacccctatcaagacataaaaaaaaaaaaaacatgtctatcacctcagaaaattcccttgagcctttttctggtcagtccccaaccccagaaacaaccataatttttattcttttcattataaattacttttttcttttttttagaatgtcatgtaaatatatgtcatacacacttctgtatcttgctgcttttgcttagcgtaatgtgagatctatctatgttttttaatgtgtcagtggttctatcccttttattactaaggagtattcctttgtgtgatcgtggcaaatgttttgttaattttttatcaatagttggattgtttccacctttagttttgtgatagtctttttttttttaatgtcaacttagctaggctacagcccccagttattctgtcaaacactaattcgggtattgctgtgaaagtattttatagatgtgatcaaagtctacaagtaaaggagttaatcttattgcattcaataagcatttttttttcctttgagacaaagtctcactctgttgcccaggctggagtgcagtgatgtgaccttggctcactgcaacctctgcctcctgggttcaagtgatgcccctgcctctgcctcccaggtagctgggattataggtgcctgccaccatgttcagctaatttttgtatttttagtagggacagggtttcaccatgttggctaggctggtctcgaactactgacctcgagtgatctccccacctcggcctcccaaagtgctgggattacaggcatgagccactgtgcttagccacattcaatacaatttgcattaagtaagcgataatctgggtgggcctgattcagttgggtggaaggccttaagagcagagctgaggcttctctgaagaggaaattcattctgtgcactgccacttcacccatgcctgagagttccagtgcaccctttggacctgactagtcagctccacaattgtgtaggccaatttttggcaataaatctcttcatatatatgtcctcctggttccatttctctggttgagcaatgactgatacaaatctattgtaaggaaacctgctatgaacattgttctttgcagtttttgtgagcacacattttcagtatttgtttagtagatatctaggaatggaaattgtaggtcaaaggttacgtgtatgtttaattttacaagggattgccaaactcttttccaaaattattacaccaatttatgttctcccagcaatataaaatgagatttccacttgttttccatcctcgtcaacatttagtgttgtcattcgtttttattcttttgtattttagcctctcttttgagtgtatggtggtttctcactgtgattttttttatttgcatttctctgatgactaataatgttgagcaatattttatgtggttgttagccagttgtatatcttcctgtgtgaagtttatattcaggtcttctgtccatttttctaaattgggttgtgtttttattgcagacatgtaggagttcgtcgcatattctgaacacaagtcctttgtcagatatttgatttgcaaatattttttctccagtcttgtctaaacattttcctgaaggtgttttttcattgtttgttcgtttgttttttgtttttgtttttgttttgagatggagtcttgctctgtcacccaggctggagggcagtggcatgatctcagttcaatgcaacctccgcctcccaggtctccatttaagttttctttttttttctagtgtctttttttttttttttgagatggagtcttgctctgtggcccaggctggagtgaagtgacacaatctccgctcactgcaacctctgcctcccaggttcaagcgattctcctgcctcagcctcctgagtagctgggattacaggcacacgccacaatgcccagctaatttttgtatttttattagagacggagcttcaccatgttggccaagctggtctcgaacttctgacctcaggtgatccaccagcctcggactcccaaagcgctaggattacaggcgtgagccactgcacctggccagtagtgtcttctttgttgttatgtttactcctaggtattttatggtttttgacattatgggtaatggatttttaaaaaatgtttattttcccattgtttgttgctagtacacagacatacccttgatctaagtttacttatatgctttttctttattttaatttcccctttcttttcttttcttttttttcttttgagactgaatctcgctctgtctcccatgctggagtgcagtggcacactcttggctcactgcaacctccgcctcccaggttcaagcagttctcctgcctcagcccccctagtagctgggattaaaggcacacaccaccaagcctggctaatttttacatttttagcagaggtggggtttcaccatgttggccaggctggtcttgaacttctgactttaggtaatccacccgcctctgggattacaggcatgagccactgcgcctggcctctctctttagttcagtgattccttaggatttgctatgtaaacaagcatgatatctacaaatagggacagtttgacttatttttttacattctttatgcctttttgtttattttcttgccttattgcactggctggagagaccttcagtacagtgctaaacagaagttattcttgccatgttatgaaaggtggaatgtttttgccatcaagtgtgaagttaatagtgacagattgtttgtttcaggtactgagcagtacagtgaatacacaggctatgctgagacatatcgttggtcccggagccacgaagatgggagtgaaaggtgagtctgtttctgtcttcagtattccatggctaaaagcaaaggaatttgggcttgaccctcacacactctcattctgtctacttgtatttcagcaagtgaacttaaaaagaaaaaagaaaagaaatcagcattacaggttcattggcattgaaaacactattaccatcttcctgtaccaaagggaagaacagagaagataaaaccaaaagtctaaagcaaagacaaagaggggcagaattctctacagttctttacctctgagctacaatcagaaaccgtggaggttaaattccatgtttaaatctgagtagaataggttctaattagagcttaaagcctttgaccaacttattaagttatctttaatttttctgtgaaattaggtggaggaaacctatgttgcgacagttgacctaatgccacaaaccagttgatggcagaacctgcggtgtgctttgctgctttgtctcctatatcttcttgaaatatagtcttctactttgacattcttacttctagttaaccagagataaaattttgcagaaatgctacctgaaagcttgtggggttttttgttttgttttgttttgtttgttatttgatgagaaaaccattgtggcagaaagaatcagctcttgcccacgtgccacaaatttattcctcataatgtctcaagtccatcctctgctttcttgctattttgtttaaaatatatggttgcaacaaacatctatgtagatgtttattctacattatttacaattatttacaaaccagcatgaagatttctattgttggttttcagtttgaaaagttgcttggcacagcaatatatgcaagtttataaagagattaaatatttgggattttacatgtttccaaaattatcatctcaaccagtcctttctatttccacaggcaacatggtattgtctgctttgatgtctttgttattttaaaaatagtttctcacagtcagcaattgagcacagtaggtagaatgctgcactgaattatttcacatttttgtaacacttcttaggattatttcctggacagtatatagtgatgttacaaccccagtgatttaaagcagatctctcaaagcaaaggaggaatgagctttgtcaggatgcaagtggcatgtccttagtattagaggaaaacaaagaactagattccttttgtttgcccccaaatcctttaacctctgagacttactataaatgatttacctgtttacactatgtcattgtgttgtctctgggtaatttttcattttactttttaaagcctgacagtgcacactgtatatgcctcaatctaaaaataaagggtgtttcctttcctttccttttgctcagacctgcagacactggtttgtttttaatattttaacagagctaaagtcttggcaacctgacccctgagaggattttatttgagcgactacctgttccttatcttttctcccctttccttcctgtcccagggacgactggcagcggcgctgcactgagatcgttgccatcgatgctcttcacttcagacgctacctcgatcagtttgtgcctgagaaaatgagacgcgagctgaacaaggccagtaaccttatttcttagttcatctggcagctgtcatctatttactgccattttattaatgctgaaattaatgctttctggtaattattgcagtgtcagtatgtctgcccacagctctcctgatttaatggctctgtcagcttgtacaagatgtactttccattttgtaattgtttgattcgcagctaaggttgccagataggctgttgcttagttttaaaccccacacatgcatttatctcatcaagtaccttagctgctatgggacattatcaatgtaaaaccatatagaaacaaatgagctctgaaaatttttttctcagacctgcttaatgacattttctctacaaagtatgctatcagggttaaaacagaaaaactgaaaaagccaaatcaaatgttgttctattttaggtaagatttatgatggtatctattattttccgtaatacttagtgccgcctactatattcatttttttcttttttattacagaaatataaaaatgaaccatacctgttgttcaaattttcagtattggcaaccataataaataaactctgttacacaacagagagctgattctgttctctggattttgggctttcccaaaacagcagagattttctttttagttcctcgaattattcactcagcagagattttcttttttttctttttttctttttttttgagatggagtttcgcttttgtggcccaggctggagtgcaatggcatgatcttggctcactgcaacctccgcctcccaggttcaagcgattctcctgcctcagcctcccaagtaactgagattacaagcgcctgccaccacgcccagctaatttttatatttttagtagagatggggtttcaccatgttggccaggctggtctcgaactcctgacctcaggcgatcctgcccgccacagcctcccaaagtattgggattacaggcatgagccattgtgcccagcctagagattttctttagttccacaaattattcacacagccaagaagactgacccaattctgaaaatcattctttcactcccatgagtaggatttagttataagattattaggataatgaggcttgtggtttttacatggctatacatggtgtgccagttcctacacagacttctgagaataataacagtgatctagacagatttttactacacttacaacttagtagatattttgaacataattaagtatcttatatcctgatctatttgggagaatctaatttattgttgaacatgttctcgtatgtataattttttaaattattttaatgtttagagttctcaaattttataaaatgtttgaagaataatgcactattttttaaagttgaacttacgtaacaggtgtcatttatttaaaaatgaaaataaaaagtaatccctcagaaaagctatccagaaagaccggcctttggtgtatcaacagttctaaagttctctcctacctgactctgaaagtcagagatttgcctgtactgaagatttttttttttgttgtgttttttgtttttttttttttgaagcagggtctttgttgcctaggctggagtgcagtggcatgtgcgatcacagctcactgcagactctcaacttctctgggctcaggtgatcctcccatctcagcctcctgagtagctaggagtacaggtgtgcaccaccacacctggctaatttttcttttttagatacactgggtttcaccatattgcccaggccaatttcaaactcctgggctcaagtgatctcctccccgtcggcctcccaaagtgctgggattataggcatgagccacaatgccctgcctgaaaagtatcttttactagtaattggatacattttaaatgtaagcctattttcactgttccaaactcttgccttaaagcaattgtccccagtaccatgatgtttttaggatagagcatatcgagtagaataagacttgtctttaaattttcatgaggtgctacttacctaaacacgtatatgtgaatttgtcacacggtcaagaggacatttatgtaagcagtaggttgttggagagaaatatggaaaaggaaagtagaaccaaaatgtgtttagccacagttaatacatgaatacaaactgaaagcttcactattttatgaatgaactgtatactcccacatatacttttctatgagaactagatcattcacttttagaagttatcctcaattatgatcttttaagaaggtaactttgggcataagtcttttttaaaattgccaggtccagttgattctctctgcacttacttgtgtatcaccaaccttcagtttgcccatcctcaaagacaccagaaatttaaaagatatatgtgaataggttaagttagttgtaaatattggcaacatggaagaacatttatttatagaatatagagtcttaatgaggggcgttttatacaaagaatgagtcttcaagtaacctggcaacaggagttttatttcattaggagttggcggcagtcagtcacactgccttatggaagtgtctcaaaaatattttgttaaatgacttgactgataattaaataactttttttttttttttgagacggaatttcactcgttgccctggctggagtacaatggcgtggtctcagttcactgcaacttccgcctcccgggtacaagtgattctcctgcttcagcctcccaagtagctgggaccagaggcatgcaccaccacgccaggctaatttttctatttttaatggaggtggagtttcatcatgttggccagttttgtctccaactcctgacctcaggttatctgcccatctcggcctcccaaaatgctgggattacaggcgtgagccaccacgcctggcctaaataacttcttagacaatgttaatttaggtttttgaggtaaatattttagaagttacataagtacattatcttaagtcactcaatatgtcacaaaatgttatatatttcctaaatattcttcaagtgctcaataaagcctagtaagttgagtgtcaaatcaagtttgggacagatgaagccatgtgaagcagatgggttaatttttaatgtatagtgatgcagttctacattcattttcaacctgcaattattcatgtcaatatgcaataaagtctaatttataattcataaaagattcttttcagtcaaatgcaggtggagtttttttttcaaattatacagataacaatagtaaaagtaattcttgccattaaatgattgtttactctctatgaggcattctacttagtgctttaaatgcagtgtctgatttagtcctaaccactcagggaggcataactatttttcttgtctctcatttagagacagtgagttcacttcttaggaagttgagtaatttgtcgcaggccaggtcacatagctggccactgaccaaaccagggctcaaattcaggctcccctgacttcaaatctttttttttttttttttttttttttttgagacggagtttcactcttggtgcccaggctggagtgcaatggcatgatctcggctcattgcaacctccacctcccgggttcaagcgattctcctgcctcagcctcctgagtagctgggattacaggcatgcaccactactcccggctatttttgtatttttaattagagacggggtttctccatgttggtcaggctcatcttgaactcccaacctcaggtgatccacacgcttcggcctcccaaagtgccgggattacaggcgtgaggcactgcgcccagccaaatcattttttaaaaatgtaaatcctgcacatagagactactataactaggcctcaccttctagactttttgtggttcaaacttaaatcattgagaatatttctgcttttagaatagtctcctacatgcttatgcctgaatcactcttcttttgtgatcataaacttctgctgtgagcaaggtacctgttaaatgcttttctcaatatggcttttctgtttgatatagtttttcaaggaaatttgagggttccccacctgtgagacaaggaaatacctcgagtgtaatagagcctatcaacacatggactaactttgagaaagcacctagttcagggcctggcacatgggaaggcatctgataaatatgtgttcttttattcactgatatattccaaaaaatgtgttattttaacaaggaattagttttttaattctttcactgaaaaaggaaaaagcagtaaatgattttgttaaatgtcattggcaacttaatcagaaactaatccaaacaactttaggccttctagattaaagcatttgtcccttactagttacatttacctattaaaattgacttaagaattttggttatgagcagcaggagtctcacataaactgacagcacaacttggagacaatgtttaatattttatatctcatgttttacaaacttttagagcagaagtctgtgttaaatcactttagagatgacttgcacaattctgcttgtgtgtgtgtgtgtgtgtgtatatatgcatgccagagagaaaggaggaaaagaaaaaaaaaaaacccacatttttctacgcgaaaaagtaaaaccagttttcaccgtcagaattcagtatggatctctgacctctggggacctgtttgctacttttaagcattactcaccagttaataattgaaaagccaatcctacaaagtgctttccaggcctctggaaaaggtctgctccatccaggctccaccggtcttattggacccacatcgtgacctgcaagtagagttggtttttaaagggggggaccagtctccttctatctaactcatactgtgaagcaatgtttaatcctgtgagagatcagctgggtatcattctaaaggagaattattttagggttagaaagatttatgacttcagcttgtaaaagtggcaaatagcactgcaagagaagaaacaaatcacttgtgaaaagttgtatttgccatgttaggtaggattttaggtaggattaagtaatgaatatgttttgtggagctttctgaatctgagattgaacaaggtggagagatacaaatcatccctatttacctttttaaaaattgatctgtttattgatgtttttgttattattcaccaccgtatttggaataggactgttattaaaccaaagcctgaaaacaaaaccagtcagtatttgctgctgatattcctaagaagttcagcatctgagcacttacagtcttttcataaaatatgtgtcactttacttttcgagaatgttcaaaatgtatcatttgtagtgggttttcccttaagtttcccaatatatagaatcagaataacaattaaatacataacccaatcttggattttatacatcaggaaactaagatctgcatacttctttcattttatatattgcattttagaatagcaaaaacaatgtattaatgttataattattttagggatgaagtctaatctcagctactcgagaggccgaggcaggagaatcgcttgaacccgggaggtggagtttgcagtgagctaggatcacaccactgaacccagcctgggctaaaaaaaaaaaaaaaaaaaaaaaaaaaaagtcgtaagaaatcagagaatactaaaaacctcagaaaatcagtatcaatatccactgtgtattaagttaaagaagtatagtagattgatttcatataaatgagtaactttaggaacaataattattaaattattccagcaaatagaataatgtatttacatgataatgaaagacatcttttaagtaaaatcatgcatcacttaaagatggagatatgttctgtgaagtagtcactgtgcacatgtcactttacacaacctaagtggtatagcctgctactcacctaggctagatggtatggcctattgctcctagactacaaaccagtcgagtgtgttactatactgaatactataggcagctgtgacgcaacggtaggtatttgtgtcttaaacatagggcaggtgctatgaaaataatggtataataatcttatgggaccatcgtcacgtttgtgcttcgttgttgactgcaacatcactatgcggcacgtaactgtctatctgcttgggccttctaaaattgatattgaagccaaagatcttacttaagtgtaaaatcttatacatcagtttgtgccagactattcccctggataccatttctttcctgggcctcattttgggcctgtagactttataccagttttgtttggtctcttttccgttttctttccttctttcctacatctttatcattaccatgtcctggttggtctctagtttttaactctaggtactaatattttcatctttcttctcaatacacccctttgcaaccttcaggactcccaaattacctttatgttcgctgtcttcttcccttcccatcaaaactcattccaagagagggttgttcattggtatcttctgcttactatcctgaggtctcagtgcttcctttttcttttcccccttctgagttgttgattagtaaaaataaattgctctgtcattgcagactgtcagggcagggtatggctagagttcaagctggctttcttttattctcgcagctttctgatgagtcttctcaagtactcttgctctgggtgggggaaaaacaaacgcatttgccaatatagagctcttgagaactcctaatgcctttcgctgtggagtgagaacttggcaactcttttaaggtctctatccttatctcatctttgtttctttaccaagggagttcaattcctactcataaaaggaaaggtcccctgattcaaggctctgccctggtctccagcacttaaggcatccttcttcctagagaagggagaagcctgggctgactttccaaagagggctcagggcagcatactactgctgtcttatttctgaccttacaaatgcttgcttcttaacagaataaaataattttgtatttaatcattataaccagttattctaatttctatgtaattttatcatttaatttttatctgattaatattttttggtggcaggggtgggggatagagttcactgtcacccaggctggagtgcagtggcaccatcatggctcactgcagcctagacctcccaggctcaagcagtcctcccacctcagcctcccaagtaggtgacaccacaggtcttgccatattgcccaggctggtctcaaactccagagctcaagtgatcctaccacttcagcctcccaaagtgctggggttacagccatgaacttttaaagatttgatctaaacactgaatgaggtttattttcagtttcatggtttgtttttatggccatttttcaagatagataattttccaggaaaattggataatattttgtactagattttgcttctaataatttaaatgtttcaaattctcaatcattaggccttagtttcactaagctatttttgcacattgaagtaaagttaacccagttatttagagacagcagtaagaaagaaactaaaaccatcctgatagtataaaacagagaaatgaactaggaatctgaggaagccttcttctctctaggcatgttagaaaattctgacatgaaacaaagcggcaaagttatgtttattcttccagagggtttgttttttcccttgttcgttaatgacacagactatctttcaagagcctattcaaaacaaatggagctctcagatttttttgacctgaaagagattttcagaagctccatgcatctgactatgcaggtaatttgtgagcgcttgtgtaagctctataccacagtgttgaataatgatctggtaccaacttataattaatatctgtcaggatttacagtctaggagggtatggaaggaatagccttgttaatccatcgagacagtctgtaaaataaatttttatacctttgtggaaacttcaaagaacaatttaatatatttctatgtgtgggtttcatagaagcatctttctttatccttggtttttctctgggaacatttgtcaagatcattcttttaattgtatttgctattatatgtaagctatattttaggcttcgtttggaacttgagaacccaggggagttttgctttgctgctgtattaagcctgttacagtctgatcacttcagaaaataagaatttagaaagaaggcagaaagaccaactagctgacagcaaagaggtggaaatcaggaactctgggatcttacacaatggtcttctcatatagaaaatgagctgttcatttaattaatacttagccagcatcttcagaatatattgtacttttctcacattactggcaagtttttaaatattctagcttaaaacagagctgtgaaactagagaatcttagagccaaaaggcatcttaaaggttatttcataaccaggtataggaatcccttctatagatagttgcttgctctttgttaagtatgtcagtagcaggaagcacatttattaatctaatctccataactgagagagagaatgctgaggaggcataatagtgaccctttgcctgatgaaaaaaatagtgattaaagccttcaaagaaaaagaaaactgttctaacaagtccctttcctggtagtttttcctagtagtttataattgggatcctattagttcttgaaatatctgctattttcatttctgtttgtttgaagtggaaaaataaattgggacctgtattagtttaagggattttatgtgcttagcattcaaacaaataaatattagaatttatcatttcttagtctcttccttgcataatcccaggtttttctctccctttctccctctttgtttttccctctattttggcccctatggaaaaaaaaaatgagaaattgaacataagcttgataatggacactgatcctagtacatcagtcagaaacactgttagtgtctaggcactcacaggctttgataattcttttatcctgcaggcttactgtggatttctccgtcctggagtttcttcagagaatctttctgcagtggccacaggaaactggggctgtggtgcctttgggggtgatgccaggttaaaaggtaagttgttgtagaaaaggataaaagcattctgcccacacaaaaaaagttagtccttcaaaccagatttctcatgtcctgtcatgagaccacaaaaatctaagagaaaaggaaaaggaatatttaacactattttcttttttcctattatgtttgaaggaattcttatttcatttaccattttccttcagaggtcgcttatcactttgatcccccagacacagtattttgttgagtattgaaagattggcaggaggagaagagcatataatgactgcgaagtttcaaacctgagttttcactttcctccactggagtgatttttatggacagttatttcacagactcattcatccaccaaatttaatagcacctctgccactttctaggcacagtggtaggctctgagatacaaagatggagaagatgtgatgcctgctttggaattcacagtccagtgtatgagagagaggcagtatgagaccgatgcagtacatgggaatgagtgctgtagtggaggcccatggggctgtgggagcacagcctgggagagctgcatgaatggcacagataggaggcatctggatgtccaagaagcagaaacatttcttacgtgttattgtttgtggtaggaaattcacaaaatccgatcaacaaagctattggccatttactacattgacattttttcaaagtatcagttatagaaaataatactatatcattacttaggatgattacttttccatttcatcccaactggtctgacaccacctgggtgtactgcattgcaaatctgacactgactacctggagtaatcgcagatctcgcctattaagaacagagtccacaagactgcccccacttcagactccatccacaagtttcaggggaatccccaggccacgcacatttctgtccagctggttactattgtaggaggttcccatgtccccacctcaggttccataatttactagaatgactcacagaactcagaaaaaagtcctgtccttaccactgcagttttattataaaggagacacataaagcgaagcctagaagggaaagcagagcttctacaacccttccccttagtgtcagggcaccccactctcctggcacatcagcgtgtacaccagtcaggaggctgcactgacctttggtgaccaaagatttcattgaagtctcattctgtaggcatgattgattaaatcattggccacatgattgagctcggtctctgccctcccctgactcccggatgtgcaatctgaatcgcctcattagcagaacaaaggcaccagcactcaggaaattccaagggtgtttgaagcttttaccaggaacccaagatggcacaccagaaaaattcttttttataccacagttacaaagtaacaagcaataaagcagacataaaacagccagctggccttaatagctgaactatatttagataaaattcatctctttgagaatacttgagtctgtcataatgtaactgcctttcccctcatcagtaaaatgcttcttaatatttttataaaaatgacacatttattatttttttttaatctagaaaaataccatgaagtatataaaaatcactagaattcactgtcagcatttggtgaccattcttcaggtcatctcagtagcaatgtatgtaacttgatgaagtgacaccctctattctattctccagcctcctccttttagaaagtctgcagtctcatggatagttttcaactatccatctaacaaatgtagatctactgagtactcagcatttgttagtggctacacagtattctgttgtatgcacatatgtaccataatttatttcacagattctccattcagagtttgttttcattatattataaggagtactacagtgtgtagtacaattatatatattatgtgtaattatcttcttaaggtaaattcctagaggtgagattaatgactcaaagaatacgtatacttcattttgatccttgtagatttcactctgaaaggtgatatcaattcacattgtcttcctcacatgaacagcatcaccaagacaggactttgttactatttttcatttctctaaggttcaacagttttcgtgtttattggccatttgtttgttttgtgaattgctttttcatgccttctgcccattcatctctttgggagtagtttgattttatcactggctagtaataactctttgtatattaaaaaatattaattgtttaactgttacatgttataaacatttttctgcttcttcatttatttcaaccgatcaggctgaagttactgagttagcttttatgtgttcacatttttgtggtgtgcttataaagatgtttcctgtccctttatgctaaagactttcacctacattttcttcaaattcaaagacaaaaactgcatggtgctattttcggtgtttgaggaaacctatttttcactctgggcttattgatcttacgacagatacttttttcctgtctttctcttaagtaaaatgaatgactagattcaagtcatcaatccagaagctaggtctgctgtaagccgtggtcatttgtgatagacagtttggaaagctttataaatgtgttcacttcttttccttttttctttttttctggcttaaaagcctttcagactgcagctgtgcttgctctggtgactatcaagcatagtagtctaagatttccattatataattcatttcctcaactattgagatttaaattttggagtaactgacatttccctccccttcattagcataaatattcattaaaaatttagaatgagtcataaagtccttcaatggggaattggttactaaactatgatgctaaaaaaaaaagaaattatggtacatttatgcaataaaatattatgcttcctttaaaaaccattatagaaatgtgtctgctgacagggaaagatggttttggaatattgacaaatgggagaaatacccaatgtatgccatataaaccattttaaaattaaattgtgaatataaaatatcacacacaaatttgcagttctctatgttcatctgtttacgtgccaggattaactatggttgttctctagtgggtgatagtctttgttttgttttgttgggggttttttcattttttatttttagtagagatggggtttcactatgttgcctaggctggtgttgtgattacacttgtgagccaccacacttggtcagtgatgttttatactttatttttaatctgcatcttttttattgtgagcatatattgtttttgtaacaaaaaaatcttataaaaaatgttcatggtgggtaacatgggcaggtataaatccttaaacttgtatttctttaattattaatagaaataaggctaagctgagcacaatggtatgcgcctatagtcccagctacttgggaggctgaggtgggaggaatgtttgagccctgaagttcaaggtcagcctagtaagaccacatctcttacaaaaaaagaaaattacaaaagaaagaaggcaaatttttttttttttattttgagacggagtcttgcactgtcgcccaggctggaatgcagtggcactatctcgactcactgcaacctccacctcctgagttcaagcaattctcctccctcagcctcccgagtggctgggattacaggtgcctgccaccacgcccagctaattttttgtatttttagcagagacagggtctcaccatgttggccaagctggtctcgaactcctgacctaatgattcacctgcctcagcttccacagtgctgggattacaggcatgagccaccgtgcccggctggcaaaatatttttaacatgcttgttacttaattgtacatgagttttgtgttttaccacaattagttgtttgtttttgtaagatacagggtctcattgtgtcacccaggctagggtgcaatggcgcgatcatagctcactgcagcctcaacctcctgggctcaagggatcctcctgtttcagcctcccaagtagctgggactgcagacatgcactaccatgcccagcctcacaattagttttgaactgctttaattgtacattactttgacaactattaagagaacatttttaatatattagttcattcaatagacagtttactaacaacattcttcctcaggcagccagtggccctaagagccacaggctaggagagaagggactagggggagatggaggggctttgggcctggctccagcagcagccagtggcctcctgcatgcctgtgccaccaaaggggctccctgtggtctcctacctgacctgcatttttctgagcaccttgtggaactcatgtgaaagctttcgagccagtgcaagctctacttatttctggtgctcctaactgttccaaagtgaccccctagttcatacttggcttttaacatttcattgaagttttagctgatttattcctacccatttgtgtggtgaccacctctttctcctgttactttcaaacataaaacagttcatgtgttttatcttctcagaggggcttgtcaccctttggttgcctcaaaaactcagctctcttataaactcagaaaaagtcataattttgtagattacaacatttgggcttttctcatggttggggtagaaggagcttttttttttttttttttttttttttttttgtttaagctttctacatctcgtctcagcagagatttttgcgtggggggcttctgcctcaaatgtaccaccagaccctaggcacccgtgagaattttaggagataacttaaaattatctcactggttagtttgttaaaaattttgcttttatctcatgtctaattttattacattgtaatcaaagaatgtagataatactatttctactttttggtgtttcttgaacttctcttcatggcctaacatagtcaattattgcagacatgttggcacttgaaaaggtgtctctgaaaggtataaataagacttactcttttgctgtaagattccataccttttaggtcagactctgtccttgtgactttacttgcttattttgtgaaggaattgagtgctactttaatgttccttcttctgttgtgcttttgtaaatttctcctagcatttcctttgctgtttacttacaagttcttccaacttgccttattttgttgttgtttttgttctgttttgttttgttttaggtgcttagcagcctgaagctgtggtatttagtttctctccctagtggtaagcggaaaagagggatgaggaagggctttactggcccaatcaggaacagaaactaagaacccgtgactgtattctctcccttggacttccccgtatatgttacctgacctgtaaacaagtatgccattgccagtttactatcattaaaatgtgtcttgttgcattttttgcattttcttttctatccccattccctaccttcagtacctaaaagtgacttgcaaataaaatatgctcaatgaatttctatttaacaaatatattcagtagcttctgtgtgcctttaattaatcttgggctttgcccatttttctgtaactgtctgtctgtacctggctaattacttcggtcccttgtaagattctactccagtggtaactactccagaaagaccctccttcccttccaccagaaaagttctgtattaggattcttttggttgaaagagacactaatgtagcttataccttccacctaaaaggggactgttgcttgacgtggctgagaaaagcagggtagagttggcctcaggtatgagttgatcctagaatcaggctctccctctgtttgtgttggttcctctcctgcctgcttctttcaatataatggcctcattttcatctgtctccatcagattatctctgcctgacaggaaccaggaccaaatagttccagtcttgcaaccctgcagttgagtgacccaagaagaaaggaggactccttagttttaaaatgccacaaaaatactctaatttgaccaattgggattacttctcatcccttggaccaaattgtcatagccagggatcaagaaacacaagacacatccactaatgagatttaaaggatttctaatttatttccatgacatatgtatattaagtgaaatgtttctgagatatagaaactttttataaatttctttcagaccttatgtccatttatatcaaacttaaataatgtcttcactagttattttgtaattttggaatcaagatagttaaactccagaaagaccatttctctagaaaaagaatttagacagtgctgatatgtcattttctaccatgctgtgattggcctagactagccctttgactgagttttataggaagtgtggttagggagttggggaaagggtgacttccaaccaaaaatggaaggtaggagtatagagcattggatcaggtcacctcgtttgtctaccacaggctcctcctcactttgctttcttctgccagaacagatcacactctcttggtctctctcagccttgctcaggaagattactttcttaacatttctgtattatccttttttgtggccccagtgctgagaatggggtctggcatgataatgtgcattcaaaggtgtctggagcaagtatctatttcttacaggttgagtatcccacatctgaaaatccaaaattcaaaatgctccaaaatttaccaaaagtttttgagcgcatgatgctcaaaggtaatgctctttggagcatttcaatttcagattttcagatttgagatgctcaactgatattgcaaatattaccaaaaaaacaatgaaatccaaaaccaatctggtcccaaacatttcagatgagggatactcaacctgtgtcagcacctcagagatactgctgagttagtggacttggaaaatggctttaggaatttttttaactatctgtgagctgggatcagccaggtttaacagtcactgcattttctcttatggtttgcacagttacccttccatttattgcccttcttttaagaatgagaaaccaaggtttatagacagccaataaacctgtcccaagagagcagctagcaagtgtcagaaccaacattcaaacttggctccatcttcttaaaaaccaatatatgttcattactattgttattattagttgagaacatattgagtgcatactatgttctaggaattgtactaaatatattctttacctgtattagcacacaacaacctatttaggtaagttttcttttttgtctgtataggggcaacaactgaggcatcgagaggtaaattagcctagagtcatacagatagcaagtggtagtgccaggatgcaaaccaggattgaagcccttgtgtgcttttgttatttaatccgtattggctgcaggctctggatctggatctagatttgggagttaccattctagagatggtggctgcattcttgaagagagagtgtatttaaagcaggtgagaggaccaaagattgagccattagtaacatccatagtggaaaaggagggagtgtcaagatttaaaacagtagccagaggacaagaccaattggagaataagagttggcctcgaagagtgctgtgtggtagaaacaagaagtgaaatgcttttggtactggtgagcaaagctgagctctcagggtacccaaaatgtgagagctcacaaagtgagctcagtagaaggacatgcatagtactttcaaatctgtactattttggcctccttgacagcatgcatttaaatcgtttgaataaacaatgtaaagacattgctctggctggcatgtggtaaggtctgcttggagttgaccagggtggattgccacagcagcccagaagcagtgggcaagggcatgcattcttgagttggtggcccagtcagctccaccgctttctggctgtgtgacctgagacaaattacataaccttttgatgcctaaatttctttattttcaatatggaaataataattctcttgttgagtttttgtaaggaatcacgaggtagtatttgtaaagctcctagaacagtgttcagcatgctataagagcccagtgttagcagttgttaccaatattacatgctggtggcctcacaccacacttgtggtgtgagtatcaatcatcttacccattttgtgcttggtccatttgttgcaacaggacactatgaattgcttttcatgttattcatatttatttgtattttttcatagcttaacattgatgccaaaaagaaaattaaaaccaagctccctgcaggttaatttaagtgattattttggcacatagttgtgcttgaagttagaattcgatgtttttatatcatacttggaatcagtccacatactctaatagacttgtgatttattctcttctaacttttgatgcaagagagttcacttaaatcatgaggcataattgtgtagatttgcaaagatcttgggggtgttgtagacaaggaggcctgaagacagtgatgttttaaaataaacttttgtcagtgtttactgatgtatctaggatcgagattatctttctggaaatttcatttatgtatgtatagtctagcattcaatggagggaaaacaattataacagtgattatggatttctaaactctgacagaatcttcagggagcatctgatttaactccatggtgtagttgagaaaaatgaggcccagagagtaactggctagtcacagagctagatagctggcagaaggctgaagatagaacttggatctcctgcctgccagtcctaactagtctaacacgtgcttatggtacaatatgtactctaatagaaatgggtgtgaaatcaagaatgtaatgtgaattggttttactttttgattttctcttaatataaaataaattctataaagagataaattttaaatgttttttattaatacttcattttcacaaatggcaaatgactagagatctagtaggaaataggatgaaaaggactcttctttgggtctctgtcttttttaatagtaaatacttaaagctaaattttcattttcagtaaaaggtaagaaatggtacttcttggtggagaaagatgatgattcattcgttcccatttttatgtgtagtttaggttaattaagaaccttttgaaatagggtgtattgaaactttaatgtatggataagttggttgagcagttttaattaaaacttatctctattttgaagttaattactttcaatactctgagattaatgaggcatagtcatggcacctcccatgttgtgggtactcaataaatattagtttgggaattaggacatactttgatggtattttagggtcttacatatattatgtcatagattctttcccaaatctgggaaatactcaacgatatcaaattttactggttcaacttaaaattttttcttcctatgtaatttttaaaactttctatttaaaaataatttcaaatttataaaaataaaaatacacacctttatgtatgcatatatatgtatacacatgcacataatttttttctgaattatttgagcttaacttacatatactatgccctctttcctaaatacttcaatttgtatttaagaataaaatattatcttatataaacacattatagttattaaattcataaatgtacactgatatcttatttactctttcatctatattctcattttgtcagatgacctaataaagccctttctagcctttttcccctctagcacagggtccagggtcagctactgcatttagttgtcatgtttgttagcctccttttgaattgagaatatttccacagcctttttttgtctcttatgacattgatgtgtttaaagaatacaacgttctttgagtttgtctgctgtttccttgtgatgaggttgaggttatgcattctctgtcagaatgctgcatcagtgacactgtcaagaggcacttgatggccatctgacactactggtgatcttaattttgatcactgtgtcaggctgttgcccagtttccccactgcagagttgaggatttttttcctctcttgtaactaataagcaatctgtaggaaaacaaaggcaaaattttccctagatttggcatctgttaatgattcttgcctgacctttaccacagtggttgcaaagaaaggatgttcctattctaacaccccaaccacacttaccagttagtctttggctttctcctgtggggaagagctggcccgtctgttttttgtttcgttttgttttatccatttgagcactactttaccttctggtataacaaaatattttgaggtcatcttgtacctttcttgtccaaactatagcattaagcacttcttgagaaatctagttccatttagggggaatgatggtagagaccaagatttgggtgctgagtgtgctcattgctactgtggtgtctcccttttggcccttttagcagacagagctaggaaatatatatgtgcatacacacacatacacacacacacacacacagatacacatattttcgacatcatgagtatacaccaatgccttccatttcagtccatcctcacacagttcttttttgtcttcctccattccatttttgtgtgtccctccttccatagtgagacacctgttcccagcagcatcaacacatttattcatttgctcattcctctaatacaattcaaaatagtttcagagttgcttcacctctactactatggtaagcaaaccttgtaaaaagagttgggaatttgtttgcagttctctctttctggcctaagaccatatattatggtcttatggacttatataagtcatatattgtctttgtaagttacttgggttctttctttcttcctgttcttcttcctttcccttcaatgtggttatgttatttatttggactaaaattacgctcatttattttagtttaccttcaattgtaggtttcttcccattcccattcttagtattttaattttaatttgtaaatatgtagaatattaacatgctgtcaaaaatcaaaactgtaaaaagataccctctttggccaggcacattggcgcatgcctgtaatccccacactttgggaggccgagacgggcagatcacttgaggtcaggagttcgagaccagcctggccaacatggtgaaaccgtgtctttactaaaaatacagaaattagccaggtatggtggcaggctcctgtaatcccagctacttgggaggctgaggcaggagaatcgcttgaacccgggaggcagaggttgcagtgagctgagatcacaccactacattccagcctgggtgacagagcaagactccatctcaaaaaatatatatatcctctttaatgttttaatttgattcccatcttcccttttatgaagtaagagatttataactagcgaaagggcatttattgtaactgtattcaattttgtggttatttaaaatcctatctattgagattgtaaggtaactaaattttcggaaacatacttcaggctcagtgatttgtaactttgattcctggagatagtagatctcgattgttttttcattcttataacacaccagagagtgactgtccagtgttttcaggaactctgcagaacgggagttctgcagtggccagtggaggtgggagtgcaggagggacgcaggtgtgctccccagcccattttgagaactcctgctgtgggattaaggagaacattagaacctcccaaatgtgcctatacaaaaggccagtggctgtgtgataagacacagcaattatatcaagtaagcaaacacaaaaaattttagttccagattaatagaagcgaatataaatactaccttagtcccatggtttgcagcttcctttatttgtggttcagcaaaggtgcctgtgttggaattctatagtttgatgatattcttggcagcatgtctgaaaagccacacaactagatgatttatgtccatcctgtattccccatttctttttttttttttttgagatggagtcttgccctgtcacccaggctggagtgcagtggtgcgatctcggctcacctgccacctccacctcccaggttcaagcaattctcctgcttcagcctcccgagtagctgggattacagtcacctgccaccacacccggctaaattttttttttgtatttttagtagggtttcaccatgttggccaggctggtctcgaactcctggtctcaggtgatctgcctgcctcagcctcccagagtgctgggattacaggtgtgaggcaccgcgcccagccttgtgttccccatttctaataccatgtatactgggtttataaatctttaatctaggatgaagctgtggcacaccagctggtaaagagctaaaggtatctaggtggaaaatgtcatgatatagccgtgtcttttctctttgcctcagccttaatacagatattggcagctgctgcagctgagcgagatgtggtttatttcacctttggggactcagaattgatgagagacatttacagcatgcacattttccttactgaaaggaaactcactgttggtaagtaggagatactcttgacacttggtatctagatggattgtacaccattcagtgggaacacttgctaaatctggatgaatcacagtgggtacgaagaaacaaaagcatggctctaagcaggaaggacaaaccctcagaggggcagcatttgcagagtctttttgttctggcagagtttcatccacagtcttgatagggtatatcagcttactaaagtaaggtcaagaagctgaagttggtgttcatttttacttttctgtctataaaaatctaaaatgggaaagatgaatgagggtaagttcagatctgagaagccccactgtcctgtttctcagacctgccagcgctcatccagtgtgcttgctacctcaggagcaaagtgtataacgagggctgccatgacagtgcataacgagggtgcatggacagtgtaccatggatagcctgttgttatcatgagcaaagaagttgtttctttaaagagtgttaaaaatcttgtttaatttatgttgggaaagcctttcaggcatatgaaattcatgctgtattttcaaaagccaagtctgagcatatgccatttagattaagataaaactggagtgttctttctaaggttttttcaattacatactttaatgtgcctctggtctgaccttttgctctccaggagatgtgtataagctgttgctacgatactacaatgaagaatgcagaaactgttccacccctggaccagacatcaagctttatccattcatataccatgctgtcgagtcctgtgcagagaccgctgaccattcagggcaaaggacagggacctgaggagccgagcgaatagcatctcctcccacctcccaccagagacgtcctgtttgagctgtcaggtgtaatatatgaattgacttaagttaatataaatgtgtacataatccacatttgtagtcaaggacgcaatctcttccacacatgtgcagttgtcagttggtacatctaaactccctccatcctgactcacgtggacttagatatgttttgtttctattttcttctatttcagtttttcattctttgatgtttatttcttttgtccatcagatctcttgtgaaatcccatggaaggttgtgctcagcctgtcgggtctctttcttcctgcccatatattataccagttgcttctgcagcccgcagatgccagcgatgccaggaaacaagttgaaatccaggaatctctttaactgattttgctaaaaatctccctgtgagccttccactcaactcttaatatgcttgcattgtttaagtttttaaattctgaaaattaataattagggtttttttcatatgtgttgcataatgcaaacctcctaggttaaaatagtttctttatttaagatagaataatttccagaaattgtacttttgaggtatcatttttatctgtaatggtttgtctgtcttttttcctctgatcagtatttttttataccagttttggagactggctgagatgaaaggaaatgtggaataaaaggaggttttcctgatgtggtgtaaagaaaacagattcaagagaattgaagattttttttgtttcttggtacttttttctttttaaattaggactaatgtttcttttgtggtgcttgaggcatattcatataaccaaagtttgagaactgggaacttcatgctgatttgtacatattgaagtttctctggtattcaaaggttatatagtgaatgaattttcattaataaatcactttgtcagaaactcccatatcatctatattttatatatgtatatataaacgtatgctctttaagtgtgtctatatgtgagcacataaaatctaaataaaattggactggtgggaaacaa

SEQ ID NO: 331 - DNA, 9891 bp, Homo sapiens
  source 1..9891: mol_type = genomic DNA; note = NC_000017.11:39626735-39636625 PPP1R1B [organism=Homo sapiens] [GeneID=84152] [chromosome=17]
gcagcttcaagttctggggagaccgcagggggccccccagctggctccccaggccttggctctaactcccaccctcctcccagccccaggagaacacgattctccatgctcattggccagtttcccctaaaccctccctccgagcacccgggcgccagtcccaggcggaggggacgggctggggaccccaaagctgggaccggagggtgagcccggcagaggcagagacacacgcggagaggaggagaggctgagggagggaggtggagaaggacgggagaggcagagagaggagacacgcagagacactcaggaggggagagacaccgagacgcagagacactcaggaggggagagacaccgagacgcagagacacccaggccggggagcgcgagggagcgaggcacagacctggctcagcgagcgcggggggcgagccccgagtcccgagagcctgggggcgcgcccagcccgggcgccgaccctcctcccgctcccgcgccctcccctcggcgggcacggtatttttatccgtgcgcgaacagccctcctcctcctctcgccgcacagcccgccgcctgcgcgggggagcccagcacagaccgccgccgggaccccgagtcgcgcaccccagccccaccgcccaccccgcgcgccatggaccccaaggaccgcaagaagatccagttctcggtgcccgcgccccctagccagctcgacccccgccaggtggagatggtaaggggcccgtgccccaccccggcagcgtacccgacacaccccgcggggcttcttcgccctcccaaggcgctgccccggccggactggcctgggggtgggggcgcaaggagagccgggctctgcctcggtcaggacggggcgcggggccgcgtgtgaagttagctggagactcgtgcaacttttccccgcggctttggtcctgatcccggggcaagagagttcctggcagtgaggctgggggtgcgggggtggggggacaggccgattccagaccgcccaggagtggggtgggggcgtcctttggtcccagcacagtccccaaagggtagtcagtctcctaggctaccaccgggaccgctccgcctggctctgtcccagagctggtcagatgtgagcagcggtggacactgaccttgtcacccagggcaggagtatgaggctgccaccgggtgaatccactaccctgcccctctctaatcccgcgtgtgtgcctgggctggggtctccagaacctggctctggcctcctgctgtcaggccccagagccccaaccccaaggagggagaggtggggagtcatcacaaagccagacctcttcccacagactactgagtcctcctgagggccttcttgggggttgaggggcttccaaaggctggcgggtgctgtgacagagagctccacttcccatccctagtggagcaggggtcacttgttgctgagctgagatgcagctggctccccactgagcagtgatgagggggccaagtcattatggggggagatagagggcagggggtacagtcctgggcctaagcagctttgggtcatgagggtgtcatggggagcttggctggggaggtggcagtttcagcttaactcacctggttctctttgtgcatttccctggagctcaacagggacctaattaactgacagttggtctgattgccaagctgaggggcggggcggggaggggggcggtcagttgctgcttggctcacgtagcaaggagggcaacttttcatttctcacaaggactgggtgaagagttctgcagccttacagagactggaaaagaagcccaaaccaaggcccccagagaggtcccccaggcccctttgggtccctgagcctcagctggaggtggggggtgcctgcagtgcgctggctcagtctccttctgaaaagctggatccagcttgtttgaagcccttgagctgatcttaggtgggcagggccacatgggtgccatggcccgtggggcatcttccccagagggcccagccgtggcagctggagctgtagccagctttggcttccgaggtctgatgttttcagaaactggagagaggaagggccttggtgggagaagataggaagggagatgtctgttctggagtagccatggagtgggacaggcatgggctgggagtcagtgactggggtttttctcgtcctttggacttgttgtgctgtgtggccttaagcacattgccaaatctctctgagccctgctttttcacctctgtaaaatgagggggttaggtgagctacagagttccttttggctctgacagactttgattcaaaggttccctggggactccaaagcactgtttgttccctgctgcctgggggtgggggagggctgcaggtgtccatccagtcacccctccctccatctccttagatccggcgcaggagaccaacgcctgccatgctgttccggctctcagagcactcctcaccaggtaggcccctccctgcccacttagccctggccccaccctagctctgatgccttcctaggggccctgccaaagtcccatgaacaggagtcaaagctggagactggggagtggataaggtctgggaacccaactctattggctttatttattgacatgacacctcccagccgcaggagggagagggcacactttccctgtccccagagattgagaccctggggaaaataactcggattctttctctctctccctcttctcttttcctcctcgcttggttctggttcggttggctttggtggccttcctcagaggaggaagcctccccccaccaggtgagtttcctggggcagctggaaggagggatgcctgggccccttggggtggggtggacgggtgcctgcagtgacaaccaaccagtatggggtgccacccaagaggacacattagcatatcaatgggcagtcctctgagagtgcctcatgccagggtgccaccagcagatcctcctctgctcagactcagggtggaacctcctggacctagagtcctgccctgaaccaggccatggcttatggggggccccccctaaagccacagggtggggaggctcagcctaggtgcaggacccattagcagtggctaaatcagtctgcttgggtggccatgggtgggatggaatggagggatggtgaaggcaagggcctctgctgagcccctttaacctggcacttcccctggcagagagcctcaggagaggggcaccatctcaagtcgaagagacccaacccctgtgcctacacaccaccttcgctgaaaggtactatacccccaccgaccttcctggctgtccgcctgatccctggaactgggcagacgctaggggagcttttgtcagtggggagggattgtttcgccacacatagcccgctgtcagcgtggcgcaacaacccaacgtaaagaccaattttttctcagtctggccttgcaaaacacaggagtcccgaggctgcaatgggcagctatgggccttaacatcgggttgtgggcttgaaagaaaagagatggctggcctaagacaaccagcaggcatccgcgtggaagggactccacctgcagctcctcttcaccagcctgtggtggaccacctcccacccctgctcatccagggcgccttctcctgtgggcttcacccctggcctcccctcccatttgcatcccatttgcacagatctgcacactggtctcctctttcctgcttccctttctccatggaaaagcaagccattccttttgcacacttactcaacacctagtatatgccaggccaagttggtgggcattgggcagaataagatgagtcagatttggtccctgcccccttggggctctttgcctcaaagggtcagggaggggccaagtaaggtggctcacacctgaaatcccagcactttgggaggccaaggcgggaggactgcttgagcctaggagttcgagaccagcttgggcaatacagtgagacccccatctctatgaaaaatttacaaagtgagctaagcgggccgggcgcagtgactcacgcctgtaatcccagcactttgggaggccgaggcgggcagatcacctgaggtcaggagtttgagaccagcctgaccaacatggagaaatcctgtctctattaaaaatacaaaattagccaggcgtggtagcgcatgcctgtcatctcagctactcaggaggctgaggcaggagaatcacttgaacccgggaggcagaggttgtggtgagctgagatcgcaccattgcactccagtctgggcaaaaagagcaaaactctgtctcaagaaaaaaaaaaaagtgagctaagcatagaggtgcacacctatagtcccagatacttgggaggctaaggcacaaggattgcttgagcccagaagtttgaggctgcagtgagctatgatcgcaccactgtgctccagtctgggctacagagtgagagcctgtctcgggaaaaaataaaaaaagaaaagggtcaaggaaggtacacaaagatgtttaagcttggatttgaaggatcataggaatttaacaggcaggcaagggcatcccaggtccaagaagagggaagaaggtgtgcaaagagaaagagatgcgagtcagagggggacttctgggccaacctggaggaggcttcgtttctagtcagggagctggggagatatacctgaaggacataggagggcctcttcctgactaagccctgttgcctaccaaccccccacctcaactcctgcctggggctcttcctgcccggccagccccctccgctcctgcggaggttgggagggagagctaccggaagagtatgctgggaagtggttcgggggagggtttaataagttcccagcaccagccaaggtcaacaggtatacctgtcagcccacttgccagggttgggaacagagaggagaggctgggaagggaggagagaagggaaggggttattttgctttccccaggacaggaaaatgaagggtcagagctgcagcaagtgggcagtgtggctcagcacctggaaggacctccccacctagaggggtgtgtggaagggccccaaagcaggcatgagggacagagtgtcatcttctcaggagagaatttaagaaatccctctccctcccaccttgggctgggtagggagaggctgggtggatgtgaggggaagacctggctcttgactgcaagcatgggcgaacaggccaggatgaagatgttagggccagggtgctaccatgcaccgtgcagtggtcaaaattgtgcaccccctcaactgcccctttaggccacatcttaggagagtccaggtgagtagaggcagggaagaggaaagggatcaggagaggggtggccagtctggggcaaggctggggaccttccaactgaagaaggaagacttgtggtggggggagtttggggccccacagagtggggcagagaaggagacagcctggaaggagtgatggggagaccccagagagcccaggaggcatgagggaggtgggggaagcgagggaggctcacggggcaccagcgcaagcaccgcacacaccttctgttgtcactgtggctcacgaagtgaactctcctcccccgctgggggagaaggaagctgcctgggctgccacctgctctcctgccttacctccccccacagccctcatggatccttctctaccaggagggcactgttttgtaggcttcagtccttttgtgggcaagggaaggtgcccggcagggttggggcttgtcagggaagaatcgagggccctagagagaggggcacagcactaagtcttagcttgaggggttgtgctccaaggctggagctctcacacttggctcaagatgaagctctgccgcgtccccaaggtcagggtagggtgatttattgtgcttttattgcctggatagcttgcccagagccagcaggaggtactgggctgggagctgggggctgggtggggcagcgggcacatacaaagcaccctctgtgcctgtccccgagttggcaggagcatagcaccctgctcactgtgccggaggtttccagcctggccctacccctctgggccttctgaggggaggggccactggcagaccaagaaggaactgcagcaactccccattccccacccccagcccctcctcagcatcttgtctgtggcctgtgaactttgtgtcgcatatgttctaagatcctgccagctcctgcagcctctcctcagtggcccctcaacctctgccatcccccagaacccctggccttggcccctttctctaaccccttgctcctttccatcttttggaaacttgtctccagctgcccacactgttcccttcccagccctatctgagcaggtctttggaggctgggggggttgctttctaggtcaccgcagagggagctgggaacctggggatgtgggtcaagattgtgggggccgcatctgagcatgccgcatcccccggcacagactgcactggctgcagactattatgtcctcagcctcggaattgttctgtcccttggagcccggggcaggagtatgtggattggcatctatgactgggcagtgccagggagtggggactatgcatcgcatgggaggtaggatcagggtaagcagtgagccctcagcaggctgggcacccccaagaaatggaaagtggcaaatccccaggccctggttcctacgccctgtgccttctgcctgggcttgaagctgggagacactgtctcccgtactgggtacttggaaaatcaagctctccagccagggaatgttaagctgctgctgtgcccgcctggtcttgcccagcctagtgccctatggtgtgggggagctgcctgggggctagcatcttaggacagcttaagagccaaacatgatcaaatctacccctggctgcctctgccctggtctgacacccatcaggctgacctgtcaactttggcctttgaacttgggcccctgagggggtattctctgccccaggcctacgggaaggaggctgggggctaggccacaggctatctccagatccatgggctgtgtctagctgacccttgctttcctcggtctcctctgtgccagctgtgcagcgcattgctgagtctcacctgcagtctatcagcaatttgaatgagaaccaggcctcagaggaggaggatgagctgggggagcttcgggagctgggttatccaagagaggaagatgaggaggaagaggaggatgatgaagaagaggaagaagaagaggacagccaggctgaagtcctgaaggtcatcaggcagtctggtaagctgaggggcctgtgacatgtggattagctgtgggtcctccttgagtatacgaggacgtccccttctagttcagtgtctcatacacgcaaactgtagtgacaccacaggggcctccctgtcttctcgctccatggggtgccccgaactcagccctacctgagacatgggtttcctccatccttggctcagtccctctcccaatcaggttttccctaataattcctctcttccctgagaattaaggccaaggccgtttggggtttgaggctagagccaaaagaggacttcccacctatggcagtaagggggcgtgaggacattcagggatggaggaccaggagagtccaacacccctgtcacctgcatttcacctacatttttgaacctaggatgtggtctctgctggggtgcagagggctgcctcatttacttgccctctccaggactgttgtctgtttctcctctttttccttcctaggatggagtgggagggtgccctctagtgtttagatgtagaatttaaaattcaagaaccagcccggcccattaacctttttagtctcattatttatgggaatactgaagagtcaaccacccctactagaagctgtcagctcttccacacaaacaaaaggccttgggcctcctgcctgcatatctggcagtgaagagattggccatgggggcaaaagctgttgctgggcttcagtccctttgtgggcaagagacagctggaagacctgaatcagtcctcactgagacccctccaaaacagtggaagaggggtgagaggagactgttccctcaggaaaagcagcaggtggctgggtgcggtggctcatgcctgtaattccagcactttgggatgccaaggctagcggatcacttgaggtctggagttcaagaccagtccagccaacatggtgaaaccccatctgtaataaaaatacaaaaattagccaggcacagtggcacacacctgtaatcccagctgcttgggaggctgaggcagaagaatcccctgaacctgggaggtggaagttgcagtgagctgagatcgcaccactgcactccagcctgggcaacagagtgagactccatctcaaaaacaaaaacaaaaaaccaaaacaaaacaacaaaaaaaaacaaacaaacaaaaaatgcagaagggcaccgggtcaaatgatagtcctatgatggagcaatataaaccaccacgactcctagtggctcctgggtgctggcgctgggctgggcagggtattcactattacatcttgtttaaggtaatctacacaatttccccctttctatttccttcagaaaggtactaactgacttacgtaagccatatggctagttgctgggagagctgttctagcccagttctctctccatgcttccatgatgcccctggaaagcttaacctcagccatcagacacttagctcacactccaggacagccggatggatacgcagagcctgtgttcttatctcttctttcccatccccagctgggcaaaagacaacctgtggccagggtctggaagggccctgggagcgcccaccccctctggatgagtccgagagagatggaggctctgaggaccaagtggaagacccagcactaagtggtaaggcttgggagtgtgaaatggggaggaggggctgggatcttggtgggtggggccaggccctgagtccctctctgcttgcctttcagagcctggggaggaacctcagcgcccttccccctctgagcctggcacataggcacccagcctgcatctcccaggaggaagtggaggggacatcgctgttccccagaaacccactctatcctcaccctgttttgtgctcttcccctcgcctgctagggctgcggcttctgacttctagaagactaaggctggtctgtgtttgcttgtttgcccacctttggctgatacccagagaacctgggcacttgctgcctgatgcccacccctgccagtcattcctccattcacccagcgggaggtgggatgtgagacagcccacattggaaaatccagaaaaccgggaacagggatttgcccttcacaattctactccccagatcctctcccctggacacaggagacccacagggcaggaccctaagatctggggaaaggaggtcctgagaaccttgaggtacccttagatccttttctacccactttcctatggaggattccaagtcaccacttctctcaccggcttctaccagggtccaggactaaggcgtttttctccatagcctcaacattttgggaatcttcccttaatcacccttgctcctcctgggtgcctggaagatggactggcagagacctctttgttgcgttttgtgctttgatgccaggaatgccgcctagtttatgtccccggtggggcacacagcggggggcgccaggttttccttgtcccccagctgctctgcccctttccccttcttccctgactccaggcctgaacccctcccgtgctgtaataaatctttgtaaataac

SEQ ID NO: 332 - DNA, 12830 bp, Homo sapiens
  source 1..12830: mol_type = genomic DNA; note = NC_000011.10:65638101-65650930 SIPA1 [organism=Homo sapiens] [GeneID=6494] [chromosome=11]
ggagccggcgccgggagcggtagcgggagagcggcagcgggaccccagcgcgggcggcggcggctgggcgggagccccagaggtactggcgggagcaggggacgggaggcactactgtcgggcccgacaggggagaggtggcctagccgtgggcccgggtgatgtgtatgggagtggggtcctcgccacgttcgccgccagcaccctcccaacttccctccgggctccagctcagtcccgagtcaatatgtccagccccctgtctctgaccagccgttcctactctctctgtgtgacggcttagcctggccagccagccggtgagtggaagcggcggctcctgactcctggtggcggcactgtgaccccctccccctcaacactgcaagtgtgtgcggggctcccccttattctgaggctcctcttcttcttaggcggcctccaccccagtccctggcctggcctgggaggaaacatctgtcgcgccccctggcagccgaaatggggtcatgacctccagatgtgctgggaagtggccagctcctcctcctggggcagccaggccttccggatctgtgggggcggggccggccctttccccccacccctagtgacacaggcccggaggaatgtcctagcctcaatggaccctgtgtgaagcttcagggtggggggcagagcccgagaacacccctcaaggcagcgccagagcctggcactgggccacagcaagaggcagcgcacaggctgggtgcacacatgcacagatctcacttccaagcgtgcagagctcagcccacaaggagcggggcttgcacagaccccctccctcatgccctcctactccttcacacactatagcccaggcccgagcgctgaatgtgcccagagcttggctcatggagccaggggctacacccgtcacacacacacatagctagcgacactcacctcattcttctcagtctctcagcagccttgggaggggacagaaataattaaacccaatttttttctttgtttttttggagacagtctcactctgtcccgcaggctggagttcagtggcgcgatctcggctcactgcaacctctgcctcccaggtttaagcgattctcctgcctcagcctcctgagtggctgggactacaggtgcgcaccaccacacccggctaatttttatgtttttagtagagacagggtttcaccatgttagctaggctggtcttgaactcctgacctcaggtgatccccccgccttggcctcccaaagtgctgggattacaggccacagccaccgcacccggccagttaaccccattttagagatgagaaaacagaggctcaaggtcagcatgggagtttattcaggagaaatcaaggtagaagcacctgggctggggagccgactcttgcttggttctggaggccccagacgaagggtgtgtggagcccctcctccacccccctccggcccagccccgcatgatgttgctggatgctgcatgaagacccaccattagatgcctgtacccccagtggaggttccccagctccctgtcctcactgcctactccatccagggcttgcctgggtgtggcttccctcaagttctcacaccaccatttgcacctgcctctggcgtcacgtttccgcacttagcaggtccctggggctttgggtgtctcaatcttgcatcctgtgagaccttgaacctcagcccaacacccaccccccaaaacctacgcacacagacagcagtgggcaggtgcagccctgcttagggcctggagatgggcagacccaggctcacatcctagctctgacacggaattgcttcaggcaagagcatctcctctggacctcatctgaccatctgtcacatggggttcagacctccctgtctgcatcagtgagaccaggtaggcagaggtccctatgggtccctgtcattgtgactcctcttgcccccaagcctgggcacagtagcctgcaagaaggtgagttggcctgtccttcagggcagggtgactggggtcccatgacagctgctgtgaccccagcaccttcctcaggatgtgggggcctggcagagggctgggcccacagttggggctacttcctgtgctgaaggaagtcctcttgccattcctgctgccctgccgctgcctccctgggaacccatgtgtccttgtggtattgaggccttgaggtccagggcactgagatcagacctctctgggtgatcagctctccagggaccctgaaggaagtgggaggggcaaggaggaaggtctctggggacaggacgtcctccctttgttaagtgggcaggacccagacaccagtggcccctgggtttcccgtcccagccaatacaagtcatctgtccggttgggctaggtcctggtgggacccttactctgggcccaggccaaagctaaggtgtgtgggtggcgactgggggaccctggcagtcccagggctgcccaggctccaggaccctcaggaccaagacccaacagcccagcctctagccttgcccagctaagctggggagggggctggaaactttagccctaggcagacaaggaagtggcctggaaagcggaagcagctttgatggtctcggagggggccggaagccaacacgggtggtggaggaccaggctgggggcctgggttcctgttttctgcccaggcccctctgagcagccccctcctccttcagggcaggaactgctgccacaacctcaggctgggcaccaaacacccgtgcccgccaatgcggcccagcccccggagagtcaggcccacagagcatgcccatgtgggccggcggtgtggggagccctcggcggggcatggcccctgcgtccacagatgacctctttgcccgcaagctgcgccagccagcaaggcccccgctgacaccgcacaccttcgagccgaggccagtccggggcccactcctgcgcagcggcagcgatgcaggcgaggccaggccccccacgccagccagcccccgtgcccgtgcccacagccacgaagaggccagccgacctgcagccacttccacccggctcttcactgacccgctggcactgctggggctgccagcagaggaaccagagcctgccttcccaccagtgcttgagcctcgatggtttgcccactatgacgtgcaaagcctgctctttgattgggctccgaggtctcaggggatggggagccactcagaggccagctctgggaccctggcttcagccgaggaccaggctgccagctcggacctgctgcatggggcacctggctttgtgtgtgagctcgggggtgagggtgagctaggcctgggtggaccagcatccccacctgtgccccctgcactgcccaacgcggccgtgtccatcctggaggagccacagaaccgaacctcggcctacagcctggagcacgcagacctgggtgctggctactaccgcaaatacttctatggcaaaggtgaggaaaggcagttccagggagtggaggaggggggctgaagaagaggtccctgtcacctgcagtgcacacagtagggctcatgaactgtccatttcctgtaaagtccctggccctgggagggctcaagagctgagctggggtcctcctggacctactttcaaccaccttcttaaggctaatccctggctcctcacccccagccagggctggtccctctgcctccgtattggttcatcctccatctggttcaacctgccaggctggggagagattccctatgggcttttctgtggggtgaaaactcaggcctcaaatccctgcatccgtgaaccttgttcgcaccagcactgcggagagagggctccaggacatagaagggagaatgagggcgtggtgggtggagccaaggcaggatttaggcctgggagctggccgcgtgggtctaggtctgggtctgggtccacctctgggtcagggttgagatcaagatattgagctcggggctacagaggggcgggacttagtctagggtcaacatttggtggtgagatgaagcctagggcggggcttagtgatgcgcgtggtcgagcgggggcggggctgccagagggcgggaccaatcgttttcttcggcgcggtcccccagaacatcagaacttcttcgggatggacgagtcgctgggcccggtggcagtgagcctgcggcgggaggagaaggagggcagcggagggggcaccctgcacagctaccgcgtcatcgtgcggaccacgcaggtgggccgggatcgcgggatcaggacgtgggttgcctccccgacaccttgtatgcatcctgagtgcccttacaccccttcctcagctccggacactccgtggcaccatctcggaggacgcgctgccgccggggcccccacggggtctgtccccaaggaaacttctggagcacgtggcgccgcagctgagccccagctgcctgcgcctgggctcagcttcacccaaggtaccacggacgctgctcacactggatgagcaagtggtgagtggcgggccgcggagcccccagccatacagctggccccagtctgaacccagcctgcccagctcccaaacccctagccttgaccctgatcctgggctgggtggtgaccccagaagagctggcttttcagagacagggcatcagagttcatctggagccttgcgtctcaaagtgagctctgtagaccagcagtatccacatcatgtagaaatgcagattctggggccccaccccagaccatctgaatcagagtttgcactttatttatttatttatttatttatttattttgagatggagtctcgctctgtcacccaggctggagtgcaatggtggaatctcagctcactgcaacctctgccttccgggttcaagagattctcctgcctcagcctcctgagtagctgggattacaggtgcatgccaccacgcccagctaatttttgtatttgtagtagagatgggggttttaccatgttggccacgctggttttgaactcctgaccttgtgatctgcccacctcggcctcccaaagtgctgggattacaggcatgagccactgcccttggcccagagtctgcattttaaaaagatatttgcagccctagatgccctggtctgactcaccccactggtcctgcagttcccgcatcattcctggccaatttcccccacagcccctgctgggtttcctctaacatgtggtgctcacagcttcctggagcggctccttccatcccccactccatgctgaaagctgcccattggctgagtcttctcctctgtatcattcaacccatcagtcattcaacaaacatttcttagacctttttggtgccaggcctcagactggatgctggggacaggtctagaccaggtgctttgcttgagtagctcacagctgggtgggagaaagagacccacagagaactgctgaaacacaggagcagtactggaacactgaaagggaatgttgagggctgcctgggccacgacggtagtgatgagagcccttccttggccagggttttccagcatggagaacacaaaagggctcaggcccggataagcaggtgttttctggtcagaaggaataacttgtgcaaaggcttggagaatgagagcatggcacattaggcagtcagttcagcgtggctggggttgggattgtggggaggggcgggggagaagcttgcatttgttcccgtggacactggggagccatggagggatacggtgcagatctgagaggggcagctctctggctgcagcatggggactagactgtacggggcggggatgccaggctgaaggctattgcagttgcccaggctagacacagtggcagcgatagtggaggtgaagaggaggtgacagtccaggaaggactgggtagtcatgtggctgactggaaggggtgaagtgctaggatttcccagcttcttggcccccaggagtggtggtttaaggaggaggagcagggtgggggagtcacagcaaggtgagacattaggcagccggagaaaaaggcccggggtttggtaggccggtctgaatgggaggcggagatgggggtgtcatccttgctgcagccagggagggggaggagcatgggtggagaagaggcccaggcagaagagggcggggttcctggggccctaggcaaggtgagtttccagctatccccagtgccacctatggctgagagggtaccaggatgaggccacatctggggaccatatggggagtggggggtgcagggggttgggaggaatgaaatcgaagtggggactgtaagtgcagacaagtttagttgtagaaaagggaggtgaccgctggaggggagcctgtgctgtttggaggagttcagagcaccttgagctgggcatggttatccagttatccgcagagggaagagccgggaagagggcacagaaatgggagcatggggggcagaggtggtgcctggcctgcaggggctggggtgggggtgccttggattcaggggtgcagaggacagtccagccttgagataaggaggatgataatgtgtatgtttattggaagggtcctttctgtgaatcaccttctctactgccacatgggaaccagcctcctcccatcccttcctacctgtgcactcccaagcacgaggagcacaacagactgtactcacctgacaggcaagggcacaagtggctcagagagggctggtgctcagccccaggccagcgtcccatccattccctaagagctggtggggtggggctgcaggggactgagacctatgccttctgtctcccacccacagctgagcttccaacgcaaggtgggcatcctgtactgccgggcgggccagggctcggaggaggagatgtacaacaaccaggaggcgggaccggccttcatgcagtttctcaccttgctgggcgatgtggtgcggctcaaaggctttgagagttaccgggcccagctagacaccaaaagtgaggcccaggggcaggaggggtgggagcagatctgtgctgaaggggtgagcacaaattgccttgtcactcctttgtccgtacaatcctggggctggggactggagagttctttgggtgagctaaggatctgagtcagggctatgagggccaagctatgggctgaaaagaggggctgggactgtccctcaaggcccaagtaccctactgcctgagctggggctaaagtggtttgggggcactacccctccaccaaacacattccagcagctcagcctcgtggaagagaggtgcccctacctccctggtggaaggggccccaggacccctgggaggtgttgtactgagcaccccctgcctgcttttcactttcccagcatgccacacatgcttgggcctggagtgacacctgtcctcctaggacacctgaccctgccctccctctgagaccacttctcatttctgtcttcattctatttcaactctcccatcctgaccccccttcactctggcatggggctggagcctgtggagggagaggaggaggggcacccagggctgaggcccttgaatctcgctggctgggcattggctggtggcatgactggttgtccacctgctgtttggggcacagaggctcctgtgtacaggcaggaatggcaagttcaagccacttagattccccttgttttctccttctgtgtccctaacttcctggccacagcggattccacaggcacgcactccctctacaccacataccaggaccacgagatcatgttccacgtgtccacgatgctgccttacacccctaataaccagcagcaggtgtgagggggaccaacgtgggggtggggcttccgggaaccatggagggccctgcatggcccatgacgtttgagctttggccggagctctgttggccccaacagcccgcccctctggtggccccttcccaaagacagaaacaccctaggtcttcaccaggggcagtgggggagccattggtgccttggctttctcctgcctgaatgaggaggggtttggggcacagaagacctcatcacgagcccctactatccaacccctagctcctccggaagcgccacattggcaacgacattgtgaccatcgtgttccaggagcctggcagcaagcccttctgccccaccaccatccgctcgcacttccagcacgtgttcctagtggtgcgggcacacacaccctgcacgccacacaccacctacaggtgggcaccggagtggtcccaggtctcccgtgggcatggagtcctgccgcccctcactaacgcctccctccccgcagggtggccgtgagccgcacccaggacacccctgccttcgggccagctctgcctgctggcggaggccccttcgcagccaacgccgacttccgggccttcctgctggccaaagcgctgaatggtgagcaggcggccggccacgcgcgccagttccacgccatggccacgcgcacccgccagcagtacctgcaagacctggccaccaacgaggtgaccactacgtcgctggactcggcttcacgcttcggcctgccctccctgggtgggaggcgccgggcggcccctcggggcccaggcgccgagctgcaggcagcgggctcactggtgtggggagtgcgcgcggcgcccggggcgcgggtcgccgccggggctcaggcgagcggccccgaaggcatcgaggtgccctgcctgctgggcatctcggccgaggctctggtgctggtggcgccgcgcgacggccgcgtagtgttcaattgcgcctgtcgcgacgtgctggcctggaccttctccgagcagcagctggacctgtaccacggccgcggggaggcgatcacgctgcgcttcgacgggtcccccggccaagccgtgggcgaggtggtggcgcgcctgcaggtgagctggagtggtaaactggggcccctgcgcgcggcggggcggagcctgctttggacccctccctcccgccgcctttgtcccctactcctgcggaagggaaagtcgaggagggcagagccagccccggggcttggcaaggccggaactggtgccctcgggtaagcgacttctggtcttcatccctcgggcggtggcacacgcggccctcggggactgtggaaagttccgtgtggcctgggacgcagtccagggggcgggcgctggggcggccccacctcccggcagccccgcccactcgtcccgccccgtccgcagctggtgagccgtggctgcgagacccgcgagctggcgctgccccgcgacggtcaaggccgcctgggcttcgaggtggacgccgagggattcgtcacgcacgtggagcgcttcacattcgccgagacggcggggctgcggcccggggcgcgcctcctgcgcgtgtgcggccagactctgcccagcctccggcccgaggccgctgcccagctcctgcgctcggcgcccaaggtctgcgtcaccgtcctgccccccgacgagagcggccggccccgcaggtcagggtgccggggacgcggggaggtgggagggccggcagttggccaccgcgcagtctgcgcctcccgggtcgccatcagcagtttcaggaacccagtgtggatacctttccttctggaaagaatctcccgtctcttagcccgtctgagcctgtctcttcctgtctctgtctctctctctttctctgtccttccttcctctctctctcctctctcttttttttttttttgagacgaagtatccctcttgttgcccgggctggagtgcaatggcgtgatttcggcttactgcaacatccgcctcccaggttcaagcagttctcctgcctcagcctcccttgtagctgggattacaggcatgcaccaccacggccggttaattttttctatttttagtagagatggggtttcaccaagttggccaggctggtctcgaactcctgacctcaggtgatccacctgcctcgccctcccaaagttctgggattacaggcgtgagtcaccgcgccctgaacctctatcttcatatgtagaatgggaccagttaagcgcgttgctcccactgcttaaaagatcaaatagcagcccccactatctttttttttaagtattggcacccgcccacccaacacacacactacacactattgataacttcctgtgctaagccaggggtaggcaaacattttctgtaaatggccaaataataaatattttaggctttctggaccatctggtctctgccgcagctactctgtcgtaggtaaatgaataaataaatgtgcctgtgtctcgctaaaactttatagacactgaaatttggattttacatgattttaacttatcatgaaatattcttttgatttttccactagttaaaaatgtaaaatccggaccgggcgcggtggctcatgcttgtaatcccagcactttgggaggctgaggcgggtagctcacctgaggtcaggagttcgagaccagcctggccaacatgctgaaacccgtctctagtaaaaatacaaaaattagccaggtgtgatggcaggcatctgtaatcccagctacttgggaggctgaggcaggaaaatcacttgaacccaggaggtggaggaggttgccatgagctgtgatcgcgccattgcactccagcctgggcaacaagagcaaaactccatctcaaaaaaaaaaaaaagtaaaatccatgcttagctcgcagtacagaaactggcacatctgctttagaaaagaaaaggaaaaggcacaggctggatttggctacagacagtagttttgggatttaagcaatttacacgtgttatttaaatcctcacagcacactatgaggttcgtactattatccccatttcacagatggagaaattgatgttcagagtgatttgcttgggatatacaggggcagcactggaatttgaaccatggtctggaaaaatggccagtaaccaggcagacatttttcactgttgtcaggatgccggggagctctcctgctcctggaagtgagcctggcgggctgggggtggggctagtgatgcaggacgctggggactggagaagtcctgcctgaccctgtcccaccccacaggagtttttcggagctgtacacgctgtcgctgcaggagcctagccggcggggggccccagatcctgtgcaggatgaggtccagggggtgaccctgctgcccaccacaaagcagctgctgcacctgtgcctgcaagatggtggcagtcctccagggcctggggatctggccgaggagaggactgagttcctgcacagccagaactcgctgtcaccacgcaggtgcacactcttggccttccctctcctccaggcctctgggaaagcggcttccctttctgagccacccctgctctccccagctctctgtcggatgaggccccagtcctgcccaacaccaccccggacctcctcctggccaccacagccaagccatcagtacccagtgctgacagtgagacacccctgacccaggtgagcagaaaccaggctctggagcccaacagcacagtggtgacagtgggcatcactgaatctgtatccacttctgtggcacaggacaggccaggcagtcccagtggctctgaggacaagggcaacccggcgccggagctgagggcctcctttctgccacgtaccttgtctctgcggaactccatcagcaggagtgagtctggacccaggagagcaggggaggggttggggggtgctcctgggcttccctagctcagcctgctccttgtgcccacagtcatgtcggaggcgggcagtgggaccctggaggacgagtggcaggccatctcggagattgcctctacttgcaacaccattctggagtcgctgtcccgagagggtgaggccaccagggtgctgcggtaagcctgggcagtgctcttgccccctttctgacctgcccacctgatccctttgtccccacaggacagcccatcccagagagtggagaccctaagggaactccaaaatctgatgctgagtaagctccccaactccccacagccgctttacctgcccacatgacccccccttcgtgcctgtctgctggggtggagctctgtcctgggctctgctgccacatatgcctagaagaccagcggggcccctctcattagctggggctgggagtcagctggtgcactgccccctgccttggtcctgctgagtcttgacccccatgtcttcaggccagagcctgggaacctctcagagaaggtctctcacttggagtccatgctcaggaagctgcaggaggacctgcagaaggtgaggggtgggctgagcttggggggagtcacagggctgccccaggaaaggggctggcggctctgactcctgtctccccggcaccccaggagaaggcggacagggcggccctggaggaggaggtgcggagcctgagacacaacaaccggcggctgcaggcggagtctgagagtgcagccacacgcctcctcctggcctccaagcagctgggctcacccaccgccgacctggcctgagccgtctggaaccacctgggcccctgagggcactgtggtcacactgggccctcctcaggaactctccctgcgcagaggcgtgtcttagcactgcccccctccctagccccttatttggtggcggaagtggcctccaccccttccctgtttgtaaatattctgtggagaaaagaggacttcagggagtaaaaaagccactgatgtctgtgtctgaa

SEQ ID NO: 333 - DNA, 6736 bp, Homo sapiens
  source 1..6736: mol_type = genomic DNA; note = NC_000001.11:206897404-206904139 IL24 [organism=Homo sapiens] [GeneID=11009] [chromosome=1]
tcagcccccatatatatgcccaaatctccacaaagccttgcttgcctgcaaacctttacttctgaaatgacttccacggctgggacgggaaccttccacccacagctatgcctctgattggtgaatggtgaaggtgcctgtctaacttttctgtaaaaagaaccagctgcctccaggcagccagccctcaagcatcacttacaggaccagaggtgagcatgggggattcttggttacttttttttgaaggactagacctctgctttatttgtgaaaaggggtcaaggtggggacagcagaagtcaatttttttgagtgttgatgtagggacaagacatgactgtgatgaggagctgctttcgccaatttaacaccaagaagaattgaggctgcttgggaggaaggccaggaggaacacgagactgagagatgaattttcaacagaggctgcaaagcctgtggactttagccaggtgcggtggctcacacctgtaatcccagaactttgggaggctgaggtgggcagatcatttaaggtcaggagttcgagaccagcctggccaacatggtgaaaccctgtctctactaaaaatacaaaaaaaaattagttgggcatgtgtttttgatattttcagatacaaaaatcccagctacttgggcgactgaggcatgagcatcacttgaacctggtaggcagaggttgcagtgagccgagatcatgccactgcactccagcctgggtgacagactgaaattctgtcaaaaaaaaaaaaaaaaaaaaaagcctgtggagtttgaaagaacagaatgaaaagacattgagggagatgctaaagcatagcccccgtcccccgtgacccataacccaggggtcgccgcctccctagcccaggtaccagcagaaccgggtcttctctggtcttcctcccggtgtaggggtgggaggcagtttctttaggtgtcagaccagtgcctgcagtaagaaaggttcttaaatgattgtgtaaagaagtacgaaagaaagggagaaagtaagaaagggagggagcgagagaggaaagaaggaagaaagaaaggtaaggagggagggagggagagagggagggaaaggacaaagggcaaagaaggcagggggaaagaaattctctgcatcagttataataaatacataatggcgttaggttccccagcttggaggctcttcactcagtccttcccaactggcacttcagaggaaggctttagagatgattcatctggaaatctgatgcctctctctcatttggttactaaaaaaagtgaatttttagactcaagagtgagtggttagtggaggtggcatagtctgtgtgtgaccctgacctgccctctgtgcccctccctgggaccaggattaaccccttgctcccttgtgatgaggagtgagggacagccgtctcctggggaggagaaaaagacctgccagcctatgtgtgcctagtggcttcagggcagaacttggataagcacatgtctagttcagctctttgttttcctgggtttgggctccccagacgtggcacattagaacctcccatttctccactcttctgggtcaaattctgactcgcaggttgtaggctagagagaactgcgatggagaaggaggaggtgcagggcgtgtgggtgtggacgggcaaggtggggaagagcaggtggacagatggcaagacgagcggccttaagtttgaggggcagaaagacccctgcttcacccccactgcaccttagcaaggctgccggtttgcaatagtctcaacttgcccattggagagtgctcgagattggcccggggagaccctcggagcattttcccagggcatgtaactctgggtcagagggccggcctcacaggctgcctccctttctttcagcagacccttctgccctcctttgctggcgacagcctctcaaatgcagatggttgtgctcccttgcctgggttttaccctgcttctctggagccaggtatcaggggcccagggccaagaattccactttgggccctgccaagtgaagggggttgttccccagaaactgtgggaagccttctgggctgtgaaagacactatggtgagtaaagtgctgttctggacccagtcgtgggggttcctgggggcagtgggccagtggggcgaggggatgctattttatgattctggagtccttcacagcttgctaatcagtttccagtttcccatataataactctgtgaggtcagaaggcaccacaagccccatttacacatgaggaaattggggctcagaaaaaatgtgggcagcctcgagtgaaataagcagtgcccaagggaaaccatgaagagagctagattcatccaggcttcgtcccgaatagagtcttcggctctaaatctgagaactggaatgagtggctgggctgtggaggaagctccaagggcaagaggcagctctagggtgcaggctgtcctccctcacatcctgcttcctcaccacatggaatatggagccaaaatcctgcccatagtggttcttaaagcagataggcttatttcctcccatctcaaatgaccagaggcatcaaactgcttccttatcaaatctatgttcatgctctaagaataagaagaactcctgggactccatttgctcctggggggccaagcttagtcattttcgtggctgcaaccttgtctcccctccccatgggccagctcagcccagtccttcctgggtcctcttttggtccctctggcctttgagatctcacagactagatagatttaggggtctagggaagcagcacatatttgcagagttggtttctatgctgacccctaacctggagacgtcttttctttctgtttgccaagcaagctcaggataacatcacgagtgcccggctgctgcagcaggaggttctgcagaacgtctcggtaatcagacctcggggacaccaccctctgtgggacgggtctactgtgggtgggagtgcaaggctttcttaggggaggttgatgaaagcccttcacttcttccctggactgaccttacacaggacagggccagactgtgagccagggaagtcagtgtctggggttattgctatgtggtatgtgtgtgcagtggtactgggagatggggaaggtggaggcttgtaaacatctttctccatttagccagagaattatatatttctcttttacttgtgtaggcccaataggcatctacttaggttcatgtcctctcttccattttcatccttttctctgggtcctttttcctgggtcctcctttggtccatctggcctttgatgtctcatagactggatagatttagggggtccagggaagcagcacatatttgcagagctggtttctatgctgaaccctaacctggagacatcttttctttctgtcatgtgagctcatgtgaagtgagctcatgacttaaaataatacctaacaaaaggattcatcctttctttcaccacaatcaggtagagtatgttatcaaggatgggtcaccatcttctcatcatccatctagtgggcacaaacctactgagccctgagccctgaaagatgtggcacttcaggagcttgagggggctagagtgcaattgctgtgtccaaagatattagtttctcctcatttcttctgttctcagtcattttccagcaaactctatatcaccaagtccaagttcaagcccttttcagggtccatcacatccccatagctgttaaagaggccatgtggcatagaagaaagagaatattaagcagatgggcagtcaggaatcctgggagctaggctgtgtctgccactgattgactatgtgaatcgggccaggtcatttctctccctgggtcttggttcctcctctcaaacaaagacctgctctccatggcccctgaaggctcctacagatctaaggttcatcatcaccttctagaagatccctatctctgctgtgcttatcttgccttgggtggcatgtgggttgttccttcagggggtcagggtgggcagaggccttggctcagcagtgacccagaccttccccaggatgctgagagctgttaccttgtccacaccctgctggagttctacttgaaaactgttttcaaaaactaccacaatagaacagttgaagtcaggactctgaagtcattctctactctggccaacaactttgttctcatcgtgtcacaactgcaacccagtgtgagtagcacacgctctggatactggcagctctgggttcaagtctaggtctgcttccaatctgctgggtgaccctctgcaaagtcctccacctccctgggcttcagtttgttatctgtaaaatggggatgatcactcctgcctggcaggattgctgcgagaattaaaggaggtagcccctttcacaaggtgggagtttggtattggttaccttggggaatgcaggattcagccctgggctctcaggctttgggagaccctgtggcatcagcaggaaaactgagagggagtttgcatctgctcctatctaaaaattggcacaacttcttttcccatgttatgtagcaagaaaatgagatgttttccatcagagacagtgcacacaggcggtttctgctattccggagagcattcaaacaggtaaggccaagagctgagagcttgcccatccagcagaatagactagtctgcaccatcacacgagggcgcctcagagacccaatgcagaatgtaatgcaggggacaccatcagctttgctccaaagccccctgacttagcaggagcacagttatatttgcagaagcatcgtaaactaagtggtcttttttcttccagttttcaagttaaagtgcttctatatttccctacaagatgattttacgaaaggaactttccctgtgttttgtaggtacttgggctgggcaactgaagtcagaagagagggagaaagaagggagacaccccacccccacccccaccccatacacatctgcagtattttccatgatgctcaactggtctagttgtgaaaaacaattatgggaaattatttttgcttttccaaaattatgacaacaaagaaaacccaaatttcatccccagcccccctaaaaacataaatgatttcgatcacttttttttttttgaggaagagatgcatcagcttttaaataaatggtgaagagcaataacatctgatggagaggggccacctgggctcatttcacctgtgcagtggattcaggtggtgggccatatccatcccatactgcagtttgtggttgctgttgttaggggtgccatatgtctttcccttgttctttgtccactgatattcactagcctgtttgtcctcacccctgaagcagataaacacatgtagatggaggaaaagtgacaggcaggtgggttcatcagtgggctcatcccaaaggtgacccatcccttggattggagtcaggtctattttaggcatggcaggttggaagaaagactattctcatagctaacatggctgaccttcaaccctcttttccctttagttggacgtagaagcagctctgaccaaagcccttggggaagtggacattcttctgacctggatgcagaaattctacaagctctgaatgtctagaccaggacctccctccccctggcactggtttgttccctgtgtcatttcaaacagtctcccttcctatgctgttcactggacacttcacgcccttggccatgggtcccattcttggcccaggattattgtcaaagaagtcattctttaagcagcgccagtgacagtcagggaaggtgcctctggatgctgtgaagagtctacagagaagattcttgtatttattacaactctatttaattaatgtcagtatttcaactgaagttctatttatttgtgagactgtaagttacatgaaggcagcagaatattgtgccccatgcttctttacccctcacaatccttgccacagtgtggggcagtggatgggtgcttagtaagtacttaataaactgtggtgctttttttggcctgtctttggattgttaaaaaacagagagggatgcttggatgtaaaactgaacttcagagcatgaaaatcacactgtcttctgatatctgcagggacagagcattggggtgggggtaaggtgcatctgtttgaaaagtaaacgataaaatgtggattaaagtgcccagcacaaagcagatcctcaataaacatttcatttcccacccacactcgccagctcaccccatcatccctttcccttggtgccctccttttttttttatcctagtcattcttccctaatcttccacttgagtgtcaagctgaccttgctgatggtgacattgcacctggatgtactatccaatctgtgatgacattccctgctaataaaagacaacataactcaagtctggcagactttcttctctatttctggatgaatgcccagtgagactgtgttgtacagctagaaaaggccttcttcccaatagcaaggctgtgcatctagcctcaagctctggctgaactttgtggtcgacatcaatctaaagatacagtgtctgactataaccttgttccaaaaacctaggcaaagagtatatgtaggaggtgggatatcacttccatgacataagtgctattgcagagccgtggccacccaggaactcctgactgctttcc

SEQ ID NO: 334 - DNA, 69535 bp, Homo sapiens
  source 1..69535: mol_type = genomic DNA; note = NC_000001.11:c25430193-25360659 RHCE [organism=Homo sapiens] [GeneID=6006] [chromosome=1]
gatgcccggggcgtgtgcggcggtgcggcccgggctccacgtccacaggctgggcagcgctgtgggccccgcgggcgccgagtccgcaggacccgcgagggcactaccgcgaagcatcggcctccgggccgggccgggccggaccgggagcctgctcggcgggtccgggctcctgcaaggcggggacgcggggccggcgacccttcacgcttcgtactcattgagcgccgattttatgccaggcaccgtgctgggtaatttgcgtgtatttgctcatttactccttataactcccctgccacgtacgtatggcaaagtaacacttagaaaagtccgcatggtgtttttttttaagagaaataaaaagaatgtttatcattagagaaaactggggaaaatgtaggaaagtggccgaaaaggaaaaaacaccaatgagtctcatcacattaacacaaatacagttgacattttattgtatttgcttgttttccaattttcccctatggatgataatgttactattgctattaaatagaatagtggtcatactagaatagtagtcatactagaatagtagtcatactgtttttaacataagcatttttacatgttttaatgcagcttttataaatatttctgaaaatattgcagaatgtcctatccagtagctttatcagtgtaatccctcaacgacaatggggcagttagtcttccagtgcatttttaaaacttcccaggaagggctgggcgcggtggctcacgcctgtaatcccagcactttgggaggccgaggcgggtagatcacgaggtcaggagatcggagaccatcctggataacatggtgaaaccccatctctactaaaaatacaaaaaattagctgggcatggtggcgggcacctgtagtcccagctactcgagaggctgaggcaggagagcgagactttgtctcaaaaaaaaaaaaaaaaaaaaaacttcccaggaagtagatgccattttgttttgtcctgggtttcacagaactctctctggcctgtaatcacccctcccttaatcaacatctaccccagggagaaactttacaccaaatgcgttgtcctcaatcatgactctgtgttactttcttctgctcacaaaccttcaaagatctcccagtgcctggaagagaaaacccattctgtttcgaagggcatccagagctggtcacagtggggacccaccctccttttccaggctacgccaggcaagcaaaccgtttttctcactatccttaaatccactgcaaccgatctttcccccttcctgcctctgccccaacacagtatctctgtcagtgccgcttctggtgtgtggtttcttaggcaaggcttatccatccacttaggcaaaaagcttcttggagatcaaatctataccctgcagagatacagttaagaaaaatggccaaagtacttgctttttcagagtagggctgaaattctagcttggccacttactagcttggacaagttactaaatctctcacagtctgtttccactcaggtttgttttaaggcttggaggacaatgagccttcagagccagacaagcagtaggtaacagaaagtaactgctgttagcagtatacttgtttctcatgccttaattctacttcagtatattgatcaagtggcaccgggtggccaagaaaacaaactctgtgagctcaaagtttcaccaaggcctgcccatcattgagaaaggatatgaacagaatgctatgtgtggagcagtagaaaaaagccttcagctgccaaggcagattggttcactgaggaagatacaggtgggaaccaaatcaaaatggaagcttaaaggcgttggggagcgcaggaacaggtacatggtaaagtccgggctccagcctccatgggaaccccagacttgaatatccctcatccccatgactgcagtgttccagattacctgggccagagactaagtgggatggttagatgagtaagccaaagaaaagatgagaggcactggggacacatgccagctttctgaggctcactgtctagcctactattaaatagaccctgacagggcatctcatgctgtggcaaaagtgcggagtggctgggagcaatggaggttgtggctgagagttactgttgagctctaggactatgtggaagcagagaaagggcagagaaaatctgagggtgatggctgacaaacaatctgaaggtctggaggtctaagttccaatcccaattcacatggcaactcactagtgtccttggttgagtcaccagcccaccctgtgccaagatctcctctggaggtggtgcttctagttctatgtttagaagcagattgtgctagctccattttacaaatgagaaaactgaggctgagaggaaacaaggtcacataataggtgtggtagagcaatctagctcaaagcacaagctgagcaagctgtggtgcctgtatatagctattgatgggtagagttggggtgagatgatgggaatggccttcttgccaagacccaaggagaggccagagcaggactgcccatctccatactcttcctctttcactcctccagacccagctcttttttccatgacccactctagcacaagcccttttggctccagccaagtgccagcctttttcctctgagtcctgaaatggccctttgggattctaagggcacagaagtgggcctcctgccagaaggccccagctccccacaccttcaccagtcaggaagcagagatcagcagtggccattttacaaatgagtgaaacaaggaagggaagtaatttgccctcattcaaaagaccaaggcctacagaggaatttaggcttgtccctccttctgggactttctgatgaagggatttgcacttgggcttcagctgagcccagaacagctctagaggccagatcattaaaccctgtttcacatataaggaaatggtattcccacctctgtcagcccgttcaatccccgcaagcccactagctgtcttgagctttgttcctgccctgtaagaatcacagaaaagtccaaacatttcgatggccacctcttaacacatgtacctgtatcccctagagaaacctattttttttttttttgagatggagtcttgctctgtcacccaggctggagtgcagtggtgcattctcagctcactgcaatctctgcctcctgggttcaagtgattctcctgcctcagcctccagagtagctgagactataggcacacgccaccacgcctggataatttttgtgtttttagtagaaatggggttttgccatgttagccaggctggtctcaaactcctgaccttaggtgatccacctgccttggcctcccaaagtgctggggttacaggcgtgagacaccacaccaggccagaaccatgttaatggaagatgttcactgtagtgtttagaacagggctagtttgggagaggactgaccaaacactttatcacatatccttaccatggaagtcagtgtggcatggaggatgattatacacagcactaactatggcagccgccactccaagtatcagatacattttgttttaatcctcacaacaatcctatgagatagagattactagcaccatattacagatgaggacactgtggcacagaggagttaaggcacttgcctaaggtcacatagtaacagagttgggaattcaaatccaggcagtctgctttcagtgcctgggctctttaaccaccatgttatattgttgtagaaagattttcctggcttggaaactgcttatgatatagagttcatgaaaatagcaagttaccaaacagtatgtgctgtgtaatcccatttttgtagggagaaaaacaaggcctaaatcgacaggaatagaaaaacatctgaaaggatatacactcaaaacatagtgctggtttttggagagactgaaatggacattttatgttagctttatgcatctgtattttcaaagtttctacagtaaacttgccaagcttgtgtgataatcataattgctaacatttatggagtgttttctacacatctgacactttatgcactgcctcgttgaatcttcacaacaacccagtgagattgacactgattttctgcctttccagatgaggaaacaggcacagagacactgactgttttacccaaggtcacacagctcattccaaagccagaatttgaaccaggttgcctaactccaaagctcatgtgtgttaaatcaatgaacgactgacttagctgcactttagccaaacgtgcccagagcaaggtcacacccttggcgtggacacatttccagggagggaccggaggacctcctacctcattggtcactgccagtgactgagcttgactcaggtaggagggcatggcaggtattctcagggagtctggtgtttacagaaaagtcatgattacacgtgaaagctgtgggctccctggcttgattcaccacacctgcaggaagcctggctgctcagaccagcacgccgtggacatagcaccacttgctcagcttcatttccgtaactcaggctgccaggcctgctgacaaattttcacgtttgtaataaccctgtgaggagaccagagtacatcttacttgactcataaggaaattgagactgggtgatttagtaacttgggaggcagaattgcaaagtgattagcaacacaagccatggtgtcagatggatctgggttaggtcccacctctgccgtttattagctgtgtggctttgggtactcacgccacctctctgagcagcagtttcctcttttgtaagcgtaatgatgcctacactcacaggcttgagaggaagatccgatgaaatagcatatgcaaaatgattggttccgtgcttggcattccagaaatggtagctgttattcagccaacaaatatttattgagcacctactatggacttccctggtgctgaggatacaacagcaaccacagcagtcaaaagtccctgtctttatgttgctcagattctcataggggaaagcagataatgaacaaatacacggccagacgcagtggctcacgcctgtaatcccagtactttgcgaggccaaggtgggcaagtcacctgaggtcaggagttcgagaccagcctagccaacatggtgaaaccctgtcactactaaaaatacaaaaattagcgcagtgtggtggctcatgcctgtagtcccagctacttgggaggctgaggaaggagaatcgcttgaacctaaaaggcagaagttgcaatgagccaagatcgtgccactgcattccagcctgggtgacagagtactccatctaaaaaaaaaacctaaatacacaagtaaaaatatagacttcgtcagatgctagtaagtgctgtgaaggaaactaaaaggggaacacaaggaacccttgtcaaggggagcagaaaggggagttgatgctgtccttttaaatagggcaatcagaggccaggcacagtggctcacacttataatcccagcactttgggagttcgaggcaggtggatcacttgaggtcaggagttcaagaccagccaggccaatgtggtgaaaccctgtctctactaaaactacaaaaactagccaggtgtggtatcgcgtgcctataatcccagctactcgggaggctgaggcgggagaatcgcttgaacctgggaggcggaggttgcagtgagccgagattgtgccattgcagtccagcctgggcaacaagagcaaaacttcatctaaaaaaaaaacacagcaaaaaagggcagtcagggaaaacttccctgagaaggggatggtggagtacagatccagggaggtgaggtggggagcaagccagtacagttgttccttgactttcgatgaggttatgtcctgataaagccatggtaagtaggaaatattgtaagtcaaaaatgcatttaatacacctaacctacggaacatcatagcttagtgtcacctaccttaaacatgcttagaacgcttacattagcctacggttgggcaaaatcatctaacacaaagcctattttatgataaagtattgaatatctcatgtaatgtactgagtactgtacggaaagtgaaagacggagtggtgggatgggaactctaagcacggcttccactgcatgtgtgttgctttcgcgccatcataaagttgaaaagcgttaagtcaaaccaccgtacgtcggaggccatctgtatctggtaggaggagtgtttcagacagagagaacagcaggtgcaatagagtgcttttttcccagcattttattatgaaaaatttcaaacatctaccaaaaaaagttgaaagacttgtacggtgaaaagccatacatctcacagctagaatcaacaattaacattttactgtatttggtttttgacttatctatcctagatcccttgtgctttctgtagcaggtgacctgccttgaagatttaaagacagaatatcgggaaatgtagtcagaaaatggggccttttataagagtcagaggggaagagcaaaaactctgctttcgagaaatctgtcgggagaggccaactgcagggatacctcccttttttaatgaaagcatttctgttctgcgaggagcgggatcctcttgtcaagcagtcagtccctgctgcttccttactggggcaggatcaggacgcacagggatttggagtgccttggaaccaaccaccacccacgctgtttgccagctggtaaacatgcctgtcaggtctaggggttggcattgcctggaaatctttagtgttcatcttgctgacatctggtgccctcgggtaggtaggtgcagttggctgcctggtttacagagcttgtactgggcccaggttagcaggggtcacatccctttatcccactgtgcaggggagttccttctcaggaaacccagtttataagaagtactgactgccagaaatagagcagagatcagaaccaggaggcaattgtgagaggaatggagacttctgacctctggggattggggtaccctcccccttaattgctgttggggtagcagagggcttagaagcccatgttcctagacttttagaattggaagaagacttagaagtaatctaggctgggggtccccaacccccaggctgtggcccgttaggaacctgaccgcacagcatgaggggtaggccagcgagcactaccgcctgagctccgcctcctgtcagatcagcagcggcattagattctcacaggggcacaaaccctattgggaaccgcgcatgagagggatctaggttgcgtgctccttaggagaatctaactaatgcctgatgatctgaggtggaacagtttcatccccacaccatccctccaacctcaccccggtccatggaaaaattgtcttctacaaaacccgtccctggtgccaaataggttggggacccctgatctaggctacagttaagtggtcaaacacccaggtcctgaagttaggctgcctgggtttaaatcccagctctactgcttactagccctgtgaccttgagcaagtcacttagtttttctgtgcctcagtttactcatttgtaataaaagcttaatagtacccatcccagtgtcatgaactaagttcatatatgtaaagtgcttagaatggtgcctagcaagtacttagtaacagttagctctgaaaatgtataaagcaaaattaaccaatgttttagtggtttgcagccaacttttttctatgcgtgtgctaacatattattttataagagtgggaatatattgtacatgctgttatataacttgctttttcactaaacagtctatcctctgtgtcagttttgataaaagcgttttcctcttgcttttcctgcatatgttcagaaccatcatattggtagcaagtttcatgtcctgcagttttcttaaccaaccccctgctagcggacatttaggttagtctcagttttttccttctgtaaataaagctgcactgagcaagaagtgaccgatgccaagtgactagatgaccttaggtatgacctctctgggtcttggtttcttggtctaaaaacaaaatgacaggattcgactgggtgattaaaatctcctctgatctacataggaattgttttcaagacatttctgcattcctctagtgacagggtgctcactacctcatgagtatttcagtggacaactgtaatggtcaataaagtatccactttccaccttccacttccctgtagctcctggccctggctttattctctggggctccacacattcagtttacactcagtggccagtggctggggccattgtagaaaatgaggaaactccaattccttccttcttttcttcctctttcatcccttcctccctccctacatccctctctctcttccttccttccttgacacttaccatgtaccagaccttctgccaggcacatggatgggagcacagttccgggaagttggctgcagggttagaactaagtcccaagccccgtaaagctcatgccaggggactggactgtccagtactgagggatggggatgctgaggctggtggccttcctcagatgcactgtagtgccccaggcagagtcctgggctgccctgtgaggaggtgaccagaggtagagcaacttcaccctaaggctggatcaggatcccctccaggtttttactagagccaaacccacatctcctttctcttctgccacccccccttaaaatgcttagaaacacatagatttaaatacaagttcaaatgtaagtaatttcaactgtgtaactatgaggagtcaattctacgtgggtcctatctgtatcctccccagggctcagctccattctttgctttcattcattctcattcaatacattgttgttaagagctcactgggtgccctctctgtcatgtagtaaggttttaaaaagaaagcctcttctgagcttcagtttccttatttataaaataggagtattgatccgttccttgcttttcttacaaggatatgctgaagatgactgaagtacagagtaaagaaggattatgtttgggtgtcaaaggaatagaatgccctctttcaaactgagcacagcaggaacctgtaacaggaacacagcaacttgttgaatgaatgacaatattggaaaacatacatttcctcccctccccatcatagtccctctgcttccgtgttaactccatagacaggccagcacagccagccttgcagcctgagataaggcctttggcgggtgtctcccctatcgctccctcaagccctcaagtaggtgttggagagaggggtgatgcctggtgctggtggaacccctgcacagagacggacacaggatgagctctaagtacccgcggtctgtccggcgctgcctgcccctctgcgccctaacactggaagcagctctcattctcctcttctatttttttacccactatgacgcttccttagaggatcaaaaggggctcgtggcatcctatcaaggtgagagttcattggaacagtggtcacaggagcaaatagcaggggcaggggcgggggaggcctatggttctccaggggcacagatgttcctttctacaaaatcccgaggaaaagattcccccatcttcttccgtagattgcaccgaaattcagtcaacaatgtaagctttcctttagaagcagcctgggcatgccctcttctgtgaagcctgccttgatttttcagcacagtgagaggcatcctctttggtgttcctcaaattccctctaccaaatggtcttcataattctctgcttctctgcttccccttctctctccttagtggcaaggattttttttatttttatagatttaggggatacaagtgcagctagcttatgcaagcaatttcatgttgttgggttttcgggttttgtttcctttttgtggcctctcgctcatttcttatttctttttgagacagggtctcactctgttgcccaggctgaagtgcagtggcatgatcatggttcactgcagccttgacctcctagtctcaagcaatcttcccacctcagcctcccaagaagctgggaccacaggagggcaccaccatgcctggctaaatttttttttttttttggtagagatgtgggtctccctgtgtttcccagactggtctcaaactcctggacacaagcgatcctccagcctcagtctcccaaagtgctggaattacaggcgtgaagcactgtgcccagctctcttgctcatatctatactagttttcttttggaagcttcagcctgttgctaccccccacccccacccccaccgaccccagctttcttctcacttaggggctgggaagtctgcatgctgtctataaatccagaaccagaaggtatggctgaaggggagggtaggatgatggttattttatattcagctaaaaatattcccagactgtgatgagacaactgtaaataagacagatgtccacaatggtgtgactttgcttttttaaaaatattgaaatgagtttcaggcatctcagtgggctgataggttgttgataatggacagggcctccttgaagaatgtccctgagacaaagttgaagcttgagcctggttgagtgcttgcttgttcctaggttgatatgaacggctagttaactggaagcaaagagaagtcatcctgggggccatggcagtgacaagtaggacttagggagggaagcccttataccatttaaggtgctggcccagagaggagccttcagtgacagacaaacaagagctggcacaattttaattcatttcaatttactttaattcatttcaatccaatacaattcaatgcattccattcattcaaccatgtatgacatccaatgtgggatccagacacatgatgattagaactgatatttatgagcacttactatgtaccaggcactattctacatgctttacattgaaccctcacaataacccaatgaggtgggtactattatgatcttcgtttttcatatgaggaaactaggcatatggatgttgagtaatttgcccaaggtcgctcagctagcaatagcacagcgtatttaaatttagccaccctggatttagtttccttacacttaaccattatgcatcatggccccattttacagtggcgttgagtcatttgtcatataacccagtaggtgtagcagccactattccaaccctgtagattgactctagggtccatgttctttacccctgcaccgtgctactaacgtaggtacaaaatgtcctcagaaactcactttatatggaagctcagaggagggtccacaacccaggcaggggagacgatggtgtcaggggaggcttctggagggaggtgcctgcccagccagctcttgaaggctcagtaggaattacctgtgggacaaaggcgggtcatccaagtgagggcacagtgggtgccattgcgtgtgcacacactagagcagactgagcttgggcttaacattgcattgccctgtagcctaaaaagagaagcaaggggctgggcgaggtagctgacacctgtaatcccagcactttgggaggccaaggctggagaatcacctgaggttaggagttcaagaccagcctggccaacatggcaaaaccccatctctactaaaattataaaaactagccgggtgtggtggcacacgtctgtaatcccagctacttgggaggccattacactccagcctgggcgacagagcaagacttcatctcaaaaaaccaaacaaaaacaacaacaacaacaaaaaacaaagaggagagcagggactgggtgtggtggctcatgcctgtaatcccaaacactttgggaggccaaggcgggcagatcacctgaggtcaggagttcgagaccagcctggcccatatggtgaaaccctgtctctactaaaaatacaaaaattagccggatgtggtggcacgtgcctgtagtcccagctgcttgggaagctgagggaggagaattgcttgaacccaggaggtagaggtagctgagctgagaatacgccactgcactccagcctgggtgacagagtgggactctgtctgaaaaaaataatagtaataaataaaaataaacagggaagcagtgggtggtagactcactgggctgcatacggagtttggcttcagtctgaggtccgaatagtaaacaggagcgcgacaagtttgggtttgggtcatggcggatgccatgccagggctggtgttgggcacaggggaaggggcatggcttgagacacaagaccagcgtggaggctgtagtgtagtattgacccgagggcttcaaccttctgatggtgtacacaccattttttgagcatgtaccatggttatatgttacactttaagtattactacattaatatattttgtatgttataataaatacatacaaattaggaaaattgaaagagatcagaatgaaatatataatattttcaaattactaatcataatggtgtcaatctccaggcagggtccattgctacagttgacgatagtggatgaaaattcactcctcagagtcttcttgataatttgaaattgtcttgattgacttgtcagatctgattagatcgacattttttaaatctcgaatgtgactgacagcttgtacaaggagaagtttcactctgcctttcctttttgttcacttgactgccattatttctctgcttccaatctgtgtttttctgcacgagttggttaagccattacttcattttgtgaaagtttgttgagttaaacttaggtaacttaatctgtcaatccacttaattgaattcagtcctggtaaactataatagattattcaaacctgccaattctaaaaagacattttgagacaatcaggaaatctgaatatagcatgaatatcttacgatatacaaggattattgttaattttgttaggtatgataaaagcatggtgggttttttttttgtttttgttttttaaggctctatctgttagagaggcacattgaaatggcatgatatctggggtttgctttcataccagaaaaaagaaaaagtagagaaggattatagaaacaagattggtctcatgtgacaatcatcagagtttggagatgggcacgtagggtcatcgtgctgttctctctgttttcatatatgctttgaaagttctgtaatagttaattaaaaaaaaaaaaaacaccctggctgagcacttagggaggccaagtggggaggattgcttaaaccaagaagttcaagaccagcctaggaaacatagggagacccccccccgccatctctaaaaaaaaaaaaaaaaaactgtaaaatttaacccagtgtggtggcacatgcctgtagtcccagctactcagtaggctgaggtgagaggcttgcttgagcctgggagcttgaggctgcagtgggacgggattgtaccacttcactccagcatgggcgacagagcaagaccctgtctcaaaaaaaaatgaaaatatttgaggtgaagcgagactgtaataacaaatttaaaaatataaataaaacataaaggctgggtgcggtggctcacgcctgtaatcccagcactttgggaggccaaggcaggcagatcacgaggtctggagatggagaccatcctggctaacatgatgaaaccccatctctactaaaaatacaaaaaattagctgggtatggtggcgggtgcctgtagtcccagctacttgggaggctgaggcaggagaatggcgtgaacccaggaggcggagctttcagtgagctgagattacaccactgcactccagcctgggcaacagggcgagactccatctcaaaaaaaaaatgaaaataaaaataaataaaacataaaaccctgccattagttgcaacatgaagaatatagagaaatgcgtatcaaatccttctcattggaccaatattcccttagggcaccttccaaagctaggagactcaaggctgtatgacatcctgagcaagtgaggggtggcttctgggtgaatctgaatattaaatatttgcagaattgaaaacttcacaaagtacctttagagatagaatagcctagatccatgtttctcaaagtgtggtccccagacctgctgcctcagcatctcctggaaatttagtagaaatgcagattctcaggccctaggccagacctactgatcagaagctctgggcctggggcccagcaatctgtgttttcacaagccctctgggtgattcttctgtgcgtgaaagttcgagaattcctggagctagactgattcaaatcttgcctctgtatcttagagaccttgggcagattagtcaacctctttctgcctctgtttctacttctgtcagaggatgatagtacttgtttcattaagttgttgaaaggataaatgaattgacacacataaagagtattagcttttattatcaaaagctttttttttttgagacagagttttgctcttattgcccaggggagtgcagtggtgcgatcttggctcaccgcaacctccgcctcccaggttcaagtaattctcctgcctcagcctcccgagtagctgggattacaggcatgcgccaccacgcccggctaattttgtatttttagtagagacggggtttctccatgttggtcaggctggtctcgaactcccaacctcaggtgatccacccgcctcggcctcccaaagtgctgggattacaggcgtgagccaccatgcctggcccaaaagctttaatttcttaattttttaaataaaataaataaaactagaattgcttgttttcttccagctaccctggtgattgtattgagcattttctggggtgtgtgttctttgctgtaatgactactggtctggatgacctgtgatgagaccagatgggcaggggcagtggaggagattctagagatatttaggagataaagtcagctgtacttgatgaaaagagtggggagttaagactggctgcagatgtatgatttggcatagagaggtgccagttcctgaggtgagagacagaaggggagggacaggttgtgaggatgaatgaacaatgatatgttcattctgggcttggagttaaggggcctatgatatgcttaggggaagcagagagtatcaattacctattgctgcataacagccaccccaaacttagtggcttaaaatagcaaccttttaatttactcatgatcatgattctgtggtgcaacaactgggctgggttcagctgggcagttcttctgttagtttcacccagggtcattcatgcatctgcagtttggggtgggatggcctcagatgacctcattcacatgtttggcaattggtgattcactgggggccattactgtaacaatcgcctaccaggcagagcttccctaaggctaccaaactgggagactatcctgggtcctgtgctgtggataccactcagtcccccatccccaccccatactcctcaaaggcagagagaggggctactagaagacagaggagttttcccagtgacatgtaaacactccaaaccctggcaccttccacactgcagctttggtctgcccctttgggaaatctctgtttttcttcccaggctgctggaggggtgagagtcgccggtagagtagaggctgtgggcgaggaggtggcggcctcctgaggctgcagtggtctttccaggcagcagtgggagcacagggtggaggtcaaccctagagcctgggggagtgaagctggttctgccttcagagctcttggtgctgaagtttctgcaggccagagggaggggcaagagtgggagggggtgcagatccagaatcacagaggcagctgaccggaggaggcagctgcccaaggggatggactcagaaggccaaagtgctgttatccaaacgaactctttgcaagtggtctctttgcaacaggcctgggggagagcagtcttgcctaaagtcacaccgctaatcagcggccggcacggggtaacagttactaacactcactacgtacccaatgctgggcaaagtgacttgcatgagccagcgagctcaatgctcatggcaatcctctgagcagctggcattgtttcatctcaattttacagctcaggaagctgggacacagaggaagagccaggctctgaacactgacaacctgattgagagacccacactgttcatcaccgttacgctatatatgctgtatagaaaggcaggatggcataatggttaaacctaggtaggtagggtttgaatcctcctgctaccatttactagctctgtgacttggactagttatagcacctctctgtgcctccctttccccctctctaaaatggggataataaatcgtacctcctacctgaggctgttgtgggctaagtctgtaaggcacgtagaacagtgcctggaacgtggggtactgtctatctgtgtgcctgctgttacaacaatggtgagtattgccttatctctcgctgctgaactaccaggttagacttctttctgcaagtcatgaggctttcataaacttttcctgaaggctttccgtagaatgtacaattcccctctgggcccaggcatgggcgcccgggtaggacatccacttcttatcacccctgaacaccttagagcccatcagcttatcaaaccagcagctgatgtgagtgcagagcagactgtgagaggtggaggctgataccagtgaggatgctccaagctgggacccagccctgaagcgggagcccagataatggacgggtggaaatgggcctggagcccaagagaggtgggaggatgagggggcagggggaggagaagcctgaaatcaaatgttatttcctgaccagtttggggtgcatgagctctgtcaacagctcatggaaactgctgccctaatttcatcttgttggctgaggcacaattcctctctcagggacagtgtagagccttggggaggaaggccctgagcgcatatacctggaatcagggaatcgggatcaggggcagcagctgtgcccgataaagcccccacccaggatcctctgacttcctcatctctctttttttttgagccggagtctcactctgtcatccaggctggagtacagtggtgcgatctcggctcactgcaacctcagccttctgggttcaagcgattctcctgcctcagcctcctgagtagctgggattacaggcatgcgccaccatgccaggctaattttgtatttttagtagagacgggatttcaccatgttggccaggctggtctcaaactcctgacttcaagtgatctgcccacctcagcctcccaaagtgctaggattacaggcataagccactgtgcccggcctttttttttttttttttttttttttttaaaaaaagggtctccctctgtcgcctaggctgctggagtatagtgatgtgatcgtggctcactgcagccttaaccttctaggcacaagccatcctcccacctcaccctcctgagtagctgggactacaggcacttgccaccacgcccaagtaattttgtattttttgtagagacaaggtcttgctatgttgcctaggctggtcttgaactcctcagctcaagcaatcctccttccttggcctcccaaagtgctgggattacaggtgtgagccaccacacctggtctgacttcctaatctttagggccccaactctgcccttatccaggcaactctcctctccccatcttccactaacttctttggaatattccagagctgtaaaagccttagagagtatcaagtccaactcctatgtgttacagacagggaaactgaggcctaaagagggtaatggacttgcctaagatcgcttagtgaggtgagagaagaaagagctagagacagcctagcctgtgcaaggacatagttccaggcattcagagctgcgctctgctgccggcatgtttggggcctggtagttagttcactgctgaactaccaggttagattttctttctccaagttgtggggctttcataaacttttcctgaaggtcttccttacaatgtacaattctcctctgggcccggtcatgagcgcccctcacaggctctctctggtccccttctgtaaaatgagaggaaaatggaagaattgctctactcatggaatcttcaataagtctggaccctatgcatatagcattgctacaaaatggcagatgcactttaacaatcgtgtttaataaaaggttggatttgcatatctgaagtggggcatgcagtctccaactgaacacaagcctcactgctcccacatgtgcactgcaccttcatatacatatttcctgcttggctcctgagggaatttgagtaatcccaagaggaacccctgtagaaaatgtcccctggtcacacacccccattcctaaggatgcaagcaggagatagaaacattccctgcacctccctccttgctgtcagaagaagtgcaaagagttgaatccttcctaatgcccacttctcacccacgccccaaatccccaggtcccgtggaggtccttgggggtctcctatatcctggtggtgtcaggttgatttggaaatgtcagtgtcctcccttgtcctctctggcagaccctgggtgtgtgtacgtttcaatggaagtgaatttaaatgtactttataaatcaaagactttttctgagactttggagagttccagtaatgagagcttctcattgttatcaaagccagggctggagaccagtggcaggtgagttcctattgctgtgattgtcatgatgatgttgatgaacagccactatttattgagtgttctccatgtgctaggcactgtactaaacattatttccttcggatgtcccagaaacctctcaggtggctctaattacccttattctgttgataaggaaagtaagcaacttagaagaccacagggctatgaagttgaaacacgtaaattgatattttattttatttatttatttatttatttattttgagacagagtctcactgtgtcgcccaggctggagtgcagtggtgcggtctcagctcactgcaacctccgcctcctgggttcaagcgattctcctgcctcagcctcccgagtagctgggattacaggtgcccgccaccacatccagctaatttttttgtaattttagtagagacggggtttcaccatgttggccaggctagtctcgaactgctgacctcatgatctgcccacctcatcctcctaaattggtatttttatatgtccaaaagagtcaactggtggcaatttagtgaggtttaatctaataggaaatgatagagctgggatcgaacagagctatgtgaactcaaaacctatgcttccccttccaccttttcgaaaaacattgtctaggctgggcacggtggctcatgcctgtaatcccagcactttgggagacggaggtgggtggattacatgaggtcaggagttcgagaccagcttggccaaaaattagccaggcgtggtggtgcgcgcctgtggttcccactgaagcacaggaggctgaagcacaagaatcacttgaacccgggaggcagaggttgcagcaaaccgagatcgcaccactgcactccaacctgggtaacagagagactctgtctcgaaaaaaaaaaaattgtctacatgctggttgcagaaaatttaaacactaaaactaaaaaagtaaaacatctcccaaagttagagacaatattcatgatgggaaaaaaaaaattcttcaagatttctctctctccagtcatttattcatgtgcgaaaacagttggtgattattgataagaagagggagggcagatggtgtggtagtccaaggcacaggctccagcagattatctaggtttaaatcttggctgtaggccaggccctgtggctcatgtctgtaatcccatcactttgggaaaccgaggtgggcagatcacttgaggtcaggagtttgagaccagcttggccaacatagtgaaaccccttctctattaaaaatacaaaaattagccgggcacggtggtgggcacctgtaatcccagctacttgggaggctgatgcaggagaatcacttgaacccaggaggcagaggttgcagtgagccaagatctcgccactgtactccagcctgggtgacaagagtgaaactctatctcaaaattaaaaaaaaaaaatcttagctctacccaccggggcaagttacataacgcctctgtgccttggttttcatatctgtaaaatggtgacagtaacagcacccatgtcaaagtgtggttgtgagaacgaaacaagatagtctatgtaaagtgattaaaacagcgtaggcacatggtaaacgcttaggaaatgtaggctgttataaagctcagagatgttaagtaactagatcaagaccacacagttagagagtgccacagtcttgatttgaacccaaatttgtctcgttctggagctcaagctgctaaccctttttcaaaactggaattaaaccaaagtgctcaccctccgctttgctgggcccctccctgccctcaggtgcatctcttccactcacctgccacagcagcctctgctcagggtctgagactgggaaaggtgagggctacccaggtggccctgatgttttctgccagccagctcaccaggtccctcgcagcaggcggcaaagggagggaggtttgctgtgaagattatgtggttcccaacaacaagagcactgggcctatctctgccctctcttttctgtgtgtcctgggacaagtcacttggcttctgtggctttattttctcatgtgcccagccagggggttggccctcatatgcaataacagcagcaatgacctttactgagtgtccatgtgcatcaagcacgtgtactttacacttgttcttattattaggtttaataatagaataattgccacatttactgagcactcattatgggccaggccctgccctaagtgcttaattagctttagctcctctaatccttaccttatccccacacggcatgttatgttatccccattattcagttgagaacattgaggctcaaagaggcaaagtaacttgaccaaatacttgtaaacgatcttgcatgccccttccagctgccatttagtaagactctaatttcataccaccctaaatctcgtctgcttccccctcctccttctcaccatctccccaccgagcagtcggccaagatctgaccgtgatggcggcccttggcttgggcttcctcacctcaaatttccggagacacagctggagcagtgtggccttcaacctcttcatgctggcgcttggtgtgcagtgggcaatcctgctggacggcttcctgagccagttccctcctgggaaggtggtcatcacactgttcaggtattgggatggtggctggatcacttctgggtcatagagggaatggaccccgaaaggacaggttccagaagatctgggatattgccccctctctgtctagcaccagtgctgtgcaatatttaggacatccttatgctaaaagattattcattgtttaaaattcaaatttaactgggcatcctgtattttactggacagccctactctgtgtatcacaaggaatccaggcctacattcctcctgcatcctttctttcctgttattgtcgattatgattttgtaaagttacataatcagtataagtttatggaaaacgtaagaaggaaacacgttagacagagagaaatagacatgccacacctagagagacattctattttttttttttcttttttgagacggagtttcgcttttgttgcccaggctggagtgcaatggcgctatctcggcacaccacaacctcagccttctgggttcaagcgattctcctgcctcagcctcctgagtagctgggattataggcatgtgccaccacacctggctgattttgtatttttagtagagatagggtttctctgtgttggtcaggctagtctcaaactcctgacctcaggtgaccggcctgcctcggcctcccaaagtgctgggattacaggcatgagccaccgcgtccagcctgagagacattctcttgaaaagaaaggactttcagccccctaaagctactagacaagaaatagccatgcctttattttcattaaattacctgtgctttgtttagatgcctttgtgtgaaatgctaagaaccatcacaactaatgtatggtgccagaagtcagaatagtggttacctgggcaggaggtggatattgattaggaaggaacacaaaatagccccatggggtgcagaaaatgttctctgtgttcacctgggtgatgattacacatcaagctatacacattttaaaagggcattggcacttaatagaaggaactaggctaaattttttcctgaaacattgttttgttttgttcaaacctctgaatctctcagctccccagatgatggtaaacgtcatcctaggcatcttagggacctctcaaggcctctcaaggccattccagcctccccttctaagaccctgctaaacctctgggcactgctgttaaacatttctctatgagccaggaactgtgctgagcactccacaaatattattttgtttaactcttccaggtagggatctaacctggtatacaggtaaggaagtggaagctcagagagggcaaggcacttgcctagggccacacagctaagtggtggagatggctctaacttttttttataaccttttccacatgctccagagtggtcagaacatgaaacacagtctagccagctcctgactggccctagaggaaaaaaactgtatgtatttttcttttttaaaaggtttagaggctgggcatggtggttcacgcctgtaatcccagtacttttgggagctgaggtgggcagatcacttgagcccaggagtttgagaccagcctgagcaacgcagtgagaccctgtctctgcagaaaatagaaaaatcagctaggcgtggtggtgtgcacccacagtcccagctacttgggaggctgaggcaggaggatcacctgaacccagtgaggctgaggctgagtgagccatgatcgtgccactttactccagcctggacaacagagtgagaccctgtctcaaaaaacagttttaggggccgggcgcggtggctcatgcctgtaatcccagcactttgggaggtgggggtgggcagatcatgaggtcaggagatggagaccatcctggctaactcggagaaaccctgtctcgactaaacatacaaaaaattagctgggcgtggtggcgggcgcctgtagtcccagccactcgggaggctgaggcaggagaatggcgtgaaccttggaggcggagtttgcagtgagccgagatcgtgccactgcactctagcctgggcgacagagcgagactctgtctcaaaaaaaaaaaaaccaaaaacaacagttttaggccaggcgcggtggttcatgcctgtaatcctagtactttaggaggcctagacagatggattacctgaggtcaggagttcgagaccgacctgagcaacatggtgaaatcctgtctctactaaaaacacaaaaattagctgggcattgtggcaggcacctgtaatcccagctacttgggaggctgaggcaggcgaatcacttgaacccgggaggcggaggctatagtgagccgagatcgcgccattgcactgtagcctgggcgacagagtgaggctccgtctcaaaaacaaaacaaaacaaaaaccatcttagagttaattcccaccgggattcaatacacacacacacacacacacacacacgcacgcacgcacgcacgcccgcatacacacactgcatccacctggaaagtgacaaagggcaccctggggggaattcaaatggtggtggccctggtttggtgttgctgccttagcttaaggtcacaccagccttcagcctcctgccccacagtctagggctgctcccttcatctgatgtccacagggacctgttcattcttgactcaatccaggaagatgagaagggagagaagtcactcgcagcctgagtgaactcccttgctccacccctgactgcttggatccccctaggggtgacccctgctgaaactggctccttcctgaccggttcccgtcagggctgtgctgatgggtggtgcccaggcctgcccctggggacggggtactctcccttggcaacactccagcttgtgccacttgacttgggactgatttggttctgttttgagtcccttcaggggaggggcctatcttattcaacgttgttgtttgttttcctcacatactgataacttagcaaatggctattggaacaaaaatgaaaataaatggaaccctgaagtgggatgttttaaatttttatttattatttttttagagacagggtcttgctctgttgcccagtctggagtgcagtggtacaatcatagctcactgcagcctctgcctcctgggctcaagtgatcctcccacctcagcctcctgagttaaatttttttacagacgcctgctaccatgcccggctaatttttgtgtttttagtagagacggggtttcaccaggtgggtcaggttggtctcgaactcctgacctcaagtgatccacccgcctaggcctcccaaagtactgggattacaggcgtgagccactgtgcccggcctaaaactgtgtttgagacagggtctcactctgttgtccaggctggagtgaagtggcatgttcatggctcactcagcctcagcctcactgggttcaggtgatcctcctgcctcagcctcctaagtagctgggactatgggtgcacaccaccacgcctagctgatttttctgtcttctgcagagacaggacctcactgtgttgctcaggctggtctcaaactcctgggctcaagtgatctgcccacctcggctccgaaaagtactggaattacagcctcctgagtagctgagaccacaggcacacaccaccacgcctagcttttttttttttttttttgctttttgtagagatggagtctcactatgttgcccaggctggtctcaaactccaggccttaagcaatcctcccacctcagcctcccaaagtgctaagattacaggtgtgagccaccattcctggccttaaaagtgtgatatttttaatgtattttgaaatctgcaggactctccctagaagataatagcaataaccaactcctttattgtgcttgacgtatatcaactcactttgcccttaccgtggctccagaggcattgggtccaccttataaatggaggcaccaaggcacagagtgattaaataagttgcccaggatcacacagccagaaagtgtctgagtcaagattccagcccaggcagcctagacctgagagcacgctcctaaccactgcacatcactgtcttagcacctcctcagcacaaactggcccttgaggaatgaaataccgccgccggcacacacgctcctgagttaagcctttgtcaatgaaatgaacacccacttaaaaggaataacctgtccaggcacgatggaacattgaataaccccttattctaaattcctggtccctgtaagactccttccccatgcccttgcccttttatgaccttcccctaaagtccttgaggcttaagcgggcatagtctgcagcaaacactggggaagctgagtccagacttcagagcacaggctttggatctaggccagctggatttgaacctcacatttgtgatcagctggcatgactgtttccaaaaagtccattttaatcctctacgtgaccctctgtaaaatggggatactgaacggtgagctagcacgattttacagagagtgaatttttttttttttttttttttgtgagacagagtcttactctgtcgcccaggctggagtgcagtggtgcaatctcggctgactgcaacctctgcctcccgggttcaagcgactgccatgcctcagcctcgagagtggctgggattacaagcatgcaccaccatgcccgggtaatttttgtatttttagttgagacagagtttcaccatgttggccaggccactcttgaacccctggcctcaagtgatccacctgccttggcctcccaaagtgctgggagtacaggcatgagccactgcgcccagccttatagggttaaaatttaaaagaggtgatgctgttacaagcctgttttacaaaatgctcttataataaatcattatcatcactgttgctgtggttgtagcatcatcatcattaactcccagagggaggagggagtctcagagcaagctgctcaggggagactggatgtccatggattgtccagctcagtaccacttcctccaggaagtcctccctgataagtccagtcagcatcaccctctccttccaatgaaccccactagccttgtgatatcacagatattcttagttgacaggctcatggtgtatgtagcctgtctagatcataagtacattttttttttttttggatcataagaaccttcaagaccaaaataattttctcctcctgagcatgctcattggtcaagggaaggaaggaatcgtaatagtgttaataaggctagtgtcttttcaggagttggttctttgtgccagtcttggtgctagacacaccgataggaagaatactccttcacatccccaggacaccaacatgggatacgtttgatcatcattcttaatttgcagaaggagaaataggctcagtgagatgaaatagccactccagtggcaaggctgggactggaagccgggcttgtcctgattccaaatccagtttctttccactgccacggagagggagagaagggacagtggccccagatgaggatggggtgactggatgtgggcaggcctgcgggggaagagtgccctctgttgagcatccgaatgatggcagcagaaaagaagactgggcagaatcccagttatcagatcccctgagggaacagtcaccccgatcaccctcagtcagatgagtgtgtgtagatcaatgcctcatagatgaaggcactgaggcacagagtggttaagtcatctgccagaccacatggctcagggtgcagaggccaccttaacgggagaagagatggtcactccactctgcagcatcagcgcccaggtgggtagaaatcttgtcttctatttccacagaaagtaaggtgcccaacagtgtttgttgaatgaatgaatgaatgaatgaatgagtgagaggcatccttccttctcagtcatcctggctctccttctcacccccagtattcggctggccaccatgagtgctatgtcggtgctgatctcagcgggtgctgtcttggggaaggtcaacttggcgcagttggtggtgatggtgctggtggaggtgacagctttaggcaccctgaggatggtcatcagtaatatcttcaacgtgagtcatggtgctgggaggagggacctgggagaaaagggccaaaagctccatttggtggggcttccggggttttgaaaaataaagacaacctgtaatcccagctacttgggaggttgaggagggaagatcacttgaggccaggagtttgagacccgcctgggcatcatagcaagatcctcatctctaaaaagtaattttttctaaattatccagttgtggtggcatgcacctgtagtgtcagttactcaggaggctgaggtgtgagttggaaggattgcttgagcccaggagttagagatgaacctgggcaatatagcaagacctcatctctaaataaataggtaggtggatagatagatagatagatagatagatagatagatagacagacagacagacagacagacagacagacaggctgggtacagtggctcacacctgtaatcccagcactttgggaggccaaggagggcagatcacctgaggtcaggagttcaagaccagcctggtcaacatgggggaacctcatctctactaaaaatacaaaatttagctgcgcatggtggcaggtgcctgtaatcccagctactcaggaggctgaggcaagagaatcgcttgaacccggagggtggaggttgcagtgaactgagatcgcgccattgcactgcagcctgggggacaagagcaagacttcatctccaataaaaaaaaaagaaaaaagaaaagaaaagattgatagatagatagatacccaaatgaggttacaaaagtgtggtctgtgcaaatgtttaaacacaacaaaccagtgcctttaactactacagtataatcctgtaggattgtgctattcatgatgtaattatggttgtataaaagtaattaattctcagagcctcaccagcagtgggtccagcaagtttgtacagccagcatcttctttcagtcagtgcgtgtcagtaactgcacatgtcctctcattgggagagcctgtcgaaagtctaagtttgaaggcagctgtgaaggtaaggccaatccaaatggctctcccagctcctctgctgtaaccctgaccctgagtgaggacatagccaaccttcccatctcataggtgagaaggctgatgcctggagaggggaagggactgcccaagatcacatagcaagatagtggcagaacccaagcgagaacccacagttccagcctggcttagaagaaagtgcactggacttggagtcaaaggctggggtgtgcatcccagctctgccataaatccctgtgtgactctgggcaatttaacctcttagagctttagtttcttcgtctgtaatatgagggtagcagtactaccacatagggttttgagggagtaattgaattaatcacatgaaatgatgcacgtttacaaaaaaaagcatgaagcccctttactgtgcctcagtatcccaaaggactttggatttactctgagaaatacagggagaactagggagtgttgggcagaggagagctatgatctgacttatgttttaagatactctggcttctgggttcagaaaagactgaaggggcaagagaggaagcaggtggagaccagagcagcagtgatggccatcatccagactcagactaggacaatagctgtgagggtggtgggaagtgattggatcctgactatattttaatagcagaattgacaggatttgctgatagactgcacgtggggtgggagagggtcaagatgacttcaaggttctcatctggcacaactcagcagctgctggtgccatttactgagatggggaacattggggtgggatagatctgggagggaaaacccagagttcagtgtcgaatgtggtagcgttagggttaaggttggggcgggtagagatgtgtatgaaacatcccagtggagacactgaatggagatgtacaagtctgaagcttagtggaaaggttagggctagggatataaatttgggagttgttacaatacagatggtgtttaaagccatgagacccaaggagatcactcaggagtgaggataaagagagatgggaagaagtctgaggactgagtcctagaacaccctgcattttagaggggggacatgtgtaagagccagcaaaggagacagaattgtgcttggagaggcaggaggaagcccaggagagcgtgaggtcctggaaggcaaggaaagagagggccccaggtgggctgaatgctgctgagaggtcaagtcggatgagggctgggaagtagccattggatttgacaaggagaccttggcatgcatggttgtagaggaggatgaaggcaaaagcctggcttgactgattcaagagcaggagatgagaaagtggagacagcatgcaggggcagccctgccaaggactttgctctaaaggggaacagagaaatggaggagaagcaggagggcaataatccgatagagaggaaaaatctgatgatacagaagagagatgaactgcaagagtcaagcctttgagttggaaagcaggagtgggattttgagcactgatacctttaggccgatgcagggacagttcatcttttttaaaattattattattatacaacattttatttaaaaatttattttcacagaatacattttcacattagagattcccattgtgcgaaaataacaatttattacttatagttttatatttgtggacagattgttttagaacaagtagaatacatttgagaattaaatctcagtttacaatgggtaatattttgatacgtctatggggaaacttgcccttaaatggaacttctgtatcttcagaagcactccaagcgtttcttcctaggatttagaaatttataatatgagatatcagcatttcctaattttaaaatttccctagtatatgtaaccatcggtaggtggtatctaccgactagagagggaagtttttgaaaattaaacactgtctaattttctgcaaagtttttattcatgaattaagagtatttcccttagtccattattcccaaggcaaatatggaagtttgatcatatgctaatcatactaaagctggattctctttaagagattgagaaattaaaaggcaaaagctgatatatcatgtttagttatactgtgagtcttataagaagctgggaggcaaccccattaactcaccagaatacagaactcagtctcacaacttaaatataattcctctcaaaccttttcctcaaagttaaattctgaaaataatcttgtgattaagagaagaaggctgtccaccaatggacttatctgttatttcttccttattgtgagcttaatggcatgacaaagcagaggcaaagaggcatacatcaattcttcaaagtaggaagtcaaaaaggtcagagcttccacagcatggcaacagctttgcagatgcccacatcgtgatagttgaaatagcaaagcccagcaaaggttaaagctgaaaatgccaaaagccctgccttggcagctttctgcgaggcatccccatgaacatagtcagtaacaacttgtccaaggccccagtgaccatgaagagtgagggctgcagccagggaatagtccgtcgcagagcaaggattcaaataagcagccggaagcagacccgggagcaaaacactgacaaccctctcgctagtccagtggagagatgcagccttggagccagaatggtggctcggtgacaagtgtatgtgctgcactccacaccattctgggataggtcggtcctgaagaaatgctgagatatgagcaggtctgaccactggagttcgcagcaacagagctcggcctccttgggcaccgcaaacggcactcagcctccagagaaccgccatctcgttcctgaggcggagagttcatcttaacgagagaaatggcagggactgtgaataggccggcagatttggtggcgggtgccacaggttcagtctcctgcagggagaggagaaaatgccttactaattccttgtattttctcagagaaacaagaggcaccgtcatcagcctcatgtgagggtgggaaggagggatggggtttgcggagagggaaagtgtggtatggtcatctgtgggagtggaagagagtgagagggctgcaggggtgcagcgggactgcaggctggcaccagggtccctagggcttgtagttggtggaaagtgcatcagtgaccagggctgtgtgcagctgctccaggcaggtgtggaagaagcagagttgaacttgcccagcctggagtgctgcccagagtgagcccaaagcccaagggagaccagagatggggctgtttgcaaaggaggaagtataacagtagcccacaaaatctgagctggttaagaaaggagagagagtgaaaatggggagcccagcctggcagcctgggtacacatctcagctcaacccacactagctgaatccatttgggccccttcgttgacctctctgtgcctcagtttccctatctatagaatggggataagaataaggctacttcctagggctgttgtgaggattgaacaagtgaccgaacacttgttcaattttgaatactgttctaaagcatttaggacagtgcctggcatggggtaagtgttgcggcagtgctgttattttcatcatcaccattgttctcaggctgcgttgattggagctgctgaagggaggcaatttaaggaagtgagccggacagataggaggtggtggtggttatcaggtgcgatgcttgaaactgaggcttcggaggcaacagttactggtaatgacaaggtctaaggcttgacagtgggtggcagaagtgtaacgcagggaaagagacgagcggtcaaggagccgagagggaaggagttgggtggactaagatcatttgtggaagaatgatggagagaaaggctgaagggcaggaactgacatcatcagtgaccaaggggcggccaggaggctgagaccgcagcaagaaagggagagtgtgatggcatcttcttcaagggagctggggatgtttggggtggaaaaaagaacaatggtctgggagggaatatgggaagttttttttttttttttcagatggagtttcgctgttgtcacccaggctggatggcaatgttgcaatctcggctcactgcaacctctgccttccaggttcaagtgattctcctgtctcagcttcccgagtagctgagattacaggcacacaccaccacgcctggcttacttttgtatttttagtagagacggagttttgccatgttggccaggctggtctcaaactcctgacctcaggtgatccacccgccttggcctcccaaagtgctgggattagaggtgtgagccaccgcgcccagcctggaagtttgtatttattaatttttggttgtcttcatctgtgtatgtgactttaacccctaaatacttcagtgtacatttcttttttttttttttttttttttgagacagagtcttgctccatcacccaggctggagtgcagtggtgtgatctcggctcactgcaacctccgcctcctggattcaagcaattcttgtgcctcaccctcccgagtagctgggattaggggcatgccaccatgcccagttaatttttgtatttttagtagagatggagtttcaccatattggccaggctggtcttgagctcctggcctcagttgatccacctgtctcagcctcccaaattgctgagattacaggcgtgggccaccataaccggcctcagtgtatatttctgatgcagttgggttctgtatccccctccaatctcatctcgaattgtaatctccacgtgttgagggcaggaccttgtgggaggtgatgggatcacaggggtggtttcccccatgctgttcttgtgacagtgagtgggttttcaggagagctgatggtttgaaagtgtggcacttcctctctctctttctctctctctctcacctgccaccacgtaagatgtgccttgcttccctttcaccttccaccatgattgtaagtttcctgaggcctctccggccatgccaaactgtgagtcaattcagcctcttttgtttataaattacgcagtctcaggaagtatctttatagcagtgtgaaaacagactaacacaatttcctaaaacaaggggacattctcttacataaccattgttcagttaacaaaaatgagaaattgacattgatatattatgattaccttattctcatttcaccaattttttcaataatatcctttctagaaaaaaatacatattttttgtggtcgaggattacatcttgcatttagttctcatgtcttattaaattccatcaatctggaacagtttcttcatctttctttatctttcatgaccttgacatgttttgaagtttcgagccagttcttttgtagaatgtgggtttgtctgctgttcctcatgattagattgtgggtatgcatttttggtaggaattctccaagagccgtgtgtgcccttcttagtatatcatatcagaagacatgctatcaatttgccccattactgggtgtgttaactgtgatcattgggttaagatggtacctgccaggatcttccactgcaaagttactattttcccctttgtaattaataaacatcttgtgaggagataatttcctatagaaatcctgttgatcatccaactttcacccactgattttagtgttcattgattcttccctgaataaattagtactataataattgccaatggtggttttctaattccatctttccttcaatagttggcattctcctgtaaggaaaagctttcgcttctctgttcatccactcatctatgtatttgtttatattaccatggactcctggattccggtttacacacttccattttctgccttttctctctgcttaatataaggattaatgagaactccctgattcccaggaagaaaatgtcaccagagctttcttaggtggaatgaagagaattcagtgtaagaaccataaaggtgtatctgtgtagtatggacagttttaaaaaacaaacaaacaaaaagaacctccaagggcaggaagtgctgccagactcaggagggcactagaactgactatgagaagccactgagatcccaggtagtctgtgctctccatcttttggctctgattctctctgtacatctaacatctctgtacaccagctttctctttagcgaaaaacgtgtcccctccacccacccatccacctccacttgttcctgcatttctatgtcccagatcctgcagaaaacaactcttttctctcagttagtctcaattctgtagtccagggagagagaatctgatcagtcccctgggtcatttttccactctggtccaagcagctacagctggcatgggaaatagttcacacagtaaaaacatggctgtcaagaagaggagtaaatttcagaggcagaacactccctgtgagcccgaacctcttcctgctttgttgcagtcttcataacgattgctttaaaagactgcattgatataacatcatctctcttctctgcatctttgacttgctagcttaactggtctagaggagggcttagcactgattttcagtattcattttcctcaaaacttcaattcagcctgggtttcttcagcaggagggctcgggggaaccagagccagggaccagagtcatttcagtgcaccagctcaagaaatgaatattccaggccaagaatccccaagtgttctttctgaagtccttcctggtggagctcaaagagatgaaaaacgcaagcccgcttttcagttcttatcaggaaactgcatagactttcctctttatgtatgactgagggctttttaccatcatttgttcacttcacagatatttatttggtatttactatataccaggcactcttgtggcagtggaaaatacaactctcgtggaacatctgttccagaaggaaagactgccaataagcaataaaataggcaaaagatatagcatgttagagagtggtaagtaccacagagaaaaataaaatggagaaaagaaacacgaaaagttggggagagaggacaactgtttgagggggtggccaggggcagcttcatctcatcaagggggtgattttttttgagtacagacctgaaggtaacgagtgcacaagccacatgggtacctgagaacagcggcagaacaatggcagggtgctgggagggctatttaccacccatgctgtttagaattgtcagcacatggtgataaaaaaaaaaataggctgggtgcggtggctcatgcctgtaatcccagcgctttgggaggccaaggcggatggatcacttgaggtcaggagttcgagaccaggctggggaacatggtgaaaccccgtctctactaaaaatacaaaaattagccgggcacagtggtgggcgcctgtaatcccagctacatgggaggctgaagcaggagaatcgcttgaacccagtgggtgaagtttgcagtgagccaagatggcaccactgcactccagcctggcgacagagcgagactccgtctcaaaaataaataaataaataaataaaaataaaaagcagacagactttttagttggctttagaattgttagacaccctctgcagacaaggcaccccgattgcttgcacccagggtggactactccctccatcctgcccttgttacaccctggctgggggtcagcatttcaggcagctgaatgacccaaagtgggaacacgctagtgggtttgaggatgagcaagtggaggagtgcaataggaggtgacgcccgagaggtcaggtgagagtggatcctgcagggtcgtggcaagaacctggaccttgactttgagtgacatgggagccgctggaggcttctgagcagaggagtaacatgatctgacttgcattttattttatttatttatttgacgcagtctcactctgtcgccgaagctggagtgcagtggcgccatctcagctcactacagcctctgcctcccaggttccagtgaatctcctgcctcagcctcccaggtagatgggattacaagcaagcatcaccacgcctggctaatttttgtatttttagtagagacagggttttgccatgttggccaggctggtatcgaactcctgacctcaggtgatccacccacctcagcctcccaaagtgctgagattacaggcttgagccaccacgcccggcctgacttgcattttaacagggtcactctgtctgctgtgtggagaacagtccgcaggaagacaagggtggaaatggggagaccagttaggaggttactgtaacaatttggggtagcggtgatggtggcttaaaccaagatggggtcagtgggaaatggtgctaaaaatcctgccaattctgggtatttttagaaagcacagctgacagctttctccagtagcccactaaataagttatgaagcattactaaaatgtgatagtcatgatgcaaaattagaatatatctagaatctcccgaagaccttagtttggtattacaagaagtctggttgcttcatgttgcaaaatttatatcactcatcactcctgcagagttaaaattccgctgagaagtaggaatcagtgaagtgcgtgtccatgtgggtttttgccacacctaagtgaaccttggtcaaaagcatataagagctactgataggccgggcgtggtggctcatgcctgtaatctcagcactttgggagggaaggatctcttgagcccaggagttcgagaccagcctgagcaacatagtgagattccatctttacacaaaatttaaaaattggccaggcatggttgtgcactcctgtaatcccagctacttaggaggctgaggtgggaggattgcttgagcctgggagttggagactacagtgagctgtggccacaccactgcactccagcttgagcaatggagcaagactctgtctcaaaaaaaaaaaaaaaaaaaaaaaaaagaggccgggcacagtggctcatgcctgtaatcccagcactttgggaggccgaggcgggtggatcgcctgaggtcaggagtttgagaccagcctggcaaacacggtgaaaccccatctctactaaaaatacaaaattagcccagcgtagtggcgcatgcctgtaatcccagctactagggaagctgaggcaggagaatcgcgtgaacctgggaggcaaatgttccagtgagccgagatcgtgccattgcactccagcctgggcaaagcctgctgggttgggctgggtaagctctgaacaccagtctcgtggcttcaagtcacacctcctaagtgaagctctgaactttctccaaggaccatcagggctttcccctgggcagaggatgccgacactcactgctcttactgggttttattgcagacagactaccacatgaacctgaggcacttctacgtgttcgcagcctattttgggctgactgtggcctggtgcctgccaaagcctctacccaagggaacggaggataatgatcagagagcaacgatacccagtttgtctgccatgctgggtaaggacaaggtggggtgagtggtctcatacttgggctgagcagaatggctcagaaaaggctctggctgaaaaaatctccctcctttaccaacttcccctgggtgtctgaagcccttccatcatgattcacttctttgagtagtgtttgctaaattcatacctttgaattaagcacttccttttagggacctctcttcattaatatccactagaaaggagagactcattatgtgtgagtttcaataagtttatccaatccctttgttttcaactgaaaggagggaaacggacaagtgaagaaggtagggcccaggagtgaaggaacaagggtgggaatagtaataatgttgtactttgaaaatctactgggaaaatgatgaacttagactgctgggagaggctaatagaaaatcgggcagtgagcttgatagtaggcaaaggactatcaggccacggggtcaagttaaagcagcacattcattaaaaaaaaaaaaataagcgtttgggccaggcgtggtggctcaagcctgtaatcccagcactttgggaggccaaggtgggtggatcacctgaggtcaggagttcgagaccagcctggccaacagggcgaaaccccatctctactaaaaatacaaacaaatcagctgggcatggtggtgcacgcctgtaatcccagctacttgggaggctgaggcaggagaatcttttgaatccaggtggtggaggttgcagtgagccaagatcgcgccactgcactccagcctgggcaacagagcaagagtccatctcaattaaaaagaaaaaaaaattaaaataagcatttgaccatcacagagcaggttcaggaggcctggggtatgcagatttcaaccctcttggcctttgtttccttgtctgtaaaatgtggttagctggtatcagcttgagagctcggaggggagacgtgacttccccatctaactctaagtgacaaggctgagactctccagccctaggattctcatccaaaacccctcgaggctcagacctttggagcaggagtgtgattctggccaaccaccctctctggcccccaggcgccctcttcttgtggatgttctggccaagtgtcaactctgctctgctgagaagtccaatccaaaggaagaatgccatgttcaacacctactatgctctagcagtcagtgtggtgacagccatctcagggtcatccttggctcacccccaaaggaagatcagcatggtgagcagggcgctgcccttgggcagcacttgggtctaacaggactagcacacatatttatgcccctccccaccccagggccagcgtgggttgggagagggcatgccgggtggtggagctgtgcctgcctctacagtggagctctaggaagaatgctgggtggtcacagggggcctgggactcaggagactgtccagtgatcaaaggctttctggggggagtgattaaatccatccatgctaacatgaaacagacctgagtttgaaccccgtttctgctagttgctcaagtcagtcaccatgagcgagagtcagcagcaacagactagactagaattagccagcctctctcttccccccaacaaatttcaagaatggaaccatcagaatcagaagtagagaagtatgtgacactagccatgtggctctggtcaagccacttcaacgttttgagtctcagtggcctcatctgtaaagtgagaattaagagatggtgcatgtaaagtgcttaacggggagtaaatggtaggcaaacattagctgctgctattagtacagagagacaatggtgtgtgtgagtcttgtgggcagagatgggtgagaggggagacaaaacaagttctcatgatgatgggggcagggggtccagctggtggtgtcggagggaagtctggacagaccagtggtggggctcgggtgggaggcactgggggggctggagtggaaagaatgtggccacagatgacagcttcacagcagaattcagtgctaagaggaagtgagtggccatgagttccatggtgacagaaagtctaagacacctagcaaggcaggagtgggtgtcagctcagggaagctcagaggctaaacctaggtgagagctgagggtgtcagataagagcaaggcaaggctccggttctggagtagtgaaggacatagcagagctataacccaggaacaaggcccagcttattggaactgggaccagtcacacagggtggcacaggcaccaagtagccaataataataataaaaacaataacaatgatttatgtctattgggcatttattcatgttctatgccagacactggactaagagctttatatgtggaaactcatttaatccttacaataaccttatgaagaaggtacatccaaaaccccattcttctaggccaggtgcagtggctcacacctgtaatcccaatattttggaaagctgaggcaagaggattggttgaggccaggagttcaagaccagcccaggcaacatagcaagaccctgtctctaaaaaataaaacaaaaacccattcttcccgctgtccagggacacaccactaatgagtgtgatgggtgcctaggatgctgagcacctggacttcccagctcattccctaaatgctgcacaatcagggtaactgtgccctgagcctaagaggcagtagtgagctggcccaccgtgtccactgatgaaggacacgtagccccaacacaggggagaggtggtttcaggatcagcaaagcagggaggatgttacagggttgccttgttcccagcgtgctggtcacttgcagcaagatggtgttctctctctaccttgcttcctttacccacacgctatttctttgcagacttatgtgcacagtgcggtgttggcaggaggcgtggctgtgggtacctcgtgtcacctgatcccttctccgtggcttgccatggtgctgggtcttgtggctgggctgatctccatcgggggagccaagtgcctgccggtaagaaactagacaactaatgctctctgctttggctgaaggccagcaggacgctgggacctgatgggccactgtgcagtgcacagctgcattaggcaggtgttggtgcattctcttattggcttcaacgcctagcgagggatccatcctggctcggtggcacatttgttaagatgctggggagcaggtggcagaacccatttgagcttgcttgggcactggggagaatttgttaccaggctacaggggtgtcacagaactcaaggacagggactggagtgttgtggggagcccagaagcccctgttttacttctttctttgcttttcctgaatatctgctttattcttactctatagacctgcttcctcctctttcaccccacattgtggggtgtagtcttttgcttcaagaaagcagcctggtggatggaatctcttggccccaatcccaaattctctggagaaggggctctttggtttaacttggataatgttgtcttcagctgggggtgggcacatcgtgcatatgtggctgctgccggggaaccacgtggatgatgtgagaggagcagcacccagaagagggagtgctgggctgatggtccaggtcgtgtccacttctgattgtttaattcttcttctaagtggatggatctttctccaatactcagcaaatcctgatcgttccagaatacttcattatagccaattggttataatgtgcttctctaagagaaatatttagggacaacaaatcttcatgggtttgaagacttgatggaggaaaaaggagtagattttcgaaggctggatttggatgaacaggggctattcagggagtgcattccaacctaaaattaggaaaaactggctgggcgcagtggctcacgcgctttgggaggccgaggcgggcagatggcctgaggtcaggagttcaagaccagcctggccaacatggtgaaaccatctctactaaaagtacaaaaattagccaggcgtggtggcgggcacctgtcatcttagctactcaggaggctgagatgcgagaatcacttgaacctgggagacagagcttgcagtgagccgaaattgcgccactgcactccagcctgggcgacagaacaagactctgtcttaaaaaaaaaaaagtgttttatatacagagtggaatattatttagccataaaaagaatgaaatcctgtcatttgcagcaacatggatggaactggaggtcattaaaaaataaaataaaataaataaggaaaaacgtatcaatacttcgattgaccaaaaccagggcaaatctgattttcatctttgcaaggggaacaaatttcttttatctcctctggctttgaaaccctgaaatgaaaggaggaagggcagaaaaaagaacacatagcaagttaccatcaggctcagcgcccatcgcattccctgagcttgtttccttgacttcatcactggcaggactattcaaaaatgattccctcattcattcatatattcattcattcatcattccttcattcaacacatacgttttaacactcatcttgcttttcaagctatagtttagtgagcgaaatggatacacagaatacagtgtgagaacagctacagggcacatctgagctagcctgggatgggtccggaaatgcttcctggagcagaggaaacggttgacagccaagtgttgacagagaagtagtattagccaggcagagacatggggaatgtattccaggcagaaggcacagtgtgtatgaaagcttattggtaagaagagtgtgtggcccaaccaggaaacagacattctgaaggcatagggtccacccaggagcatggtgaacccagatccctgaaagatgggaggtgctcaggcacacttcctgggctagttgaggggtctggatttttatttacttatttttttatttattgagacagagtctcgttctgtcacccaggctggagtgcagtggtgcaatctcagctcactgcaacctccacctcctgggttcaagtgattctcctacctcagcctcctgagtagctgggattacaggtgcccaccaccatgcctggctaatttgtgtgtgtgtgtgtgtgtgtgtgtgtgtgtgtgtgttttgttgttgttgttgttgttgagacggtgtctcgctcttttgcccaggctggagtgcagtggcgccatcttggcttactgcaagctctgcctcccgggttcacaccattctcctgcctcagcctcctgagtagctgggactacaggcgccctccaccacgcccagctaattttttgtgtttttagtagagacggggtttcgccatgttggccatgctggtcttgaactcttgacttcaggtgatccacccacgttggcctcccaaagtgctgggattacaggcatgagccaccgtgcccgacctggatttttattctgaagactaatggggatcctaaggaaggaaccagcctgactgaatttgcatatgtgtccacatctgctggctcatggctgtgtgggaggctgagtgatggggaggaaggattactgagtagggatctagaggtgtggcctcatgctttctttctaaccagctgtgttgtctttgggatggtgcttaaatttgggctagaccagtgggtcttggtcaccccccaggggacatctgacaatgtctggaggcgttcttggttgacacagtggggtgagggctgctactggcagctcgtggggagagaccaggaatgatgcttaacatcctacagtgcacagggcagcccccatcacaaggaattatcagctgaaattgtgaatagtgcctacactagacccttgctactcatagtgtggtccgtagatgagcagcattggcatcacctgggaccttgttagaaatgctcttagaccccaccccacatccactaaagccagctcttcatttcaacaaactccccattgatgtgagtacacattcaagtctgagaagggcttctttgaggtgagccttagtgcccatccccatttggtggcgccggataccaagggtgtgtgaaaggggtgggtagggaatatgggtctcacctgccaatctgcttataataacacttgtccacaggtgtgttgtaaccgagtgctggggattcaccacatctccgtcatgcactccatcttcagcttgctgggtctgcttggagagatcacctacattgtgctgctggtgcttcatactgtctggaacggcaatggcatgtgggtcactgggcttaccccccatccccttaacactcccctccaactcaggaagaaatgtgtgcagagtccttagctggggcgtgtgcactcggggccaggtgctcagtaggcttcggtgaatatttgttggctgatttattcagaaattatgtccagcccctaccttggatggatttatcacctctccaggccacctcttctttccaaataggaccacctaggtatagaccaaagacacgaaatcttctgtgaccccacaaacacagagcaggtcaaataggcccaagccaattgagactgtggttcaggtcgtgatgcagagctttgctgtggacgtgctcccactgcgtactagctgggcatgcggcttaacctttctcagcctcagtcgcccccttgtaaatggagataaggatactatctcccctcacagggctgttgggatgctactggatttaataagctaatgcagggacatgctaagcacaacccatccctgaggcccagagaagggtgggcctcggctgaggtctcactgtgaggtgggaatgtgggcctccagaccagaggtaggtcctgtggcccctagacagtggacagcaatggtcagtttgacacaccagagccctagccattacttcctggatgttgtgtgaatattttctggacatggcttatataaaatgaaaaagtgaattgggcacgatatagggatagatttttagagatgaactgatagcatgatgataatcatattcactgataacatttactactgttattgactgctttaaaagtgttgggcattgtgctagaaaccattatatgcattatctccttgaattctcacaaccgcctactgaggtattctcagactctaagaaatgagatttaagagaagttatctgcccaaggtcacccggctggaacctggctgtaaaaatggctgaagcaggtgatgaggagctgatgtgtttggacgtgtctcagagaaatcatggaggcgctggggttccttccggttcttggatgccttctacagagacaaccatagccccaaattatagggatcacatatcagtgggtgagacatccttgcttgggatgaggaggggatgagctgtgtgaagcaaggtgcctctgtaatgggttccagtgatgtgtctgccactgtcttaataactgtgcaattctaagcagaacctttcctgtctctgggcctgagagttcccctctgtaagatgaggacttgacctagcaaggtcctactcagatgcctgtagagaacaggcaggggaagttagaaaaaaaaaaagccagtgaaggaagggagctcttcagcttgcacccaccatcacagtgcagggacccaggctcagtgttgccagatccaatgacttctcaagagctcaaaatctagagttttgcatgtgctctcccaagtactggcagaaaattcaagattgttagtaacactgtgtggctaaattctgcttgtgggctgcctagattcccaattctgtgattctgtggttctctggaagcattggttctccacagcacctgcatcacttggaaacttgttagaaatgcaagccctacctacggccccaccccagacctacccagttagaaatctgggggtgggacctatcagtccatgtttgaacaagccccacaagtgttctcttgcaagctcaagttttagaaccactgacctatagccaaaaaagaaaaagccaatcagtggtttgctggtagaggattaacttaacaactggctttccatgaaaataaagccttgattggtagcacttgcaatttctatggtacaaacgcttcccacatgactgagttcaagctatcaaggagacgtcactgcacatggacttgggaagagatgagaacaatcagcccactgagcctatgggaactggctccagcacatccctgcaagtcaactctcatcagggtgagtgagttgaggaccaagaagcagttatcctcttgcctttgcaggacccaggcaaagggaagggcatagtgacagtgatgatctctcttccggaagtctttggtttgctgagagtaaaaggcgtgggcttcaccagtggtgaagccagtcatgcagccttagtcctggtactcaaactccctaaatctcagttttctatctgtaaaatgggaaaataagtcctatgtcacagggttgctgtgcagatttagcaatagaacatagccccgttctttatgatgactgatgctgcatcagtatggggacatctctatgtaatggaaagatggagagaggattaagtgcaaagtcacagcacttaatgggaactgtggattagctacttggtggcattgggcaagtcagttgactttgcattaattccacaaacaatatttcccaatttcctattcagatgagcatatgtgactgagtcagatgctgtgatcagagccaggatggagcatttcccacaaactgtgggatttttaagtgatgggaaggcacactgaaatggcattgaatcatgcagttgcagatactctttttcaattctcagtcctttgattacatcagggagaaaagaaagtccccacttgggctgagaatctctgcacccttctagctcttgttaaccactcttttgaatagcagagaaaacctcagactgccatatctgggagagattttagcaacattttgttttcattgtatctctttttacagctacctcccatttcccttctatttcaagctagtaacacagttttcttttaaattcatttatttaaatgtaaaaataagtctatttggagaaaaaaaatttttaatagcatctctggaatgccagtatggctaaattcatgaatgttgtcctcaaatgctgaaatctgggaagcatctggccaagctttgtggacaggccttcctagtttgaatcccaagagccactcattccgagccacaaaacattggaattcttggttcacttccctaacctgaacttgtcctctgtgaaatagggacattaatagctcactcacagggctgctgtgaggacatgtgttgagctgagggtctggccaggggagaccctgtgcagggagactgttatcatggtgatggatttctgcttcattcatttctttttccagacagcatcatatagaatgagttgtggggtggcagtcagcaggtttgggtttatcctctattctgccacttattacttaaaaaaaaaaacccaacttatatagtataagctatatccagaaaagtgcaaatatcatacaagtaccatttgatgaatcttctgatatccccacataaccaacacccagaacctcttcttgtctcattccaggataaccactaacctgacttctaacagcatcagtcagttttgtctgtttttgtacattatatatgtgatggtttgaatgtgtcccccaaatttcatgtgctagaaacttaatccttcaattcatatgttgatgctatttggaggaagggcctttgggaagtaattaggattagataaggtcatggggtgaggtatgatggcactggtgacttataagaagagaaagagaaatctgagctggcatgctcttgccctctcaccgtgtgatgacttctccatgtcatgatgcagcaagaaggccctcaccagatggtggcaccatgcttttggacttcccagcctctagaactgtgagctaaatcaatttattttctttataatcacccagtttgatattttgtcatagcaacagaatatggacaaagaaagaaaattaatgcaagaagtagagtttttactgtaacagattcctgaaaatgtggaagtggctttggaactgggtgatgggaataggttggaagagttttgaggagcaggctagaaaaagcctgtattgtcaagaatggagcattaggccaggcacggtggctcagacttataatcccagcactttgggaggccaaagcaggtggatcacctgaggtcaggagttcgagaccagcctggctaacatggtgaaacgctgtttctaccaaaaatacaaaaaattagctgggcactctggcgcacacctgtaatcccagctactcaggaggctgaagcaggagaatcacttgaacccaggaggcagaggttgcagtgagctgagatcgtgctattgcactccagcttgggcaacaagagcaaaactccaactcaaaaaaaaaaaaaaaagaaaaagaaaaagaatggagcattaaagacagttctacagttctggtgagggcttaaaagaagaccccagaactagggaaagtctggaacttcttaatggttactgaagtcgttgagatcagaatgctgatagaaatgtggctggtgaaggccattctgatgaggtctcagatggaactgaagaaccacgtgttggaaactggagcaaaggtcatcctttttataaagaagcaaagatcttagctgaactttgtctgtgccagagtcatttatggaaagcagaaaatccgtaggtcacccatgttgtagagaatgaaagaacattttcagctgagaaaactgagagtgtgaccaagctaccgattgataagaaaactagtacacataaattagccaggcgtggtggtgggcgcctgtagtcccagctacatgggaggctgaggcaggagaatggcatgaacccgggaggcagagcttgcagtgagccgagatcgcgccactgcactccagcctgggcgacaaagcgagactccatctcaaaaaaaaaaaaaaaaaaaaggaagaaagaaaattagtacacatagaacaaagccagaggctgttcatcaggacaagggagaaaaactccaaagccatttcagagatcttcaagactgcccctcccattactggcccagagctctaagagggcagaatggtttggaatgaccagctgctgcccagggctgccttgggtctctgctccccacatttctggtgcagcattcctcagccatcccagctgtggttcaagtggccacaggtgtgatgtggaaggtaaaagtcataaaccttggcagcatacacatggcactaattttgcaggtgtgcagaatgcaaaagctgagggggcatgccttctcccacctacatttcaaagggtgctgtgaacggccaccccagagagcccctagtagagcaaggtctagtggagctacaagggtggggccaccgccaagaccccagaatggtagagctatcatagtgcaatgccagcttgggagaactgcaggcatgagactccaacctgtgcgaagtgcaacatgggcagaacccagcaaaaccacaggggcagagctccccgaagcttcgggggtccaaattccatagtgtgtccaggaggtggcacacagagtaaaagatcattctgaaggtttaaggtttaatgttgttttctatgttgggttttgtactttcctggaaccagttaccctttttcccttgcctctttttccttttagaatgggaatgtctgtcctatgcctgttccactgttgtattttggaagtcaataacttgttttgactttacaggcttacagccagagggaatctcccatagaatgaattgtaccttaagtctcacccacatctgatttagatgagaccatggactttggaattttgagttggtgctggaacaagttaagactttgggggttgtctaagtgtggtgtttcatgcctgtaatcccagtgatttgggaggctgaggtgggaggattgcttgagcccaggagttcaagaccagcctaggcaacatagtgagacctgtctctacaaaaataaaaataaaaagttagccaggtattgtggcatgtgcctgtaattctagctactcaggaggctgaggtgagaggatcacttgagcccaggagtttgaggctgcagtgagctatggtcgtgccactgcattccagccagggcaacagagtgagactctgtctctacaaataagattaaataaacgtagctggagatggtggcacacgtctgtagtcctagctactcaggaggctgagacaggaggattacttgagccaaggagtttgaggctgcagtgagctatgatcatgccactgcattccagcctggatgatagagcaaaatcccatctttaaaaaaaaaaaaaaaaaaaaaaaaaatatatatatatatatatatatatatatatatatatatatatatactttggtgctattgggatgaattttgcatgtacgaaggacatgcattttgggggctggggcagaatgctatggtttgaatgcatccctcaaatttcatgtgttggagacttaatctccaaattcatatgttgatgaaattggaggtgaagcctttgggaggtaactaggattagataaagtcatcagggtggggcccctatgatgagactggtggcttacaagaggaagagagacctgagctgacatgctcttgccctcttgccatgtgataccctctgccatgttatggcacagcaagaaggtcctcaacagatgccagcagcatgctcttagacttcccagcctccagaaccatgagctatatataattattttataaattacccattctgtggtattctgttatagcaacagaaagtgaactgagataatatacatggaatcatacagtaagtctgtgcttttgtatgcttcttttactcaacattgtagttgtgagattcatccaggttgttaagcattgctgtactttttttccactgggatatagtgttctgtcatgcttgggtcttaatttataaaggtgactgagtggcattttcttccagtattattggaaggaaagttttgttgttcacagttcccctgtaaaaaagaggcagaacacgtcttgcagggccacacaaaactgtgtcatccagggaccaggcagcagaaagagagggggaactgggcctatgcctttatgaaaaagagtggtgggagagtaactgggtgagggcatccactaatgggcaggaagtgaaaacacatatgttggaatttgtagctgaggggtttataatatgagtttcccatgcctgagaaagctgacttgcaagaaaacgagataaacaactttggccattagtgtggccctgtcataaatgaatgccggatagacaaatcgagaatctaagaaaagatagttggaacaagtgttccattgtgtgaatgcagcagaatttatttatccattattgaggaggatttgggtagtttccagtttggagctattatgaatattctagtattgctcctctgaacattctagcacttttgtttttggagcacacgaatgcacttctgttgattatatgcctagaagtgaaattgttgagttatacagtattcacacagtcagccttagtggctactgctaaacagttttctctagtagtttgcgccaatctaatcaccagtagtgtatagaagctccttttactccacattttgttaacacttggtgttttccttctttttgattagtcatttagcagtgaaacctattttttacattttgatatctccaataactaactaaatggagcacttttaatatgctttttggacagttgaatatcttttcttgtgaaatgtctattcaagttagtttgcccattttctattgtggtgttctgtctttttcttattgattttaggaattccttacatatcctggatatgaatcccactatgtggcttacctttttccttctttctttttgaaacagagtctccttctgtcacccaggctggaatgcagtggcgctatctcagctcactacaacctctgcctcccaggttcaagcaattctcatacttcagcctcctgagtagcttagattacaggtgcatgccaccatgcccaccgaatttttgtatagacaaaataatttttggtagagacagggttttgccatgttggccaggctgatcttgaatcctagcctcaactttggcccaccttggcctcccaaagtgccaggattacaggtgtgagccaccatgcccagcccaccttttactttcttaatggtgtcttttgaacaaggaggttcttaattttaatatagcccaatttatcattgttccctttatgcttagttcttttatgtcctgtttaagaatttttgcagccagctcggtggctcacacctgtaatcccagcactttgggaggctgaggctggcagatcacaaggtcaagagatcgagatcatcctggccaacatggtgaaaccctgtccttactaaaaatacaaaaaattagctgggcgttgtggctcttgcctgtagtctcagctactcgggaggctgagatcacgccactgcactccagcctggtgacacagcaagactccatctaaaaaaaaaagaaatttgcaaggtcatgcatatgtccccctgaatttttttctaaaaatcacttaattttagatcaatgaattgagtaattgactccatttttcagtcattcaacaaacatttccctgaggttttgataacctgaactgtgtttggagctggggaggaagcaaactattgaatatatacaaagatggcaaagatgagggcctggagcttgccacacggaaggggggatggctgcctgaatggttgggcaggtagttgttgacatctgcactccctacaagagcagcagggtggcaactctttttatctttttaatttatttttcttttctcttttttttttgagatggagtcttgctctgttgcccaggctggagtgcagtggcgtgatctcagctcactgcaaactccacctcctgggttcacaccgttctcctgcctcagcctcctgagtagctgggactgcaggcacctgccaccactcccggctaatgttttgtatttttagtagagaaggggtttcactgtgttagccaggatggtctccatctcctgacctcatgatccacccgcctcggcctcccaaagtgcggggattacaggtgtgagccaccacacccggccttaatttatttttctagtctgcaggtaattctttttaattctctccactctcctatgatcttatgaggtagggactgtgattatttctcccactttataatgaacaatcagtaaagacagggaagataaccaaatgacatacaaggtggggtccaccccatgaggctgcaggcttggagctttcctttgtcttaaaaatgagaacatgagctgcccacctgttgagacaagaaataggaaaggcttaaaaaactggcttgttgtgtacaactatccgtggggctgcagtgaacgggctggcagtgcccaggtgcatgctgaaccctgggacaatcacattcagcatccaggggcccccgtaatagcttaatgtttgaattgaacccctggggttgccttgaaggagagagatcctggaagtatgttcaaggggtagggatgggcaggggagatgggtctgaaagccaagctctaccccacccaccttgccccaagagaaatagaaccttcatctttaattgcctaacgagaaaactggggctggccagatgtggtggctcatgtctgtaatcccagcaatttgggaggccaaggcgggcagatcacttgaggtcaggagttcgagttcagcctggtcaacatggtgaaaccccgtctctattaataatacaaaaattatccaggtatggtggcgcatgcctgtagtcccagctacttgaggcacaagaatcgcttgaacctgggggacagaggttgcagtgagccgaccactgcactccagtctggacgacagagtgagactccatctcacaaacaaaaacagaaaaaaaaaaaaaaaaaagagagagagagaaaactggaggctctgagaggttaaaggacttgcccagggtcttgcagctagtaagtgacagagctgggacttgagcttgggttttctgactcctggtctggttcattatccatgaggtgctgggaactaaaataagccacaatcttggaatctccgtcgcctccctccctcccacatgtctgcgtggctttttgggaaaatgccaggggaatgtaccagccagggagaggacccttgttttcctcatggcccttcctggcaatggcactactgacaccgacagtcctttttgtccctgatgacctctgctgcctgatgcccaagtgaccacctctgctttgtcatttctaggattggcttccaggtcctcctcagcattggggaactcagcttggccatcgtgatagctctcacgtctggtctcctgacaggtcagtgtgaggccacctttcttccaccattgccaggacacagcacccacgtccagagcgcaccctgccgtgtggctggatgtctatgtgccccatctccttccctgaggatcacataatttcagaattggaaaggttcttagaggtcacctgctgctaatgtggactgtgaggccagggcagggaagggacatccctgaggttataagtagggtgagtggcaacgttgcagacttttgaacccagggctggtgatcacactcagttttgcacagaagcccgagaaaatccttacacccaaaagcctaccttttatttctgaggacacccataatactattttattcaacagatatttattcaatatccactatgagccaggcactggggacacagcagtgagcaaaacaaattccctgaccccatggaattgaccttctagtgggggaaggtattagcaataaatagacaaataagtgtctactacgccagatgggaagaagtggctgtgaagacagagcaaactagagaaacatagagtcaatgtgggatggggtgttcttttaggggggtggtcagggaaagcttatctgagtagttagcttttaagcagagaccccaatgaagaggagggagatatgcgatgcatttagttaggggaagaacattccatgaaaataggatagcaagtgcaaaggccctgagacagcagcatgctttgtgtgttgagggaacagtaaggagaccagtgtggttggtgtgaatggagtgagaaggagcagcaggggttgagggcagaatggtagtgaggagcaggcccttataaaagatgggaagccactggagatctttcaacaaaggggaaaagtatgtttctgttcttgcaatacaatagaaaagcaaaaaatctaggggagttgctaattagccagttttacttatatgccaggtgaaaatatgtggctaggtgcagtggctcatacctgtaattgcagcagtttgggagaccgaagtgggcagatcatctgaggtcaggattcaagaccagcctggccaacatggtgaaaccctgtctctactaaaaattaaaaaattagccaggcgtggtggtgggcacctgtaatcccagctacttgggaggctgaggcaggagaattgcttaaacccgggaggcagaggttgcagtgggccgagactctgtctaaaaaaaaaagaaaatacacattcaggccaggcacagtggctcacgcctgtaatcccagcactttgggaggctgaggcaggtagatcacctgaggtcaggagttcgagaccagcctgaccaacatgggaaaaccctgtctctgccagaaatacaaaaattagccaggcgtggtggtgtgtgcctgtagtcccagctactcgggaggctgaagtaggggaatggcttgaccccaggaggtggaggttatagtgagccaaggttgcaccagcctaggtgacagagtgagactgtctcaaaaaaaaaaaaaagaaagaaaatatacattccatccagaacttgttattctacaagcaaacatcttttattggttagacacccatatatgtgtccctaagcaggaggtggatgccaaataagagacaaatggcgtaagacactatgagttgtgtggtgacattgggcatgtcacttcactccctctgagccttggttagcttctctgtaaaatgaaaggattatggtaactaagctggcttccttccagctttaacaaactgtatggaggtacattttggagttacttgggtaatttttgagtgtgagattggctagaattgctttaatataccaatgtctggccttagcttttggcagagtctgtgtgaagaagcagaggcggagtagagttaattccgtaagttaacgttcagttcgtggcagctggcaatccaaccctgggaaaggctgccggatttagcaaaaatgcaaggtgtctgtttttaaattcgcaatgaattgggtatcctgcattttatttggcaaccctgtcctgggactcacactattcactgttatcactggtatattcgaagtggtgctgacttgccctctgtcttgcaaagtacccgggggtcttttcttatgcttcactggagtcaaaaaagagaatagaggaaaagacaatcatattgttcctttaagagttaagaccaacaagctttcttctttacatgttgtttttgacatgagcaaactggtgattaaaaacaacttgggtggctcatacttgtaatcccagcactttggaaagctgaggtgggagaatagcttgaggccaggagttcaagccagggcaatcctatagtgagaccccatctctacaaaagatacaaaaattagccaggtgtggtggtacacctgtagtcccagctgctccggaggctgagatgggaggatcagttgagcttgggaggcagaagttgcagtgagctgagatcgtgccactgcactccagcctggacaacagagcaagaccctgtctcaaaaaaggaaacaaaacaacttggacaatggaagggggagaaagttcctcaagaagccaaaattgcaccaaatggactcccagaagccaagcatttaacttgttaattgagccctctgtgggcctgtctatacttatttaaggaacaatcctatcaagcatagttattgggtttctcagcccaggtagattagaaatagcagattagaggtgggctaggtttctagaggtaaagtacaccagcagaagttagaagtgaaagcaaagagcctaacagaggaagagaaattcttttttttttttttagacggagttttgctcttgttgcccaggctggagtgcaatggcgctatctcggctcaacgcaacctccgcctcctgggttcaagtgattctcctgcctcagcctcctgagtagctgggattacaggcatgcaccaccacgcccggctaattttgtatttttagtagagacagggtttctccatgttggtcatgctggtctcgaactcctgacctcaggtgatccgcccaccttggcctcccaaagtgctgggattacaggcataagccactgtgcccggccaacaaattcttaaaactggacacaagaacacaaaacgcttgggctgctgagagattagaccaacaaccctccacggctacaaaccttttccacgttatatggcacgttataagtgggtgttcctagtgatggttctgattttttttttaaaaagtctaaatatgtttaatgttgtctcagaagacaaaatatattttagacagatattcctcagtgatgagtaagcctcagctatctggaaaattcatgcaggcgccagagatcattactgagtaattcaagctaataactgcgtcatgctggttgtaccctgcatgccaatatctgctaaaagcagcaccacgaaagggaaatacgaatctcactaagcactcacccattcttgttaacgacactggaactgatcatccttaataatacacagataaatctatcaggagcatttccttgcttcctgtgaaaggaagtactcattccatgtgtcctgtgaaattcagccagcttcgggaagctggaggaatacatatggccaagctacctgggcagagagtagacagggaatggaggttgggcacagtggctcacacctgtaattgcagccctttagaaggcaaaggcgggcagatcacttgagctcaggtgttcaagaccagcctgggcaacatggctaaaccccgtctctgcaaaaaatacaaaaaaatgagctgggtatggtagcacacacttgtggtcccagctacttgggaggctgaggtgggggggttgcttgtgcctgggagtttgaggctgcaatgagctgtgattgtgccactgcactccagcctggataacagaatgagaccctgttccaaaaataaaaaataaaatcaaagacacttaaaaagatggggaaaaggaaggacaggcacttaagcaagttataagctactttcctaactacacaagtggaatcttaagctgaggttcccaggagttgactggagccagagaagacagacctataggagcacccaactggagtcgccctccatagtagcccatatgtcttacatggatcagctttcgtggggcccttctactccgtctggggaagggcgtcagatctgtggctctcatgtactgctcagtacactgccattcccagttctttttttcaaaaaaaaaaaaattgtttacagaatcggccgggtgtggtggcttatgcctataatactagcaatttggaaggctgaggtgggtggatcacctgaggtcaggagttcgagaccagcctggccaacatggtgaaaccccatcctactaaaaaaaaaaaaaaaaaaaaattagctggatgtggtggcaggcgcctataatcttagctacttgggaggctgaggcaggagaatcgcttgaacctgggaggcagaggctgcagtgagccgagatcatgccacggtactccagcctgggtgatagagtgagactctgtctcaaaataaataaaataaaataaaataaaataaaataaaataaaatagtctacagaattaagctggtccaggaatgacagggcgtccatttatttgtctttcaattgtgggagaaaaaggatttctgttgagacactgtcgttttgacacacacaatattttgattaatcttgagattaaaaatcctgtgctccaaatcttttaacattaaattatgcatttaaacaggtttgctcctaaatctcaaaatatggaaagcacctcatgtggctaaatattttgatgaccaagttttctggaaggtaagatttttcacctattaacgtgatagattttgagtgcatgaacttaaaaacatacctgggtatatatgttgacttgctgtttatgagtaaaacaaaaacaaaaatggagtaaggagcattgcaggaggaactagaggagaaacaaatccatgatatgcatgtgtgtgggggagggtggcggggaggtggtaaaggtcaccatttccctgatacctcaaattcattcagagtcagggatgagacagctttcactggccacacttcccctcccgctatctgcagtcctcagcgtagccaaatagtttgacatgcgggtgacagaaccccgcaatgcaaaagctggaagaaacctcaagccttggagtccaaccccttttttgacagatgctaagagtggagacatgacttatcaagatcttacaactggctgggcacggtggctgacgcctgtaatcccagcactttgggaggctgaggtggggcgatcacctgaggccaggagttcgagaccagcctggccaacgtgtcaaaaccccatctctactaaaaatacaaaagttagctgggcgtggtagcacatgcctgtaatcccagttactcaggaggctgaggcaagagaatcgcttgaaatcaggaggcagaggttgcagtgagctgagattgcgccactgcactccagcctgggtgacaagagctgacactctgtctcaaaaaaaaaaaaaaaaaaaaaaaattcttacagtgtgtgagtatccaggctgagtcctgaacacagctcttgataaatgataacaagcaggcacaaaaaaattgtagtacaggagtctgaggtcacttagcaaagggacataaagttcaaacagctcagcagctgctgagggtcccgtgttacattgtagcatttgttgttgtgactgggctagaaagaaggtgaagaaggttggagctcactccctgcctcccctcccactctcctccctttgacctacactcatagttcacgcagcactctgatgtgtccccttaggccatcctctagtcaatgctgtgggtaggctggaccagcagggaccagtattgtcacagcaagtccaggccaacagtggtcaggctgctgcccggtgttgtgcctttgtgagtggcagatccaagaccggaacccaggccttctgagtcccaggccaatgcttgccccacccagcatccaagatgttgctcactaaagagacagagaagcagccttattatgggcctggacacctgtgcatgaggggtcaagcagagaggacctggggagagaccctgccccttcttttccttctccttcctctcctttctcttcttcttcctcttcaaatagctttttgaggtgtaactggcatacaatcaattgtacatatttaggctgggtatggtggctcacgcctgtaatcccagcactttgggaggccaaggcgggtggatcacttgaggtcaggagtttgagaccagcctgggcaacccggtgaaaccccgtctccactaaaactacaaaaattagccaggcgtggtggcagctgcctgtaatcccggctactcgggaggctgaggcaggagaatcacttgaacctgggaagcgaagtttgcagtgatctgagatcatgccactgcactccagcctgggtgacagagcgagactttgcctcaaaaacaaaacaaaacaattgtacatatttaaagtgttgtaaccaagtgagttacagagaaacaccacactttgagcctaattcaggagtcctttattagccggcgacctagagacgactagtgctcaaaattctctcggccccaaagaaggggctagattttcttttataccttggtttagaaaggggagggggaattgagctgaagcaatcttacagaagtaaaacaggcaaaaaagttaaaaagacaaatggttacaggaaaacaaacagttccaggtgcaggagctttaaagccatcacaaggtgacaggtgcgggggctctgggtgctatctgccggacacaaacgcaggggcactagagtactatcacccgggcaaattcctgggaactgcggacacagcttgccacagtaccttatcagctaattgcactctttgatgtgctgggagtcagcttgcacaagttaagtccttgaggaagggggtgggtaaggagcccttaacgtcttgcaaatgaaggagccgaatggaatccctccggctttcttagctaagagagagtcaatcaagttaatacaagttagggtatcacaaaagtatataatttgatacattttaacgtatttatacactgaagagaccatcaccaccatcaagacaaggagcacacccatcacttccacacacttcctcctgctcctttgaaattcctcccttcctacccacctggtcccacccaaaggcaaccactgaactactttctgtcactaaggtttgcgttttctgtaatttttttgtttgagacagggtctcactccgccacccacaccgtaatgcagtggcaccatcatgactcactgtagcctcaacctccccaggctcaggagatcctcccccctcagcctcctgagtagctaggaccacaggtgtaggccaccatggcaggctaatttttgtatttttttgtagagatggggtttcaccgtattacctaggctggtctcgaactcatgggttcaagcaatcctcctgccttggcctctcaaagtgctgggattataggcatgagccactgtgcccagccctctgtaatgttacacaaagggaatcatgcagcacgtactgcccttggtctggcctcttttgctcagcatgattattctgagaatcatccgtgttgttgcgtgtaactgacttcatcagcttctctctgcagctgtcagctcttggcttctcccaacagccaatctctctttatcccctgcaagtgttcttgcctatttagcagaatcaaggtactctatcgaaaagactcggaaaattggtttaatctattcattcattcctcaggtatttatcgaataactattctataccaagtactatgctaatcaaccaaggacagcacaaacaggagaaatctccagctcagtcacttgagttgcaataaatatttgctggataggtcaggtgcagtggctcacacttgtaatcccagcactttggggattactgagacgggaggatctcttgagcccaggaggccaaggctgcagagaaccatgatcatgccactgcactccagcctgggtgacagagtgagatcctgtctctgaaaaaaaatatttgctggataaattaaggaaatctgacgaaccccatcagtagccattgcagcaacaggtaaactagaacgagtgtgaatttggaatgaggaaacccgatgttggccatcattctgtaatgtcatgtattatgtaatgtattatatattaatgtatgtattatgtaggcaagttccttgacctctctcactggtaacataagagtagtaatctttgtgctacttcactgggttatttcaaagatcaagtgaggtaataatgtctgtaacaacattctgtaaaatgcaaaccgccacatgaatgtgaaagtttattactagggatttagccaaccacaagggaatgtgtgagcataagagctatcatattgcaagcctacagtttctgattttgtgctaggtgcttttccacattacctgattttatcctcacaacagtcctgcataaaagtaagtatgtcgcccaggtgcggtggctcatgcctataatcccagcactttgggagcccgaggtgggcaaatcacttgagatcaggagtttgaaaccagcctggtcaacgtggtgcaaccctgtctctactaaaaatacaaaaaaaaattagacaggcgtggtggtggatgcctgtaatcccagctacttgggaagctgaggcaggagaatggcttgagcccgggagatggagattgcagtgagatgagattgcgccactgcactccagcctgggtgacagagcaaggctatgtctcaaaagagaaaaaaaaagtaagtatctcagtcttgaagatgatgaaatggaggcctagagagattaagtaacttgcccaaaatgacagaactaatgcatagaaaagaagaaatgtgatgtcttttggctccaaagacaccccacatatgcgttggttacagttactagagaaaagttattccacccccaccccacccccagaaatcttctgacttgttttctcgcagttgagtaggaccatttattcggcagtgtaccattctcagcttgcagttgaaagccaaatatccattaaagaggcaaggatgcaaacttgctaagctgataaatccaggggtgattttttttttttttgcaaaccatccaacaagacattttaaatactcattgaatttcatagaactgactgccaggattggaaagacattaaagccagctcagccactgcctcgctggttggccagaccacgcctggcacttctgggagggagcactcaccaccccccaagggcacccatctcatcctccgaaggtttatgaaaatgcactcatcatttgctaattcattccactacgtgtattacctaatttgtgacacgatgtgaagtaccagagagataattctaaataaaatatagttatgggtctcaaggagccagatatgctaatctcctatcctcctgcagtttacagtggtcctcaccagatacttatttacaaaaattcagtttattatttatttttttgagacagagtcttgctctatagctcaggctagagtgtaatggtgtgatctcggctcacttcaacctctgcctcccaggttcaagtgattctcctgcctcaacctcccaagtagctgggactacaggcacctgccaccacggctaatttttggagttttagtagagacagggtttcaccacgttggccaggctggcctcgaactcctgacctcaggtgatctgcccacatcagcctcccaaaatgttgggattacaggcgtgagccaccatgcccggccaaaacttcagtttataacacaatctttcacgtgtcttctgctttcattaaaagaatagacagttcccttctttatttcagtttaataaaccatggattttatttcatgctttgcaaaacacaagggctcactgacatgcacttcttaaactaattctggctggtcgcctgtaattccagcactttgggaggctgaggccgacagatcacttcaagtcaggagttcaagaccagcctggccaatatggtgaaaccacgtctctaccaaaaatataaaaaattagccaggtgtggtggtgcgtgactataatcccagctactcaggggcctgaggcagaaaaatcacttgaacccgggaggcggaggttacagtgagctgagatcgcgccactgcactccagcctgggcgacagagtgagactctgtctcaaaaaataaataaatacaaataatgtaaaatacgaaacaagcaatcctggcagtagctgctggaatgagaggagggagaggtcatagggaggtcggggacaatggagcatggagttgtgttggatttggctaagcagcaggaagtgcaaggcattccaagcaagaggaggggggcaggtggggagcatctgcaagaacagaagcagcatgagcaacctggctcggcagtgtgtgaaaaggctgaaaggtggctagagccacttcaatttcatccttcaggcaaatgggaaattcccaaaggtttgagtggggaagcaatgcctacaatgaaagtttgagagtgaagcagagtgatcgaattaagcatgtaggccgagttctgaaataactgcaatgtgctgaagatcatccattggcttctgaatgagtatttgcagtttattttttaaaatgattttattgccaagaaagataaacactactgttttggtacaaaaacataacaaaatgtgttgagtccctcttgctgttttacgcgaagttttaaaaatctactcttgtcacagtggtatcacccctacttctgatttcaaataaatgttctagagacacagtaagggcccaacaaacgcttgttcaacaacacaaggagagccagcttttaaagtaggaaaacaggccgggcgccgtggctcacacctgtaatcccaacactttgggaggctgaggtgggcagatcacttgaggtcaggagttcaagaacagcttggccaacatggtgaaaccctgtctctactaaaaacacaaacattagccaggcgtggtggtgcacaccagtagtcccagctattcaggaggctgaggcaggaaaatggcttgaactggggaggcagtggttgcagtgagccgagatcgtgccactgcactccagcctgggggacagagggagactccatctcaaaataaaacaaaacaaaaccaaatcatacaaaaacattagctgggtgtggtggtgcatacctgtaatcccagctacttgggaagctgaggcagaattacttgaacccctggggggaggttgcagtgagctgagatcttgccactacactccagcctgggcaacagagtgaggagactctgtctcaaaaaatatatatattaaaaaaaagaaaaaaaaaagtaaactaggaaaacacatcagcagcctgccaacagactcccctagcctcggtgagggccagtgttctgggaggcagatctgaattctagtcctagttcacccactggcaggctggtgcccttgggcaggtcgcttctctggggctcagtttcttcctctataaaatgagatcaaatcccatgttctaagagtttgtgctctggagtcagacagatctgggttctaccactgccagctctgtgatcttgtagcttcagtctcgtcatctgacatggagataacagtaactgtctcactgtgttgttagggtttaaaggagataatgtatgtgaaatgttagcaaacaagtgttagctaccctgatttccggtttcagagttctgtggtcccagtttatgccacatgcagtgacgttgtatggtaggctgtggtgtggcaccacttcagaactcagcgcatgcacagcttgcagaagagaaggccagaggagacctaagaaggctcttcgaacacttgaaagaccggcatgtaggccgggcgcagtgactcacgcctgtaatcccagcagttttggaggtcgaggcgggtggatcacctgagtttgggagtttgataccagcctgaccaacaaggtgaaaccccgtctctactaaaaaatacaaacattagctgggcatggtggcgggtgcctgtaatcccagctactccggtggttgaggcagaattgcttgaacccgggaggcagaggttgcagtgagctgagattgcatcactgcactccagcctgagacaagagcgaaactccatctcaaacaaaacaaacaaccaaccaaacaaaaccaaaaaaaaaactggcatgtagaagaaaaatactttttctctacacttctccaaagaatttaactaggcccaggggaggtgcagtataaatttctaacaatctcaactgtctgccaaatggaatgagctacttcatatggcagtagtgagtcctctgtctttggaggcattcaaataaaagccagatggccatttatcaacaatccatgtaaaacgttagatgaaataaaacctatatatccaagatctcttccaattcagattttatgaaagaatttctaaggtctttgtaatgagacatttaggctgtttcaagagatcaagccaaaatcagtatgtgggttcatctgcaataaaaatgtttgttttgcttttacagtttcctcatttggctgttggattttaagcaaaagcatccaagaaaaacaaggcctgttcaaaaacaagacaacttcctctcactgttgcctgcatttgtacgtgagaaacgctcatgacagcaaagtctccttatgtataatgaaacaaggtcagagacagatttgatattaaaaaattaaagactaaaaacttagtttaagagtcaatttaataagtttaaaataaatgtttagtttcattaggatgatgctatcaatattttcttggttacagacacattattaaagttttgggttaattttattgacaattcttaagattctttctcatgcttaataaagcatgctactcagttaactcttgtctacatcagcaaagcagataatacaaaacaggaaaattacaaatcactgatacttagtccttgtgggaatcatgcttttctcccagcagttttacaaggtggctggcattccctgagcatattctgaattgcactgtggggaaagaggttgtgctcagttgtagggtggggggatgcactgcctgaggattaaaaaactagttctgtgaccgtgaggaagtcgtttaaatttccatggtctgttccctcctatgtgaaaagagaaggtgggcttcaacctctaagatcttctccagttttcacattttatggacttttgtagaaaaaacatcaggagttcatgtgggatgacagcaagtcatttctttgaggagagtcttgatcaccaggcaatattcacagtgtagagactgtcagatgaccatggctagcatggaaatgagacccacacatttaaatcacccagcaaatattccgaaggctaattgtagcacattttatgaaagacatttcaaactgtggtcctgaagagtgtatcccatcttgcagaggtggggagcctggggggacaagagttctgaagaggaagagacaacaagagttcccagtagctaatgtttgtcattctagttgaccgtgctggtctattaggctagtggttcagtacacagatgaaatgcaacatggaacccagtttattatcagaacaactacaaagaaattgtcccctgtctaagactggagtgtcaagtctctgcccttttttcctttccttcaatggtggatgtggagtgactgtgcatcccaccagaaccacgtgtcatggctgagtcacatcttcctgcccttggaatgagaggcacagcggaagaccttcccatggaagggacacagggagcctggtggctggaccatggtgcttctctcttccaacacgtccactcaccccttgggagaccctcaaaagccagttacattacatgttcacagaatttttggtaaaagtaaataccaattatagtgaggaagaattttgaccacggaatattttaaaaactaaaaaatgtttatatttcatttaacatttgacacagaagagaccacatttgaataaacacattaaatcttcagagcactttcattgtggttttggacctcagatatgacaaatacttacattgacaaatccataatttcttttgtaatttctttttatttttacaaattataccatgataaaatttgacaaaaattattcatgtgaaagtttcctctaacattttataagttaatcaagtgcataccacaatagatttttggttgttgtttaggtgttctcgtgattttagtattacacaactttaagctgagactacactcagaaataagtttagaaaatggcattacaaaaggttgggagtgagcagtaaaaaaacaaacaaacccatgcagggctgttgtgctgtgggaaatcagatgtgttcactgccataagtcttcagtgcggccaaacttaaaaaccagccctc

SEQ ID NO: 335 - DNA, 33501 bp, Homo sapiens
  source 1..33501: mol_type = genomic DNA; note = NC_000011.10:c33892076-33858576 LMO2 [organism=Homo sapiens] [GeneID=4005] [chromosome=11]
aaaccctggatttgcaacatcctcaaagaacagcaacgggccttgagcagaattgagaaggaaatacccccacctgccctcagccgttaagtgggctttgctattcacaagggcctctgggtgtcctggcagagaggggagatggcacaggcaccaggtgctagggtgccagggcctcccgagaaggaacaggtgcaaagcaggcaattagcccagaaggtatccgtggggcaggcagcctagatctgatgggggaagccaccaggattacatcatctgctggtgagtaggcttcattaattctctgatgaatggacgattgcaagggaacttttttcatcttcaaggagccagaagaagtggtgattaaattggtcttttaaaataaaaagactccaaaggggtacaagtcttcaagcttcccctgtggtgttccgggcactctggcttctctttcggagggaggaagagcatctattcataggctgtgacttggagaggccccacggtgagtcaggcgcttgctgtgtgagccgctggttgctaatgtcttcgggaactgctaatttacccatctaatttgttcctgtacactggccacaaagggagaccactcaattattctgatccaaaagagaggcttgtgtttaccatgatctccccagcaactgtgtgagtgtgtgtgcatgtgtgtgtgtgtgtgtgtgtgtgtgtgtgtgtgtgtgtgtgtttgcctaacaaccttaggcaatgacgaagaggtggggctgctgcccttgttagcattttcaaacacattccagttctgagttgagggcaaagattgtaatggggtgcttcagagaagccttggctcccaaggaggttataacttcaaagggtgtttttgaaaaaccaaggcggatgaggaaagtggctacaagttccttccatcacagaggatcaatgaaggggaacaaagatttgggagcatctactttgtgccaggtactgtgcttgggttttacacgtcttctcttgttgactttgcataactcccctttgaagcagatattactccaggttcttgccgtaatgtttcagcttaaagaaaaccaacccatacttctttaggttgccctgaaaaggtgaatcttctgtgaagccttttctgtctttatctgttaaaattaattaagctcttgtttgtgctcccagaaaatcactttagaccttagaaagatggcagcctcagttttctcatttgtaatataggggtacccatagggtcattgtgagaaataatagaaataaatcatggaagtgcttggatagtagctggtacttagccctcatcagtcatcattgtcattgttgttaagagtaataataataataatatcacttattataattactcacctctaggtttttaaaaaacttacaggccgggcacattggctaacgcctgtaatcttagcactttgggaggccaaggcaggcagatcgcctgaggtcagcagttcaagaccagcttgggcaacatggtgaaaccctgtctctactaaaaatatgaaaattagccacgcgtggtggctcatccctgtaatcccagctactcgggaggctgagagaggagaattgcttgaacccgggaggcggaggttgcagtgagccaagatggcactattgcactccagcctgggtgacgagaaactccatctcataaaaacaaaaacaaaaacaaaaaaacttacataaatttatggggaacaagtacaattttgtgacaagcgtaaattgcatagtcttgaagtcagggcttctaaggtatctatcaccagattgatatctattggtatctatcaccagattgatatctattgatatctatcaccagattgatatcaccacattgtacctattaattaatttctcatcatcctccccccacccttctgagtctccagtgtatattattccataccctaatgccatgtgttcacattatttagctcccacttatgagtgaacagtgtgatatttgtctttcagtgtctgacttttttaacttaagataacagcttccagttctacccatgtggctgcgagagacatgatttcattcttttttatggctgaataatattccattgcatatatatacaccacagttttaaatccaatcatccattgatggacacttaggttgattccacatctttgctattgtgactagtgctacgataaacatacaagtgcaggtatctaattatttcttttcctttggatggatacccagtagtgggattgctggattgaatggtagttctaattttagttctctgacaaatctccatactgttcttcctagagattgtactaatttacattcccaccaacagcgtataagagtttccttttctccacatcgccactaggttgtaagttccttgaatgtagggatcatgtctcttttcttcattgttttataacaagagcctaggagtgtttggcacatggcaagtacttgttttctagctgacagatgaatgaacaaatgagtgaaggatgcttcctcctcactgctgtgagcttctgagaatggacccttgtctgacctgcttctgtatctctagtgtgactgctttgtctggcacaacagaactgctcagcgattctgttgaacggatgctgctgcctggcccgtatctggcctggagagtctggctgcgagctcatctgtgctctggtctggctaaggttagctgcagccctaggaactcagagagtgtgtcctggacatttcacccctagttggtgagctcctcaagggtagggacggtgtcttgtttatttttaaattcttggtgcccagtacagtgcctggtacacaggagatgctcaaatggctacccctagcctctgaggtcccactgcactcaaagaagagcagagctccaaatgaccttgtcatctttcccctattacccaaacctgttcaatttccccatttctgtttattaaagatccattttctcagttacaaagatccaagactcctcgagggtattctaccctaacggaaataggacaggctttgtagtcagacttgaaccctggctttggcgactactagctgtcctgcctggagaagttgcgtacccttcctgagcctcagttttccctttcattgaatcaggatgataatacacacttcattcatccactcagcaagtgtttactgggcgcctcatacacagcaggaactgttctaggcactgcggatacgtagacgtcaacaaaacaaacattgctcttgcctgaaaggggcttacaaacttgagagggggagacagacaccaatcaaataagcaagtacacatatagtatgccagatggcaatatgtgctagggagaaaaataacacagagtgagggaaaatggaatgcgctggcccgggttattagtgtcttactcaggtgatgaaggaagacctttctaataagaagaactcacatctggggaagaatgttcccggaagaaggagaagagcaaaggccctaaagcaagagtttgaagaatgacaaggggtcctgtgtggatgaagcagagggagggaaggaggaagggagtgtaagagaaggggacacagagatggctagagccagatatgcagggccttataggactttggctttttactctgggcaagaaggaaaccttgggagagcttcaagcagaggagcgaaatgatctgatgcaggttatgaaaggatccccctggcagtggcacagagtatggcccctgacctgtgtggatggggcagaagcataaggctggccatttgcatcccacaaatgacctcagtgtgagggatgagcgagatcatatacgaatgcgcttgcgtgagtatgcatagagcaagtgctcaagccatggcagcttctatcaatggccctgcagctgcctggctatagctccctggtctcctgcagacaagtcttggccagtcacgtgagtgcctctgtcattgcccactcagtcattccccctgcccccacctcctttcttcaacccttcactggtggttaagctcctagcacagcagcctcacctccagcctctccccaccccaacccaacccaaatgcaactccactcacatccttcccctgttcaagagtcttccatggactagtggctcattaaatccacattcttggctaggtgcagtggctcacacctgtaatcccatcactttgggaggccaaggcgggcagatggcttgagcccaggagtttgagatcagcctgagcaacatggcaaaaccccatctctacaaaaagcaaacaaacaaacaaacaaaaaacaaaacaaaagaacaaaacaaaaattagccaagcgtggtggcacacacagctgcttgggaggttgaggtgggaggatcacctgaactcagaaggtcaaggctgcagtgaaccacagtatcaccactgcactccagcctgagcaacagagcaagaccctgtctcaaaaaaaaaaaaaaaaaaaaaatccacattcctggagacttgcagctaaggccttccacaataagatgctgcatttacgtttcccacccataatcaactgctatcccaaacatattgaatatctgtggagaagtatgggtgggtgcaatatgtcactcctagcagaatcactgaggaaactgaccacactcatgatggaaaattgacggtaatgagtccttccctcaggttccccaaccccacaatatgccctaaccatggtggacatgtattcctgtctgtcactggctcacttctcccaccaggctaccgcaaactccacaatgatgtatattctcttaaagctacaaaatggcttgtggtttccaaatcagttttccttactgctcttatctcccttgatacttgcccctatgggcccctcatccataataaaatgccctcattttacacttactagttctgacaagagtcccaggttccaagtcatggattcccatgtgggattgctcctctgatccttcattcctatatcttttttcaatctatccacaattcacaaggcatcggtgtcagaccaatggcaaataataagtgggacctgctggctatggatggaagagcgaagtccctgacaacatgtttctaccagcctggaaatgaggctctcccatcccctaacacatctaccagttgtgatggatttaaaggctggctaatgttaagcttgttccacaggggatagaatattggcccctggactgacacctaccaccatgtggatcttggagcaagacaaaggagccccccaacattcgtgttctgaaataacaatgcctgaggctgtctattccccaccacggatgccaaagcacagacagccactcacagctgtgggatacagatgcccctgtcattataaaaggccagccctaaatgctattacagagtctaaaaactgaaaatgttattgtgaaacctttaggttttttatagctggctatgcctgatatagctggtggcctgggacacagtttccctactcagcgctgggacacctcggcaatactgcacccacagtgtcatccctatctgtttggaatgtacaattcttctacaacaccatgggccaggaatatcacatcatcctgagaagccatcaggacaaacaaaaaggaatgtggtcctgtatgtttagtcccacctcccctacaaactacttttatcatagaaatgatgcccaattgtcagcccagcgcatgtggtgtcctccagcaccccttctaaatgtgccctcaagcaccccttctgctttgtgcatctttgtgacacccttccagatgtcagcctatatctccatgacccaaatctgacttaagagttgtggccgggcatggtggctcatgcctgtaatcccagcactttgggaggccaaggcaggtggatcacctgaagtcaggagtttgagacgagcctggccaacatggtgaaaccccgtctctactaaaaatacaaaaaaattagccaagcttggtggtgggcacctgcaatcccagctacttgggaggctgaggcaggagaattgcttgaacctgggaggcagaggctgcaatgagccaagattgtgccattgcactccagcctaggtgacaagagcgaaactctggctcaaaaaaaaaaaaggtgtaccagcccagggagacaatggccacattgcaggtgatgaccacagcccagccaaccactgcatcctggaggctgcccaccagttacccacatcatctaccaagggacccccttgctggagcacaaacagcttcccttgggggatccctcaatcagcatttgtcacatacctgaaaagggtggccaccacacaggccaccaaagttataactctctcctctcacttcctccccattgggcacaataaacctcattgccattgtggctggaacttcccttcctgggcctcccaaagcaattctactgcctaaggctatctccgggctaacttgtatgtacacagagataaagccacatcccagtggctggacctcatgcaatgttgggcctcctatctgcccccatgagcaggccactcccttatttgcaccacaaaaccaccaacaccaaacacttctggtctaggctcctaggtcttgccctgtcctatgttggctcagatgttatccagtctggtccccggctcatgagtccagatcatacatctatccaaatgtataaatacatgcctatgcttgtatcttcctaggcccacacagcacaactagtgtcatggcccaccccagatattaaaggaacacaagagattggaagccccagagggaacctgcttcacctgttccactcctagataacttcttcctgacgtcccaaatacctaaactcacctgcacactgctaagtctgacaacccccttcacatttttctgactgttctgcaatttaaccctgctggtcacagtccccagtcagaggtgatgggcagtcttcctacccattgtcctgggtataagcatgacttggggccagaagagtgggactaaggtcttacaatatgatcacaccaggaaaactagcagatacttcagagaaagatccgaggtcctatcagcccacgtaacacaaaaaacagcagcactggaagctttcactgaagggcaaaaacccctaactgccagggtggcagataagagactagctccagatgatatgccagcttcccagaaggagtatatgctctcagagggcatagtgtatcctgctggacgtggataaatattgcaaggcaaagtaatccaaatagcccaatggatgtaccaccaaacagaaaccaaattctacatgtggtactctgaactccctaggacttggatgtcccctgtagcctggggtgaccttgttttaggagccctcctgcccacaagtagacttacatactgcactggctatgtaaaattggtacagcctatatacaagtatattagctctttggatggtgaaccaaatgttagggagtgaattttgaagaaattgagttgagtgcaaaaagttgctcccagcaaaatgtcatttgtccaaatagttaacacccactggggcagaaaccatcagggcaccccacccctcaccacccactcagccccactcacctctgcagcacctagtaatcatatgcaagaaaactcacccttactctttttgattgaccacccccagcctgacccccaatggagcagatcactcaaaattaatcttcccccactacctcctctcggcattattcaacaggtgggcccctgtcctatatctacgtaggtccccagcaccaggctctttctcctccccagaagtcagggagtcctcttctcagtggggccctcaaccagtggcttccctcgctgcctatgcctgcataagtaatacacctttgaattgcctgtgatcaccgggtcaggtgtggtgcgttttggcatccaaggcttttaaatgggagagaacagcagatctggttcctttcactggaatattgttatggtccaattctgcaaccagctgacttcattactacctgtgaactgcacctccagctcctccaactgaccccatacccagacccttacttgggctgtttcctaccagacacacctgctctgttaagaaaaccattattgaaatcaccggctgttaattcctactcagtccttagtagccctgtgagctggagcaagttctgtaggctttctgtgactcagtttcatcacccataaaattatgattacaatacttacttcattagggtgttgcaagggcctaaaaaacactctatgtatagctcaaagtacaagcctgacaacaaaggaagtttccagataatcgctcatcaaggggcaactcgattttctgcttcctccagaaagccttccatgctgatgtccatccactctgatctctccctaatccaatctgattgcagttttgatcagcacctcactgttgaccatggatttcttctccattacaaatgtgttcattttgacttccaagtaagagataaaggtcttggaaagaagtgattgcattttacctggctctcctactgactttctgtgtcatcttcctcttaattttggggagactgagtttctttctctgggatggcaaatacatggcctatgtgccaacactttcccatcctgaaacctcaggacacacaccagtgttctcatcttctctccagaacctgggtccagactcacaattcttcttaacacaatactttggacagtgtctactaacttatctaataaatatgttttgagtacttcgtaggtaccatcccccttggtcagtttctagaagttaaaacgttggacatcttgtatctgcacttatggaactcatcccttagtggagaagaaagacaatatgcaaatacacaaataagaaaatatcaagtagtgacaaatataatgatgaaaattaaataacggtgtgttagtgcctggggaggaggctattttttagatcaggtatccagggaaaggccttctgaggtttctcccttgatctgggagattgggtgtgggcctaagaatatgtattcctaacatgcaaacgtaggaaatttgggaaacactggcatagtgaatgaggtgagggcatagtcagaagacctaggtctaaattccgtctcctacatttatgcagctgtatgaccctgggaaagttattgaaatttctctctcactttcctcctctgtaaaattggaataatattactgatctcaggaggtttcttatcaggattgaataagatcaagtatttaaaatgcctggcacataataagtgctcaataaaaggtaggcattgtttgccacaattaggtctatctatttataaccgtaatcttttgtttgaatcactcaagagacaaatccaataaatgccgctaggtaatacggtgtctgcgtgttggcttttgcctcatgaagctcttcctcttgaaaaataaattttcaaaagacattcctgtgagcaagaatgcccgagtctaaggaacaagggtcatccagttctctagtttaggcatgtttgagatttgaaagggctttggcctaatttcctctcctatcaaatgggcaccaggctacctgccctttttcactcatgggggatttctgagactcagagggataagagatttgcaaagcgtgagacacaaacagttgcagatacagacagaacacttgctttctcagaccggcaggtgcatacaatggcaaggccacctgatacaccagtcctgttcatttggaaaagggacaactccttcacattcacaagctgggctggtaagtgaagaataagaagaaaaaaaaaagaagtcggcaggaagcagcctcttcaaccagcaaagaaaccgttagaatccatccctgcgccctgatgccaaagttccgcctgccccacccgtcacgctatcaaggacacccgcctgctatcagaaagccctgggggtctttttccctagtttatcaaggacctgtggaaacatttctctaactgaagataagaattttttttctctctctttctcctttctacttctagctgtctaaaccagagggttcctctcattttctttcagtaacaactgctctgaaaagaagatatttttcaacctgaacttgcagtagctagtggagaggcaggtaaggtgggtttcattaattcatttgttcattcattcatttcttccattattgtatgcttcctgcatgccagaaactgggctaagaaggctcttggatttaatcctgggcagaatgagcttgaggtctttggggaagccagactgcacttaacaattacaaaatgcggaattgtaaattgtgatctgaacttggagtgagagcatacatatttgagctgagagacagtgtgtataataattttttagatttggctcttgccctccaagtggacgttttcagggttaaaaagatgcctcagagcctagatgacttgctaccattccgtgccagccccgtctcccaacccaagtcacaattgcttgacccttgtgaaggcgaggatggaaatgacttgttggagtgatagagaggctagcataaacctgccaagacctccttcaagatttggttcattttgcaaaagttgccagataaaagatatttccagatggagggccacgcaggaaatacaaatggaatatttgttaatagctcttcctttgcgagatatgacccaaggcggccttctgcaatgtgatgggaagcactgtagcttgaaagcgtgagaggagtcagcaggcccacggcagtctcgaagtctttggaaaggggctctggcctgagcaggcattaaagatgctctgctcatcagagacgcccccttttccaccaccaccatcccaaatggagatgggacctgctatactctaagtatgggattctcagacaggagggcagatatctagaagaatattgagctccttaatgctgtggctttgcataataacaacctgcactctttttttctgtccttggagtcaaatgggcttctgcaaagaagtttatccagaagtcagggatgagcactattcgaaaagtcctaagtgggcagggattgccactgattgcactgaagaatgtgttggagctcatgagactggcttccccataacatttggttgtcgaatggttccacagatgaacctgagaagaccgtgagctccctggaacaatatgtaaaattttgcatgtaggaacagagctacacctagggaatggtctttaacttttgtcagatttgtttggggcgtgtgggggttaaatacgtacatcgtaaaatttaacatttaaccactcccaagggtacagttcagtggcattaagcacataaatattgttgggtgaccatcaccactatatagctctagaactttttaatgttttccaactgaaatgttttgtccattaaacaataactatcccctccccctagctcctggcaaccaccattcgactttctgtctctatgtatttgtttaagtacttcacaaaagtagaatcatatatagtctttgtcctctcaggactggcttatatcactcaatgtcttcaaatttctttcatgttgtagcttatgtcagaatttcctttctctttaaggtggaatcatatgtgtttgcatgtatatatatgatatgtatatatatgatatatatgatatatatcatgtgtatgtatgatatatatatcatgtgtatatatgatatatatatcatgtgtatatatgatatatatatcatgtgtatatatgatatatatatcatgtgtatatatcatatgtatatatatgtacacataaaatagtatgcgtatatcactttaaaaaatccatctgttgatagacacttggttgcttccactttctggctattgtgaatagtactgctgtgaacatgggtgtacaaatatttgtttgagttgctgttttcaattcttttgggtttatgtccagaatggaattgctagatcatatggtaattctgtttttaattttttgaggaaccggcataccgttttcaataatgcctgcaccattttacattcccaccagcaatacacaagtactccaaaccctccagatcctcaccagtacttgttaacacttgtgcattagccatcctaatgggtatgcagtagtatctcattgtagttttgatttgcatctctaataattagtgatgtagaacatcttttcatgtgcttattggccatttgtatgtcttttttggagaaatggagattcaagttctttgcccattttgaaactggattgtttaaatccagacagagcttgtcttgctctgtcgcccaggttggaagcgtgatcttggctctgtcgcccaggcagtggcacgatctcagctcactgcaacctctgtctcccttcctgggctcaagtgattctcctgcctcaggctcctgagtaactgcgattacaggcacacaccatcacgcccggctattttttttttttttttttttaagtagagacaggagtttcactatgttggccaggctggtctcgaactcctgaccgcaggtgatccacccacctcagcctcccaaagtgctgggattacaggtgtgagccacagtgcccggcctatatgttctagatcttaatctcttatcagatatatgatttgtaaatatattattccattctgtgggttgccctttcactctgttgatggtgtcttttgatgcaccaaagttttaaattttgatgtagtccaatttatctatttctaattttgttgcctgtgcctttagagtcatatccaagaaatcttgctaaatccaatgtcatgaagctgttcccctgtgttttctttaagaatgttatagttaccaggtttttaaaaggtttgtgacaatgcatgggctatcttcaataatgattctggagtggccttcctcaccaaagcaaagacactcagggctttgtaaatatcagtgtgaatctaggaactgggcaattgataacatggatgtgatatttgaaggcttcaattcaaaaggaatgattaagtatctccatatctatatcagtaccctgggagctagtgaagatgaaaaccatggtctctcttctccaaggacttaaggcaagatgttgcaggcacacacgtgaaattattgcattgcaaggcagaatctaatgaggcacctagctaggcactaggaccaagggctataagaactcagaaagggatcaccaccatgagcttcaggggacagagaaaccttcagggtaaagatgtagcttgatctgggtccacattggacaagatttggagaagcagagaagactggagaggaatttgtactaactgcaataatcattgccatttactgagcacctactatgttccaagcactgtgctctgcccactgcatacattatctcaatgactactcctaaccctacatttatcattgtctgtattttatcattcaaagcactgaagctcagagattttcctaagatgacccagatagtaagttgtaaagcagagacttgaagccaggtttatttatctcaaagcctctactcttaatcactctactattctagtaccaaagctttagaacagggagaaagcagacatccccgatagagagaaaagagtaacacagtgcacagaaatggcacaagcaggatatttaagatcagagaggagaacaggctggatgggaaggttcagggtccaggactgtgggatgtaaagttggatcaatggagtgagcaggattacagggtgcctttaatgggaaatttggtctcgacctgctagaatgacagaatcacacatagaatttcagctctaaccttccagtctgcctcttttctctataaaatgagaaaattgaggtctcaagaggttaagcaacttgtggatggtcatggacgatagggaactattgcaaattcttgagcatggtgttgacagggaagaaaacagtattccagatcagttagtgtggcagtaaaacacatgaggggtgactgaagggaagcagcaaaaactggcagaaaaaacaagcagctctttctctgtttttttttgccaaaggatacctccctcaacaatgggcattcctagggagcatcattaacaagattccagctctactccttcctgctgaggtttgtcgcttaagaatctggagacaggtagggtgcagtggcttacacctgtaatcctagcactttgggaggccaaggcgtgtagatcacctgaggtcaggagttcaacaccagcctgaccaatatggtgaaaccctgactctactacaaatacaaaaattagccaggcgtggtagtgtgcacctatagtcccagctactcaggaggctgagacaggagaatcacttgaaaccgggaggcagaggttgcagtgagctgagatcacgccaccgcactccagcctgggtaacagagtgagacactgtctcaaaaaaaaaaaaaaaaaaaaagaatctggagacagcttgtaggggcaagtgctatcagaaaggtcagaatcaccttcccctgccaggctcagtgccctttgatggcccagatgccagaaaacacagctgccccagcagcgacctgtcctcatcctccccacttcctccaatagaaagcctgtctagggtgcaatggcttagatcagagacacgtgactctgaagagccaatggccaggaatggcttctggcaccttctttatgttgccttcctgaatgtgagcctgggccaggcctctgtgaacctaactcacctgtcccatggaggccaccataccaggagaggtaagacaagacactccgttccccaggcaagaatgttgaccccaccttacttgaactaagcccttgtagggcagaactccacttatccatctatgtccagcaaagaaagccctgccctggttgactattgtcctctgaggttctctttgcttagttaattctaataatagctgccatccattgagcacttattctatgttgatcactgggctcagcatttggcatgcatgatttcattttattcctacaaccccataatgaagatattgttatccctgttttgcacatgatgaaactgaggttcagggctgttaaataatttgcctaaaaccatgtacttaaaggagccaagactcaaacacaagcctttctctctccaaagcctttgcttttactcatatgattgactgcattctacactttagtccttgtagagggtagaggttctgcagtggagagtcaggcttcaaagagtggccttgttaattccagacaccacctgtttctctgttcctgggagccaagagcctgatctctttcccaaaccaaactcttggttccaaatataaatggtatctggaccattattcttctcccagtaatgatgctcaagaaaaacaaaggaccttgaagttccttctacactttcacccagagggcatcatgcaggcatgctttggccaaggggaatggtgctgccatttgtacagtcattcttttaatgaatatttattgagggccagccacacgttaggcacgttctaggtgctgaagacacaactgggaacaggtcagaaagagtttccaccctcacagagtttacattctagctgggaggaaaggccaaaacaaaacacacaccaaaaccctgcacatacatctgtagtaaagagaaaatagtgatgatgctaggaagaaaaacaaagaaggataacggggatggagagtgaggagaagaaggattttataaagccctctgaggatgaaatatttgaacagagacctgaatgaagtacatgggagccatggggtgatccagggggaaagcattgcaagcagagaaaagggcaagtgcaaaagccttccagtaggagtcagcttggtttgttttaagaaccagaaagaaggccagtgtggttcaggcagacagagtgaaggggcatgctggagaaaaggacaggggggcagcagaggccagataatagggccttccaggccacagtgaatttggatctcaaatatactgtgccggggtcccaggcactgtggtgtgtcactcaggtgtggcacctctgcatagctacagagaggagacaggctgcctaaacaaagagcacaaagacagctcagtgagtcagctcacctggctctgactcccaccttgaacttgaagcagcaaataaagctcagggtttggtacccaaaggagaaggtgggggaaggtttgacaatggcctgaggtggaagaaggagctgttgaccctgtatgtctcatttgctttgtccatcaaagggtctgaattatcaatgggtgctcaaactttttttttttttttttttgagaaggagttttgctcttatcgcccaggcttgagtgcaacggcacggtctcagttcactgcaacctctgcctcccaggttcaagcaattctcctgcctcagcctcccgggtagctgggattacaggcgtcagccacctcgcttggctagtttttgtatttttagtagagatagggtttcatcacgttggccaggctggtctcgaactcctgacatcaggtgatccacccacctcagcctccgaaagtgtcaggattataggcgtgagccacctcgcccggccgcccaaacattttaaagttagaatctctttttataagcaaaattttccatagaaggtgactatgtgccactttcctctccaagcacctgatctgcttcatttcacagaatccttagaacagctccacgagtaggtactctgaatactcccgctttacagatgtggaagctcaaatgcagagaggttgggcaacatgcccaaggtcaatgaatgcagaactgctgcagtgggagcaggggtgggtgacacccactagggaggtgctttcaaactcctactgctccaaggagcaagctagaaaatcccacttctcaggccccttccactaggacacactatgagcttaacactgctaagaactcactgaggaatggtgacatttgggggcggctccttcagtgctttgtttggcttcttttttaaattataaatggtggtttgaaagttgttggaggggaaaatcagatgaaatcagggatgtggctgaagcagtcagtgtagcagtgtagcagagaagcagagaagctgtcagcagcctacccaggccccgaaatgggcacagccctgcatttctggcctgaggcttgccgaggtcttaggtgaacttcagctctttctacagcaccccagtctcagcactctttggtggatgtcctgattggctgggagattgttgcttcctgatacagtggtgattacttctgaaagatggggtaataccaacagctatcgtttctgaccatttactgtgcagcatcactgtgcaaagtatttttatacatatcctattgactcctctcaaaactcctgtgaggcaagcaggcaccccagtggcctcatcctagttctggccctggtgacattatgattgcctccatcctccatttgataggtacagaaactgaggttcagagaagtgaagtaaattcccccagatcacgcagctagcaaacagctgagcttctatgctcatcctaaggctcggttgaaatggattttttaaaagatgtattttgggctctttactatatagaaaaccgaatctgtttatcactaaggttactaataggccttacatctgtgaaaacttatctgtcagctggccctgaaatgttctgaaatgagtctgagcacaggatgcctgtgacaaccgaatagtttaaaaaaattctccatgggagccgaaaccctattaagacaggtctttatttttgttcctgaatgccacatttagaaacaaaatgtcatatttttgtatatgaatgtcacaagtgacaaagcatatgttgcaacttggcttctaatggttgaaaaaaaaagagaggtaaattatcataatgttgggatcttctcaattatatttgcattttcatttctatcagaagtccattttagcaaaggaatgtaaccttagtcacttgaaactgctgttcccttagaaaacaattgtaaatgtaataagcaaaaaggatagaaaatgcccacaggggaaaaaaatgatccatctggggtcagagccatcgtgtagattgattcattcttcttctagcattcttattcaggaaggaaaacttgaacattttctagattttaggatatttaagatttgcaaggaattgggggaaagggaaaaggaatgaaatttcagtcccactggcagggatcaaatagagattttctcaacttttaaaagaaccgttttacatgtcccaatcacctcatagttcctgagtctctcttctgcataaggcatgtactagttgttaagggaggatacaataaggtcatgattgctttaaaattattcataataaaaacacattttgagacttgattctaaatgttaaacttaaatttgagcaatttaattgcccgttgaataggaatgaaatcccaccggtaggcagttatttcttacaaccactgtgtgtgaaattgaaatcttaagataccatttcaaatattcaccttctctaaggaagttctccccaaagagttgtgaaagataagaaactgacccaaagtcatatgcagtaatctctttttctttacacactcaggtcaaagtagaagcatattattaaaaagaaacgttatgccctgaatttggctgttctgaggttacctcttggaacccaaggatatatttaatttaaaaactgacttgagccccatgcaaaactgtgacaaggaaagtaataatttatcagattaaataaaaacaagcagatgtggccaggcgcggtggctcatgcctgcaatcccagcactgtgggaggctgaggcagatggaccgcctgaggtcaggagtttcagaccagcctggccaacatggtgaaaccccgtctctactaaaaatacaaaaaattagctaggcgtggtggcgagcgcctgtaatcccagctactcgggaggctgaggcagggaaaatcgcttgaacccaggaggcagaggttgcagtgagctgagatcgcaccattgcactccagcctgggtatcagagcgagactccatctcaaaaaacaaacaaacaaacaaataacacccaagcagatgcaaacaggtcatttagtcaccacgataatgaacgttaaaatggaaaacacttacatgttttatttaggagaagaagggggtgaggtgaaggaatcctgtttcctgcttttaaaaaacaggaaatagtttccaaatttgggtgggcaattcttattttaaacccccatttcacctttaaatttaatttcaagctcttttaaaattatcttaatgatgccctttactataacatagcagctgccatttatgagtgcttactatataccagttgcttttcatgcaagcaacttcatatctgttattacccccatgccattacaaatctatgtgccacccttttgtgcactaactcatataatccccacaataacttaggcaataggttctgtcgtctccattttacagatgaggatactgggagtttatttgtttgtttgtttatttattttgagacggagtctcactctgtcacccaggctggagtgcaatggcgcgatctctgctcactgcaacctctgcctcctgggttcaagtgattctcctgcctcagcctcccgagtagctggggttacaggcatgtgccaccacacctggctaatttttgtatttttagtagagatggggtttcaccatgttgggcaggctggtcatgaactcctgacctcaagtgatccacccgcctcggcctctcaaagtgctgggatcgcctcggcctctcaaagtgctgggattacaggtgtgggccaccgagcccggccaggatactgggagtttaaattcctgctgtgagcccaggttgacacagctggtcaaggatgggttagaatccaggtagtctgactccagagctactaccgcatactgcctcctcagattaaataattttcctaggacatgctaactgataagtaagagtctaaatcaaacccaggcagttgggttccaaaattccagcgtttaaccaccacattgactggttataagtaggtaaactgttcatcacaacctatatatttattttcatttctgttagaaatgaaagtagtgtggtaggttacatatttatcacatagtttaggcttgcctaaattctaagtattttcttttttaaattaaaaacaagggtctatcggaaaaaaaaaaacccaacttttttttttttttttttttttgagacagggtctcactctgttccccagactggggggcaatggtgcgatcatggctcactgcagcctcaacctcctgggctcaagcaatcctcccacctccgcctcccgagtagctaggatttcaggcaagcaccaccacgcccagctaattatttttattttttattttttgtagaaacggggtctcactgtgttgctcaggctagcctgggtctcccaaagtgctgggatcacaagcatgagccaccgagcacagccgaaaaagtctttttgtatactgaagtctccactaggacaaaaatttgctcttaaggcttcctttgggacacacacacacacacacacacacacacacacacacacacagcttttgattatacccattagggacccaagccttgggacacagggaccagaaaatgacaagagcatgcaggcagtagtaaactctggttatccttaaaatgggaacagaaatgtatgcctatgatccagactgatcatataaaaccatggatcctgaaagtacgttccctctttacaagccttaatgactggcatcacgcacaaataggcctttcagcttctgaacgcagatattttcaaggaactctgaggcccaggagagcctaagtttttctccacggaagggcaaactactagcctcccccgcttcccctctgcgttcctgcctctttctagaaggaggctgagagggggaagcctgaacccccaaatcaagtccgccttctttctctgtgcctgacccagggcaaaataatctctctgatcctgttcttgaccattgaaaaagcactttctctggtcgggatactactggcactttacatggggggcagtttaaccgcaggagtccgctttctgaaaggtgcagagggaggggattccgccaccagccgactgagaggagccccggccccgcgtggtccctcccagccaccctccctctgggattagctgccctggctctgctctaggcgtccccagcccgtgcagtcccggctggcgcaccaccatcgcctctgcagagcgcggccgcagcccggagcccgcagcccggagcccgcagcctggggcccgcagcccgtagcccgcagcccgcagagccgcgctgtccggggcatcccagtgcacggcgtccgtggacctgggacctcgaacctgggacgggcggaaaatccactgggaacacttgcatttctgtaggtgcttatttcacattcttgtcttttcttgcttgctcgagctgttcgtgggttactttctgccttagttaaaccaaaagggaaaggcggaagaggggaagccctgaagaatgatttagtggttgcccagcctcctttccaaggagaggtgttcgctgagcggctctccccgtccccgacactggcccctttaagaagccaagtcagtcctgatgctgctgtttgtattgctaatccccaggagccccgtttaaaaaaaaaaaaaaaaaaaggaagaaaaaaggggaggtggggggaccgggcagctgtctctttaaatgtgatttccttctattgtatttgaatcgtgatcaggaaaaaggaaatgaaaccagagacagagggaagctgagcgaaaatagaccttcccgagagaggaggaagcccggagagagacgcacggtcccctccccgcccctaggccgccgccccctctctgccctcggcggcgagcagcgcgccgcgacccgggccgaaggtgcgaggggctccgggcggccgggcgggcgcacaccatccccgcgggcggcgcggagccggcgacagcgcgcgagagggaccgggcggtggcggcggcgggaccgggatggaaggttaagtcctgagcagcagcagcagctgcagccgcctggagccaggctgcgcgccccggcccccgcctcggccgcggcgcgcccgcagcccggtgattcgctctctctctttggcgtttgaagggagcgcggtgactgtccttgagcgcggaggggcgagctcgccggcggagcgccggagcaagcggaggcgcaggagcggcggcgacggcggcggcggcggcggcgcccgagcacccgagggggtccgagccccggcagccggccagccccgcgccacaaagggagcgcccccgccgcccggcaccccgcctccctccccaatgtcctcggccatcgaaaggaagagcctggacccttcagagtaagtgcggcccccctgcccctgccacccccggtgtccacggcctcgcgtcccggagcgtcggggggacccgggcggcccgcgagggggctccaggtgcgcgctcgcggcgtgcccttggccccctgtgccgagcgctgggctcctccttcctcccgggtgattccgggggctctgggagagggactgggcggcgggcggcagggacaggggtcggcccggcgcctctgcgggccactccaggctactgggacgctccccaaagccaccacgggccagaaagtttgcacgggagcaggcacgaggagagcctggaggcgcgcaggtgcagtccggagagcgttctgggcttgactctgctcccttcttccctctccttctcggtcctttctctttgtccatttggtcttggaaaggggaacattccaagtggcggcctccggggtccccaacggccgccttcccggtccgcaggtggagccgctgccagccttgcggataacgggcgggtgaggggtccgaccgtccacctcggagctggctctgggcctccagggatttctagagcagcgaaatccggagtaaatctgagtaggtgtacccctcctcggggtccaccgatggggacatgtgaacctcgaaagttaatgcaccattttgtgtataggtgaattattctggggagtagagtctcgtagtttttagcagagtcttaaaagggtttggggtcagggaaccagagctctaatgagcattggccgcatctgttttctgagccgcgtactggtttggaatgtttttctatccctcacccattcttcagcgttaacatggggagtaaggggtgtttaagatatcattttcctgtcaacgcaaatgcccttttaagagtcattagctgtctggttttgagaatttttattcctttgaagtccccctctaatcctttgaagggatttgttacacaagaccaaaggagctggttaatgacttgtccatttgtgcttttaagagacatttgttttgttttttcttttcctgctttaaaagaattgtgctttcctgcttgaaataccgcacacacacacatacacccttcaatttcggctttctatggtgtttatttacctgggttttaccctcagttaccagcataaaagctcaacatattctcataaaacacaggaagtaccaccatccaatgagaatataaacatcactattcagtcttgaaggttaagacaccagttctgtaatgagctaggtttgttataacaaaaacccccacttccttcaacaaattctcaggagaaaaataacattcctttttaaaagtatgtttatgcaaacaatgggtttaaagggtggtttgatcacttttttaaaataaacttaaaactgagctctgagtttcagagactgggcaagatcatagtaacacaataagggagtgaattggatgaattggtgcctcatgcctttttgatcagcagaatttagtcactaatcctttcaatagaagattaatctgaaggtttcatttccctgaaggaagtttgcttctttcaaagtttgtgctttttcactgaggttagaaactgaaacatcctaacttcctaatacaacagatatctactgctggaggctcaccagctccttccttcacttcactatttgcccaacgaagacagattctgatcaaagagggacaagccagttgagaaattgctgcagcacattctccccatgcccttagaaattgttatgattgtcccagaaatccaggcttaaatgatactcaggtgtaatattcaagataagggtctgggagaatataaaatattaatttgagggtgaatcaatctaattcagtcattgtcttggattgtccactaagtataatgtgatattatcattaattaagtatagaaagacagagccaatatcttatactttacttctccatctcatctcaggccatcaccgtaactcttttactttacattcctcctgttgtccagtatcctactagatgcttcattgtgtacttcctcaaatccagcttgggtcattacaatcagcatctccaaattacagatggagacttgcctagctatatgcaaatgaaacatttggacagaaagccagccagaattcatgaacacagattcccttgctgtgctactggtggcccccactgcctcccctgtgagtaacaagagcagttcatttgaattccaggcagttttgcaccagctaagggcaaattctcttctttcacagtcctttggcagcatcaacatcgggacatccaatgtgcgtccaggttccatgagtggttttgaaagcccagagtaagaccatgggctgtggaaagagaagagatgcaactctgagttgatacacatgaaaaagctagggtattagttattagaaggggaaatggcagtccttatatacaatctgtagaaacaaaggaaagaaagcaaggcttcagtgaatgaaacctcgtctctacttaaaataaaaaaaattagctgggcctggtggtggacacctgtaatcccagctattcgggaggctgaagcgggagaatcacttgaacccaggaggtggaggttgcagtgagccgagattgtgccattgcactccagcctgggcaataagagtgaaactgtgtctcaaaacaaacaaacaaaaaactatagttttgaatttttttgagctagggtctcactgtgttgtctagtctagagtgcagtgctcactgcagcctcaacttcctgggctcagatgatcctcccacctcagcctcctgggtagctgggactactggctcatgccaccaagcctgggcaattttttatatgttttgtagaaacaggattttgccacgttgcccaggctggcctcaaactcctgggctcaagtgatcctcctgccttggcctcccaaagtgctgggattacaagcgtgagccactgtacctggccattttttttccccagataaactaacttgagcttcccattttcttgttccaaagatgatagtctcatgaagtgctgttacactgtgtctagaaagtgtgggcatggctttagcactcctaaatattcataaggaacacttcatacttcacatgacgggatcacctgaagttgtcagagtgttatagacattgagccacctagcctcctgtccccaagtataatggctgctgggctttatgggcacagaccaattaggacacaaggtcgcctggtaagttagtaccagttagaaataggagacatggatttatacctgcagggtacccaggaggaaactccctttgggaattttacagatggaagaaggtctgttttttgaaacataatagatttttaagaaatagatttgtgtttaagtaaggttccagagaacacttgctaattattataaatcaacacgtattaagtgtttgctgtgtcccatgtgggggacactagaataattccttccactcctttattttcttttagcaaagttatttatttttaaatgtaaaaatgtattcagattccagtgaagcaaagtgaacaggagatgctatgcatggcgtattaacgaaagaacacgtgtcacagcctattaacaattgctggattgagatgtcagtgtctgtttaattgccttccactctctttgaaataatcattgcccccacttcattttcttcctcaaatcaactttatccaaatcaattttactcttataaaaatgttcaggtaaggaaagaaaggcctatttgatgtccttcgtgtaacaatggccttacgatatgggattttcctccaagtattccttcagtaggaagaatggaaaatggaatttctgtaaaaaagtaaaattaggagaattcctattatgtcctgatggaattttgattttggaaagagaaagcaacctaaaataatttttggtctcattcttctttcttcctcacctctgcttttgtgcagttggttagggctggagggaggatggcactggggatttgcagattcttagcactctgggtcatctgctgccctggcagtgagcgactcttttagtccagagtgcgtcctttgaggttaggcagtgcccttgggtgtccaggttatgggaggaggaaaatgagggagatctgtgaagatagagtcagcggggagagtgggaaaaagcagaaggagaccagaggtgcccaggtagtgctgggcatgggcaggggcacagtgccacctgcaattgcctttgatgcctcttggtgccctgtgtttacttcttagacatctagggagtaaggtctggctctttcccgtcttaacccaaggttggttgggactctgcagtctggccaagggatgtgttgtcctgtcccttctcccttaggtcactgaaaggcagtcaggtgagatgccctgtctggcccaaaacgatctcggaccctcggtgctggtctcactctggtgaggctgtccctgatgcttggccttctctccagggaaccagtggatgaggtgctgcagatccccccatccctgctgacatgcggcggctgccagcagaacattggggaccgctacttcctgaaggccatcgaccagtactggcacgaggactgcctgagctgcgacctctgtggctgccggctgggtgaggtggggcggcgcctctactacaaactgggccggaagctctgccggagagactatctcaggtaccctccccggcactccactgggccctcggaagggaggctgggtggtccatggacatctgcagtcggtgtgtgttgccccttaccctgctccaggctcggacaccacctatagaaagaggtcagactgcagaggctgagtctcagctcctgtgctgagaagcagagggcatttcttcctgtttgagaagcatgttctcagggttacgttcctatgtggtaaaatactaatatctttaaaggcaagagaattgtatacccaaaattcagaaaagtgcttcccttggggagcgggagaagctaggggatgggattgaggaggagtacacacggaggatcagagggactgggagtgtttctaagtttggaggtgggctctgaggacctcatttgaatgcttcagaacatatatgtatgttataaattttttttgtatgactccagtattatatgatgagaaatttaaaaatagaaagcatatggagctccaagcattgactcatagcaggaaggcagtcttcgaagagcagaaaggcaaaggccctgtaggcagttggaggtttgagtcccaataccattgcttcccagcttggtggccttgggcaagttatttaaccttcctaagcctcgatttccttatctgtaaaatggggatgataatagcacctacctctaaggatgtggggaggatttgatggaataatgcagataaactacttggcttggtatggatcaaatagatgttagctgctcttacataatcattattttccaatctaatgagcaaagggatggaagaatggaagagtaaaataggaactcgacaacaccaagtaagacaggagctgaggacatctcccatgctctgggccatcctattggccatccgaattttccagcactgtgtgaaagcctttgcctagaatgtactagtgtttctagtttccgatgagctgctgtggaggtaactgtctctgtgccctctactgtcagatctgctcaactgtgtagctgtcagtatttctccgttttcctggagcagagggtctgtgaagcatgcttccctgatacaccaggaccatccaacccatggaagcttgttgagacctcagcgcccttggctgctgggccagcttttcctcccaaacctgccctcagagcattttacattatagaaacaaaacaaaaccaaaaaaactgcaggcagtttcacagtgaaggaagctttacctaaagactgttagaagaagctttttgtccttgaattcccagataaagttcttgcagtccttgcagatatggtggttccgagaaaataagtaggattttgcaatgatcatgcttataattttggtcagttttcttttttttaagtcacagaaaatagaacttggataaatacagacctggttttgctcactcccagtttgccaagtcagtgagagggcagacgggtaaatgattcccatcggacccttgactccatccctgtcaaatcatttgaatcttattaactgaagtgcagatagagtaaggtcagaagagccccagcttctccctatctctaccgttttatataacattcaggaataaaaccagtgctgcctgggcttgttaatcctttccattttcaaaaaggagaggaaaaaaaaaacagtctgggagaacccaatgttaattaacttgtgtcttggtgacatgaaataattcttctccctgccacattcctaggcaacatgttaattaactctgcattagtgcaggcatttccagccattctttaatatttatattattgttattaaaatgggcagcagagagcttaagatgggacatctcttgacagaggagaaaaattgtcttttgcgtcagggatggtcctttagccaaggtcttgtttactggcattcttagtatatctggcaggatcttttaacaaggcaagttggaggagtaactgaacgggccctctaatgtgtttgagttcttcacccctaggataacttgtccccgtgaggatttccaatggctgagttgcctgttacagttcttttccgacatttagcttcaaacattcatgagacccccatgcagaacctcaactctgctgctgtgttgtattgttgggaacccaagagcagctgttcatgtctgtgctgagccagatctccttggatcccttttcactaattcttgtgtgctgggagtggtggggtggcggtgatggcagtggttttgcttttaacagccagcacctgaatctgttagagccagaagtatgcctgccccaactagacccccaacggaccttaaccagtgacagacatggtgggagtaccaagccccgcagccttgcctggagccaggcataacttatattccagggtccctcccctctgagggactttgcctgaggatacaacttggcttggcttcctccccttccctccagcctcccctgctgccttccaggtttttcctgagaatgcctcattcataaatcactggcacatcaatccttgcctcaggggctgcttctgggatatccagcctaagataccaattcttggtgccagaggttaatgctcaagttaggtgtcaagtcccggcttattttttactaatattagaatctccgaatcccagagctggaaggggctacagagaccttctttttcagttcccttgctttatggcttaagtcacagaagcctgtacaggggactccatttgctcaggtcacctggcaagttagaggtcatgctgggacctgaacttgtctcccacatattcgtcctttgtccttcccttcatagctgcctgatgtgggttgtaatttaccccctgacttccctttaataagctccctccttccttaaggatcgcacaccccaggcagttggattcattccatgcacactgttttctcagtcgttcatccttgctcaggcccaaacttaacttacagagcagtcaggaaaccagaactgtctttccactctgtgacctccaatgtggcggttacctgcagctccaccatctgctacgttgggataaaatgttctccccccagtaatgagtttgctcccaggcggtgctttgaaaacactcagagatcttcaaatggaaagcaggattcagaggcaaattagctggccctggcccgaacaatgagctctccactcacagaccacctcttgtcaattccattaatctcgcccaaatattgcaaaatgtgtcaactgcccttaggtcccctacaacctctcagaatgtacccactgattctctgatatcctgaaatcaaccagaacttccaataagagcaagcattcacctaaaactgtcctaaaggttttatgtagaaaccacctgctaacatgctatgttttcagccacgagtgaaaattacttcctgcagcaagactggcacagctgggaatacacccaagatgtgttaaaacataaccagcgttggcttagcccttgaccatgggtgccctgacatgcttcgtttggttgttttaacagctgagtgaggtggagcctatgatggctgccatttcactgaggctcagagaatcagaggtctctccagggtcactcagggctggtccgggacattgaagctgggtcttctctgcttccggtacttgtgttactgcacttttgctgttgattctcaaatgtcagcctgcaaccagtcccccggaagtgttcattaacgcacagactgctgggccttctccccagggtgtctcagttgggtagggaaggaggagggctgagaatttgtttttttgtttgtttgtttagtttttgcttttcttttgagtcaaggtatggctctgtggcccaggctggagtgcagtggcatgatctcggctcactgcaacctccacctcccgggctaaagccatcctcccacctcagcctcccaagtattaatagctgagactagaggcatgcaccaccgcacccggctaatttttgtattttttgtaaagacacagtttcaccatgttgcccagggtggtctcgaacttgtgagctcaagtgatttgcctgcctcagcctcccaaagtgttgggattacaggtgtgagccactgcgcccagcctgagaatttgtatttctgtcaggttcccaggcagtgctgatgtcgctggtcccaggaccaacactttgagaaccactgcactgagccctgccatgttctgtctcccaccttgacactgaatactgcctgaaataagtgactgatcaactgaggcttgggagagtcttgatttaaatgtcagaaaagaagtttcccttttgattcatgccagtgggcagcgagggccatgaattaagatcctcccttcatggtggagagatgctgttggtcctccatatctcagaggcacgattagctgcaccgcgtgttttctgtggaactccctgtctcccagcagctggggccccagcgaataatcagggggagatgtgctttgcagcttatggaggtattcaaggccagctctccccatgggtagaatcagtggctgttgacatgatagagtttgggagcctcagaagaatgcccgttttattgcattcctggtcagtaccctctcaaaggggcccctagggtctctctccagctgctcttctgaaatgagggttcccctgggaggggacaggtaatacttgcctaactccttatgatagatcacatcagctgagagccttgcccacagaggaggagccagggggcagcctaggggaatgatgagcggttgctgcagacaaggagagggctcagaaaagggaggagttatgccagatccaaatgccagtttcatctgagttccctctgcctgctggtgaagactgcactagccggccctccttctggagccgaccttccctggcttcctgacatcctgaaagttcggcctcctttctagggctcatccccgagccctgtcttccaggattgtccctttcactgtcttcttagcttttctttcttttgccccaggctttttgggcaagacggtctctgcgcatcctgtgacaagcggattcgtgcctatgagatgacaatgcgggtgaaagacaaagtgtatcacctggaatgtttcaaatgcgccgcctgtcagaagcatttctgtgtaggtgacagatacctcctcatcaactctgacatagtgtgcgaacaggacatctacgagtggactaagatcaatgggatgatataggcccgagtccccgggcatctttggggaggtgttcactgaagacgccgtctccatggcatcttcgtcttcactcttaggcactttgggggtttgagggtggggtaagggatttcttaggggatggtagacctttattgggtatcaagacatagcatccaagtggcataattcaggggctgacacttcaaggtgacagaaggaccagcccttgagggagaacttatggccacagcccatccatagtaactgacatgattagcagaagaaaggaacatttaggggcaagcaggcgctgtgctatcatgatggaatttcatatctacagatagagagttgttgtgtacagacttgttgtgactttgacgcttgcgaactagagatgtgcaattgatttcttttcttcctggctttttaactcccctgtttcaatcactgtcctccacacaagggaaggacagaaaggagagtggccattctttttttcttggcccccttcccaaggccttaagctttggacccaaggaaaactgcatggagacgcatttcggttgagaatggaaaccacaacttttaaccaaacaattatttaaagcaatgctgatgaatcactgtttttagacaccttcattttgaggggaggagttccacagattgtttctatacaaatataaatcttaaaaagttgttcaactattttattatcctagattatatcaaagtatttgtcgtgtgtagaaaaaaaaacagctctgcaggcttaataaaaatgacagactgaaa

SEQ ID NO: 336 - DNA, 20082 bp, Homo sapiens
  source 1..20082: mol_type = genomic DNA; note = NC_000004.12:c109730070-109709989 PLA2G12A [organism=Homo sapiens] [GeneID=81579] [chromosome=4]
gcacaggggacggttgctggcccaggtgagcgggcgcgctggtccaggtgagcgggcgcgtccccgcgacggcgctgcctgcccgaggcggttcacgtaaagacagcgagatcctgagggccagccgggaaggaggcgtggatatggagctggctgctgccaagtccggggcccgcgccgctgcctagcgcgtcctggggactctgtggggacgcgccccgcgccgcggctcggggacccgtagagcccggcgctgcgcgcatggccctgctctcgcgccccgcgctcaccctcctgctcctcctcatggccgctgttgtcaggtgccaggagcaggcccagaccaccgactggagagccaccctgaagaccatccggaacggcgttcataagatagacacgtacctgaacgccgccttggacctcctgggaggcgaggacggtctctgccagtataaatgcagtgacggtgagggggcacccgggcccagcgagggctcgtgctttcgggggattggggtgacggagatcctggaggtgtgagtgacagatgcaaggcagaccttgacggtgtccttcggctgtggaaaaacttaaccactgctagaatcttgccgttctagtgattgagcaagctgggtacaagttcgcaccactattgttagaatgtgagaggtcacattctaacggagaggtgtaccccccgtcccatttgcattgcttctgaattaccttttccccccctcaattgcaccaagttgccgaagaacttactgacgtaggaatcatgggaatagagtggaacagactggttttagctcatttttgcttctgtaaattggatgaacatgcgaagcaaactgagaatttaaaaaccatgccgtattaactttctctataattgatattaaatggttttttttctgcaaacccatagacaataacttgcgacctttgtacagacttttggtgtactcgagtgttgagaaagggttccgataactcttctttccttagatatcagtgacccgcctcctcctcattgttggttaacgttaatacagttatcttcatttactcttttaatattttttgaactttctctttgaacctgagaatttgtttggtggcggtatgagtactaatcaactcagtatttcaggcagagatagttcttttgtagcacatttttgagtgcttaaatattttaataggtcagaaaaatattggacttttgtttggaaattgaaaatgttaagagagcagttgggagatcatgtttccaataagattagccaaggttagagtctcattatgctggcagcggaaaataatcggggatccagtgacttcattgttggaacctgattgtataggtgaacttaaaaggaactggtatcatgtaaacctatgatgccacatgctgcctgcaattttcaagataatttctagttttatgttaatagaagtaaaggatgaactgtatcttgtatactttaaagcgctgaacaggtgctgagacatgttgcattgcttcttaaatttgtgcctaaacgttaccacctaaacgtatgcttcatgaagatgtttttattcttgtagaacttgttcggaggattaagtgcataatttaaggatcaaatagttgcctttcctaaagcaaatgttacagttttacttagtcattcctattcattatacaaatatttgagtcccaactgtgcttcagatgttgttctaatttgagattcagcagttaataaaacagacaaaaatctctgtccgtggagcttgagttctggtgagggagagatgggcagtaaactagtaaataagtaaaattaggggaagtgtggagtctgatcagggcagacgaggggccatgttggaggcaatttactcttctaaatgggttgttcagcaaaggcctcactgatgaaagaatatttgagaagaaatctgcacgtggtaaggggagggaatgtggttatttggagaaacagcattccagacagagggaatagcaagtgcaatggacctgaggagaaaggccagtcaaggatgactctgaaggttttggcctgagccaaaggaaggaaacggttgccatttacagagatagggaagacttggaaggagtcgtcttcataaatttattagtctagggttctagagtttatttacatttaaaacatgcctgaagttgaatgaataccagccttgttaaaatactgttttagtctttttattttattttttgttaatatttttgaggcaaggtctccctctgtgcccaggctagagggcagtggtgtgatcattgctccctgcagcctccaactcctgggctcaagcaattctcctgcctcagcttcccaaatagctaggactataggccatgcccccactacacctggcttaatctttctttttaatctttttcatcttctacaggcttctcaaaatttactatttggagtttagaggaaggtctctggcacaaaaaaacacaaaggaatttgagaatttaagaaatgttatatgcctcagtgaaaaaaaattttttgtcttagtaagtactctacgtttaacggacatgtggtttcaagtccaagtcaccatactgatagataattggatctcaatgaaaaaaaaaattaggcaggacgtaatggctcatgcctgtaatcccagcactttgggaggctgaggcgggcggatcagttgagctcaggagttcgagaccagcctggccaacatggtgaaaccccgtctctactaaaaatacaaaaattagctgggcatggtggtgcacacctgtagtcccagctacttgggaggctgaggtaggagaatagcttgaacctgggaggtggaggttgcagtgagccgagaccgtgcctccagcctgggtgacagagcaagactctgtctcaaaaataataataataataataataataaaattgctgttactcgagcagtctctctggaacaattcaacctttcctatattttggaattcaggtgaccaaatcagaaccaaacagaacaatcccaaatctggagaaacatggtgattaaggggtatttttagttgcacgaaagagatcaagagagctttaaaaaaaaaaaaaaagagtgagttaatggtagggagaggttggtcaaataaagggcacatgtccttgctttacctgagggactggcattatggagacttgctcccttagttttggccatcctctcttgggtaggaaaaaggccttattgagagttaagtatttagggaaataaatttgatgatccgttattttcttcaacttttttctccctgacagcaaggaagatttaaggaagaaaacttttcgatttcctttgaaaaatagaacacaaaactggcttgtaaatgtttttagaatgatgaataagtcattaattaattcagtgacgtatgttttctaggatccctctggctgttgtgctgagaacagaaggggtcaagggagtgggggagtaaaaatggaagcagggtgacgcatgcaggagtccagacaaaagacgggtgattttgctcaggttggtagcaacagaggtaatgagaagtagttggattttggatatattttgaaggaaggacctaaaagatttgctgatggcttagaagttaggtatgagttaagtcaaaaatgataccacagtttttggcctgaacaactggaaggacagaattaccattaactgatatggggaagaccgtggaaagaacagttttcgggcattaggaaaaataataacacatttgtatgcttttgagaatggttcagtggagagtagaaatactgacgagggagagaattattggagtcatagccttgggtaagtgagagggggtagtttctagtacatacttagagagtttggccaagagcatatagcatagccctgttaataggaacacaggtagaggatatgagcactggtgctggttaagtgggtggatgttcaagttctcctgattgcctgcttttttcagtaaagtaggaatccaggtcatcagctgacagagaagatggggaatggggatgttggagatttgaggaaaatataaaagtgaacagactagaaaaataaagtaatataaggaccttttggagattaatgatcatgaatacttaaagtctcaagtgtttgggagtgcaggttggaatcttacaaaactctgccatgagacctttgtgtgacccagcagactacttcttgtgcttgtcatctgcttcatattctgtcaggtgaaaacagttggtctatctggaagtatttgcatcaaatttagaaaaaatacatggaaaataatcaactttgtctcagtctatgaaaatctttagatttctgcagtccatacaaatgataaacaatcaagagaaggagctattgcttaagtcaaaaatggaaattaatgaatagtctttccatgcagttgtacacagtggatttggtttgtatccgcttacaaattttagaggacaatggccgcaacacatcatggtgttttgatgttactctgattttgtttcttccattattgagtttttgctttatttgtaaaaactggcaccagtagaaatgctaatttttaaaatgcttagccatttataaaactataacaaaatttaaaatattaatacatttgtaacattggtgtctgaatcaacttaacctctaataaagaactgtctatataacttgccttgttcagaaataactattttaatttaaaggtgaatttagaatttcaaaatactttagaatttctcaggaaactagttacttccaagttttcagttttttgctgtggataaagaattattttaatttcatcaaagaatgtttcccattttttaatctggtaatttattgggtgcccactgtgtgctaaatatcttctaggtgagcaagactaagtcctttcttcatagaaaccgactaatgttaatgttaattaggtcaataaatgctagaaagagagggggtgctattttagattgggtaagcagggaaagcctctctgaagaaatgacattaggagtttgccttgaaaaaaactaaagaaccatacacatatgccccttttgccatttacactggggagccaaactttttaccagcatttatttcatggtgttattatccagtttttcatgtacagtagatgttggctctttattacttgatttttatcaacttttcttcttcagacagttataaccactagccctgtttggcacagcagcctcctacttccttgtacctccattctcatttttgccagttgtccttctctgtactatctcttcctctttactctcctatggtgggcatgtttttagtttttctgacttcatttgtgtctgatcattctcccattcaaaggtaattatctcttatgagaaaatgtctatatatgtacacgcatgcatacacatatatatgtatcactgtcattacacacatcatcagcatcaggaatgtttttatagatttgaaatcagagtctatggatttagataaaatacaaaaggaaggaaaaatagaagtactgctgttgtatgtacattgagggaagtatctttctgattaaaaaaaaaaggccgggcgcgatggctcacgcttgtaatcccagcactttgggagactgaggcaggcggatcacctgtcaggagttcaagaccagcctgaccaacacggagaaactccatctctactaaaaatacaagattagccaggcatggtggcgcatgcctgtaatcccagctacttgggaggctgaggcagaagaatcgcttgaacccaggaggcagaggttgcagtgagctgagatcatgccattgcactccagcctgggcaacaagagcaaaactcagtctcagaaaaaaacaaacaaacaaaataagacaattgagacacatgtctttaaagccataggcccatatcggttgtctgagggtggtaatctttgcttctcatggaacagggtgaggtgccagaaatctctagactggcagatgggagggagggagaatgtacaaggtgtctaaaaagttggaaacataggataaacattatgttttattttcaaatgacacactcaatatgtttttcattaaccactagacacttttttagatgatatacttctaaatttaaaacagtccagttgttaacctgaacaatatatattgtaaatacactattattcctgtttccagactttttgaacattctctggtgtatttattgtacttttttcagattaacaacttgacctatttcttagtgtgtatctctagatatgtttctaaacattttgaacagttgattgtcaaaacccctgacgaaagagagtttcatgatgaagcttgaggaactagaatgggcttcccaagaattaaatgctgatccagcctccttttctgtgaagagatttatagtgtgttagggcaaagaaaactatagataaatgtatagtttctcatgatactcctgtgagaaaaactggttactatttgatgacttcacggctgcttggagagaggactcatctgtagtggacctctgtcctgattaatatctgcatcttaagtttgtgaatatctgggagcaacaggcaacactgggtgaataactctagatttaaaaactgctcagcagtcgagaatggtgaactgaaactaacaagattgaatcttatatacaatcttatatttagactcaaaattaaattgcagaagtgctaagcctctagcagtaagtattaaaaagtccattttagaaagaactgatgatttttttttttttactactgtctatgttagcagtcaggcacagctgaaacatactgtgttaggctgttttaatacaagtactttatccagcacaaaaggttaaaaagcccatcttaccctacagtgttcagtctgaggtgctgtattttaaagagatgtgacaagctagaagtcatcagtctttggaggctggctgatgaatgctcaccaagcccaaaagagactctagggcaaacagcagggtttcttaacggataatctccatttataatgaatattccaagccttccaagtcttctgttcattaattcatcacatacttattgtaaaaattcatcacaaagttattccaggcactgttctaggcattgggaatccaaaacacaaaaatgtctgctttcgaggagtttacattttcggatggggagacataataaaataggtagattagtgatatagtatgttagaaggtcatatgtgctacaaatagtatggtcagggaagacttgctgagaaggtgaatgtcttagtctgttcaggctgctgtaacaaaatgccttaaactgggtggcttataaacaatggaaatttattcctcagttctggaggctgtgaagtccaagatctagcatttggcagattcaatgtctggtaagagtccacttccttgttcatagatggcaccttctagctgtgtcctcacatggtgatggatggggcagggcagctctttagggccacttttatagggcacaaattccattcatgagagatctgtccacatgacctaatcacctccaatagtcccaccttctaataccatcacattggtgattaggtttcaacatgaattttggggtgatgcaaacattcaaaccatagcagtaaaggagaaactagtgtcaggagaaagagcatccacatacaggaagagcaggttcaaaggccctgggacaggagcagacctgcagtgtctgtggaacagcaaagaggaataggttgaggaagaaaggaagagagactaggaagaggatgaggtcagagaaatcatgggaagaccaggttatacagggtttcataggctttatagactttggcttttgttctgaataagatgagaagccattaaagcgtctctgagcagaaaaagacttgatctaacatattttaatacgatcatttgtgctcggtgttgagactggattatgggggttggtgtggagcaggggaaccaaagtagggcaaatagttaggagtttatagcaataatccattgtggcttggagcaggattggtagtagtggaggtggtaagaagtgattagattctgaatattttgaaggtagagtcaacaggatatactgttggattgaatgtggggtataagaacgtaagaacataagcaaaaatgtctgacatttttgctctgagcatctggaaggacagaattactgttaactgaaaacagcaaactgtgaatggagcaaatttgaggtgaatgtcaggagggacagcttaagtttgagatgcccactggaccttcctctgtaggcccttgtaagtaggaagccaagtcataaactgttttcttaggaatgaaggactgggccgggcatggtggctcatgcctgtaatcccaacactttgggaggccgaggcgggtggatcacgaggtcaggagtttgagacgagcctggccaacctggtgaagccccgtctctactaaaaatacaaaaattagccaggcctggtggcacactcctgtaattccagctactggggaagctgaggcaggagactcacttgaacccaggaggcagaggttgcgatgagccaagatcgcgccattgcactccagcttgctgggaggcaaagcgagactccatctcaaaaaaaaaaaaaaaaagaatgaaggactaaaagtaggcgatgagagttgaaggatcatggtgactcatctgtgatagcctgagtcatctaccctcatcttccaagggtccagaaacaacccttccttatggacagggctggagaaacaagacgaagtgctatcattggccttcccttttctagactcatcttaaccattcctttttgtatacatttttcctttagagcaggctgtaggttttgtttttgttgttactgttttttgagacagagtttcgctcttgttgcccaggctggagtgcaatggcacgatctcggctcaccacaacctccgcctcctaggttcaagcgattctcctgcctcagcctcccaagtagctgggattacaggcatgtgccaccacattgcccagctaattttgtatatttagtagagatggggtttcgccatgttggtcaggctggtgttgaactctcgacctcaggtgatacacctgcctcagcctcccaaagtgctgggattacaggtgtgagccaccgctcccagcccaggctatagctttatatcttcgtgaggttatactactctcttgaggctatgtatggtgaccttagttgagcatggaacttctgagcaagtcactgaaaccgtttatttttttctctttctttttttatttttttaaaattcatatatatatatatatatatatatatatatatatatatatttttttttttttttttttttttttttttttgaatacagacagagtctcatcatgttgcccaggctggtctcaaaaacctgggctcaggcacctcaacctcccaaagtgctgggattataggcgtgagccaccacgcccagccaaaaccatttttcagttattaccttgaggggttccttattttgatggttgattactgaaagagctgcttttttaccctcaatttatttttggagggtaaccttgtctttataaaatctaccaataaatgttaaatgaaaattggcggaatactttgtgtcactcctatgtatccaactgtggggttgtatttggaaactgccatgtcttagggtaaaatacctgggaatatctcattttagaaggcaagataaattgtagcccaaaatatttgaaaggattattgtgtaaaatagggagttggcttatttttctgtttccccaaggggcagaggattgtttataggtagaacttaaaagaaagcagaagaatgtcttaacaattgatgtcatttcacagtagaataggttatttcttgatgtaggagggttgtgggaaacattcaaagagccagtaggtgactggtaggttgaagtgatttctatacaagcatacttcattttaatgtgttttgctttaatgcacttcacaaataattgtggggtttttttttgcttgtttgctttttaacaaatcgaaggttagcggcgaccctgcattgagcaagtctatcggtgccatatttcccacagcatgtgctcacttagtatctgtgtcagcattttttagcaataaagtatttttaaattaagatctgtacattggcttttttagacagtgttattgagcacttaatagactacagcatagtgtaaacaaaacttttatatgcactggaaaaccaaaaaaatttatgtgactcacttcattgttatattggctttattgtgatgatctgggactgaacctgcaatatctctgaggtaaacctgtattaaatgaggtgaggtgtttctgaagtaccctccaaaatttaagattgctatgataatgtcatctttttccttgttactgaacccttgatgctactggggaacattagccttccaagtcttctgttctttagaagtacttcattagaactacagtacttctggagtaccgtagttcatcaagtatccctcctaaccttttccttagatggcaaagaagtatatttgtggaatggttgactcggtgggagggcagcaggcagaatgcgtggtcttgtaatgtcttgtagtactaaggttattgaatgatcatcagatgaccttgtcttccttagccttaggctttgcccaagtaaactggttggttaatggttattgaggtttgtatgcaatgaagcatttgtgggagttgggaagatactgtcttagccctaaaaaacaaagtgttagaatgtacaggaaaacagggtggatttatctttcatacatatgaaccctatctggcaagtgacctctgaaatctccagaagtccaggataagcttttgtatgtttcgtatgacataggcttacaaataattacattttatgagttgctatatatgtgtatatgtatatatgtgcacatttgtatatattcctcaccacaggagaaataaaaagtctaattagcattcttaatgctcatcagaataaagacatatgcacttatgttagcatccaagtaaatattacatatttctaaggctaatgtagcatattgacctttttgagtatgtattttacttttatcatatttgaaaattaattatgataccattatattttataggatctaagcctttcccacgttatggttataaaccctccccaccgaatggatgtggctctccactgtttggtgttcatgtaaatattgtcttttatttgataagttttgtaactggtaaatcatgtaatacttttggtgatataagactatcagcatgttcttagattcacaaataatttagctgggtgtaagagtgatcaggtttattagattctttttggcaaaactaacaaaagtaaatgaagtaaaattgttttatttttgaatcttatagatgttcgtactatttaaatgatatttcccaatatcacatacatagttgaaaagtttggagtacagaagtgctactacttagagggaaaaagtatagataaatcatgttttcgacattaaaacaaggctaagtgggatagctgtgtggttgttgtaggagtgactggatctaagccaagtattatgggaaaaaaatgtttatgagaatgattcctagacacaaggattttgtgtataaagttatttaaaataattgaagttatagattcagagtaatagtatctttggggaatggagaaatatttaaagattaaaaaacaaaaaaatttgagttgtaggaaagttttctgtgatatttcacataaagtaaattttatttggaaggagaggccacaaacactttgagtatccaaaaatcatacttacctagcccctggagaatctttaatggacttagcctcatctttctttttttaaaacttatgttttgtgttttggacaaatggaaattttgttactgacaggtaactgtgagtgttctaacgctgcagaatagggagcagtgaggcatagctgagagagtaacatgggtgggtatgggtaagtgtaatggggagatttataacacagaaaatatttgtaggcagaaatggattttggaactatctatacagcagtcattatcatttatacctatttagtctatttgaatgcagtacttcagaggagttttgcatttcattgacagtaatccatccaaatgccttttgcagcttaacattggtatcccttccctgacaaagtgttgcaaccaacacgacaggtgctatgagacctgtggcaaaagcaagaatgactgtgatgaagaattccagtattgcctctccaagatctgccgagatgtacagaaaacactaggactaactcagcatgttcagggtaaggatgatctggtggcttggggatgagtgtactttttaaagttgtatcaaatgctctatgttttagtataggatttaccaatagaaatctttcacatatattatctattgtgacacagacttcaattttctgaggtgaggagctgatgattttataatctaaaatgatttatagtcacagaagcaaaaagcattaggaaaccttgggagagtaggggtgtctaaggctgagagagagaagaattcatctaccttgtgccctaaaatatatctccagtcatcatgtaagaacctaaagtagctaaagtttgaaactctgattccagttgtcttagtccatctggactgctaccatagactgggtgacttatagacaacagaaagttatttcctacagttctggaggctgggaagtccaagatcaaggcactagcagatttggtgtctgataaggactcattttctagttcgtagcagatgccttctaactgtgtcttcacttagtggagaggactagatagctctctggggcctcttttataagagcactaatcacatttaccatcttttggaacttagacacctccaaaggcctcaccttctgatttcatcactttggaggttaggatttcaacataaattctggaaagacacaaacattcagaccataccaccagtgaatttaagagtatagcacactggatttggagtaggaatttctagaagacttgtcttatgggtttctgttgggaaggtccccagatgacccccaggttcagtgatttactaggaggactcacgggactcagcatatagttgtactcactgccatgaggtattatggtgaagagatagaaagccaaactagcaaagggaaagggccctttggtgtcatttttaaaagaatgatgatactcacctcacagagttgtcataaggatgaagtgaagtatttgtggaaatacaaataaatcaccattcaaatactggtagttataagatttctctactgtcaagccaaagaacatatcatacactgaaatcagaagaggcaaggcaggaaaggaaaataacattttaagcactttcataagatactgtgctagatattttattcatgttttcatttgatgccaacaaaaacctaaagaggtaggtagtgttatccccatttttcaaggaaggaaacgatggttcagaaaacagtaacttgccccaagtgagcatttagcctgactttaaaatctgtgttctgtctattatacagtattctccaaatagtctcatattatagccctgattctaatatcctaataattcatgtcaaggaagaaatctctgctgcaggtaatcttgaattcacagcctctgtatccctttgcagcttttggctaaggtaaactagctgtaaacctgaagcatagatagatttatttcctgttttctgatttaagaagaatgtgaaaccaatcatcttgtaacctcctatttaatagtcatagcctctccacttctgtggttggttgtttcttaatggcaaagtcttttggagaactttgaaaatgttaagattttgtaatgacaagtttcttccttaacatgaatattttgaaacgaaaagtatttggataactaaaagccactctgtgctatatctctgtaagtgtaacatgttaagataatctcacctggatgtttcaggtttcttagaataagaaaagtaaataaattaccttttcatagtcttcaaaaaatttaaaaacctaactggggccgggtgcggtggctcacgcctgtaatcccagcactttgggaggccttggctggtggaccacttgagcccaggagtttgagagcagcctggccaacatggtgaaaccccatctctaacaaaaaatacaaaaattagccaggcgcctatagtcccagttactcagaaggctgaggtggaagaatcacttgaacccaggaggcagaggttgcagtgaaccaagatcatgccactgcactccagcctgggtgacagagtgaggtgagaccttgtctcaaaaaaataaataaaataaataaataaataaataaataaataaaataaacctacctgactggggaaaaatacttttgatttatatgctcccatatccccaagtcaaattaggacattggtcaaagagattggattccgtttactttaagcctcttaactgatgtatgatcagtcctcagaagccattggccataatgaaatgttttgagatttcaatttttaaactttgtttcttccgcacataaaacattttttcttaaaatgcaaatttaagagtattatcagacaactctgttagtgattatgtttttcaaataaaaagaaagttaaaacactgattaatcagtgctattttaaaagacttttatttgtctagtttaaacaattgggccaggcatggtggcccacgcctgtaatcccagcactttgggaagacaagtcaggaggactgcctgagtccaggagtttgagaccagcctgggcaacatagtgagacctcatatctactaaaaacaaacaaacaaacaaacaaacaaacaaaaatagctgggtgtggtgttgtgtgtctgtttaaaattaaaaattaaatttaaaaaatttaaattaaaaatgagctggccatggtaatgccagctactcaggaggctgaggtggaaggattactttagcccaggatgtggagactgcagtaagctatgactgcaccatgacactccactctgggtgtcagagtgagaccctgtctcaaaaaaaaaaaaaaaaaaaaattgggttaaacagttgaatgcaaacaaaaaataagatgcatgagactaaaactggaaatctgtagatatatatgtgtgtatgtaaatatgctacaggttgtgagagtttggtgatttcatctagcatacatttcagtgctcacgagggatatgcttgttgctgtgctgtaatgtgtaacataggtgaaaagagcaatgcagttgcccaacagtaatcccattttcttgttttgcagcatgtgaaacaacagtggagctcttgtttgacagtgttatacatttaggttgtaaaccatatctggacagccaacgagccgcatgcaggtgtcattatgaagaaaaaactgatctttaaaggagatgccgacagctagtgacagatgaagatggaagaacatacctttgacaaataactaatgtttttacaacataaaactgtcttatttttgtgaaaggattattttgagaccttaaaataatttatatcttgatgttaaaacctcaaagcaaaaaaagtgagggagatagtgaggggagggcacgcttgtcttctcaggtatcttccccagcattgctcccttacttagtatgccaaatgtcttgaccaatatcaaaaacaagtgcttgtttagcggagaattttgaaaagaggaatatataactcaattttcacaaccacatttaccaaaaaaagagatcaaatataaaattcatcataatgtctgttcaacattatcttatttggaaaatggggaaattatcacttacaagtatttgtttactatgaaattttaaatacacatttatgcctagaaggaacggactttttttttctattttaattacacataatatgtaattaaagtacaacataatatgttgtttctctgtagcccgttgagcatatgagtaagtcacatttctattaggactacttacaaggacaaggtttccatttttccagttgtaaaattggaaccatcagctgataacctcgtagggagcaaccccaggatagctaagtgttatgtaatatgcctagaaggtgatgtgaatgcgattcagaagcatagccactcccattttatgagctactcacatgacaaatgtcatcttttgctataacctttgccaagttagagaaaagatggatttaatgagataaatgaaaagatatttaacctaatatatcaaggcactatttgctgttatgctttgttatttatttcccagcacttgttccttattgtagattttttaaagactgtaaccttttactaactgtggtcttactaaaatttgtgcttgatactgcttttcaaaaagcctttaattagagccaaaaggatggaaaaggcaagatataaatgccttttatagatctcttatttacattgaaaattattaccatatgtttagagcaaatccaagaaaacttcaacagcttctgaagatgtctatgaatgttgaaaacttttcaatctcttggaatgctcagttatgttcctagaccggtctttgctgactactggttgttaacctttccctagcctgggacctcaagccatatatatcctttgggtgacccatggccaaagttattaagatgaactgactttcaaagtcagagaaggacagcatagggagaggcggttatttgtaagtcattacaggtagaacagggcagaaggaaaagtatgttctggagaaagggccatgttcctaactttggagatatgtcattgccgggaacctagtatcttccaacttgaattggtggcagctgttccagtgagacaaggcacatgtatgccttgtggctaagtgagcaaactgggtttccacttaaatgtttgggaccctcaattgattctttatttcaaacctttataaaaggtacagttttgtaagccattattaataattaatgcttatcggctgggcacagtggctcacacctataatcccagcactttgggaggctgaggcggttggatcacttgaggtcaggagtttgagaccagctggccaacatggtgaaacagcgtctctactaaaaatacaaaaatttgccgggcgtggtggcgcatgcttatagtctcagctactcaggaagctgaggtacgagaatcacttgaacccaggaggtggaggttgcagtgagctgagattgtgccactgcactgcagcctgggcaacagagcaagactctaaaaaaaaaatggtttatcaatatttactattgaaatatttgtccaggtaactttacacttacaatgaattcatggattttgttagcagcattggctttctcaaaaggacaaactcaatatcgttataaaatataattcgtgatcacaaattatacaaaaatcagtagaaacagttttttatgttcagattaaaaaaaaaaacttgggataattttagatttacagaaaagttgcaaagatacatggagagcttctgtgaccactcacccagttcccccagtgttaaccttttatttaaccatgaagcatttgtcagaagctaagtaaccagcaatggcaattactattaacggaactttgactttatttttcagattgtactagttttttaattaatgtcatttttcttttccaggatccaatctaggataccacactgaattagtcgtcatgcctaattagcctctggtctgtgatagttccacagtctttctttttcataaccttgacagttttgaggagtactggtcaggtgttttgtagaatattcctcaatttgggtttgtctgatgttttcctcatggttagagtggggttatagatttttaggaagaataccagaggtgaaggtccttctcactgcatcatgtcaggagttacatgctatcagcttgatggtgtattaactttggacacttggttaaggtagtgtgtgttggttttttgctgctgaaaattactgttattttccctttccatacttctgttctttggaaaacagtcactaagtccagtcatgggaggtggtgggtgggaaagattacattcaaccccctggaagtgggaatatccatatgtagtatttggaatttttctatatggaaaatttgtttctccctcccaccctaatttgtttacatcagtatggactcatgtatattttgtattttgggtaacacagtatttattttgttgcttaagttgtccagcttggctattaggagttctgccaggttggctactatgtccctttgatgtgcccatccttttgatttttgagcacttcttactttctggcactacaagatgctccaggttcatcttggatattccctgccccaaccctagaatccctagaatcaacccctgctccaaagagccctggttccttttgttggagaatcatacttagaaaccaagatctgggcattagatgtgcttgttgctactgggatgtcactgtttgtagcagagttgagaaatatgtatgtatattaatccatgcatatgtacacatctataattatttatgtgtgtacaaagctaaacatgagtttgtactgccgtcttcaactcaaaatttgtcccaaaattttgtggcatatgtttagattttaaagttgatattttccctattgacagaataaactcattaaaagagcaaaaaaaaaaaaaaaaaaaaaaaggcaagaactaactgtcagcagctctttgcaagaaatgtaatattgatactttaaaataatactgccttcaaatgatgcctgtctctttaaaatcttttgacatagttcttccagggacagatatggctgtatttatttcatagatggagaaactgagcacagagctgtaatgaagacagaattgagatataagggcaaaagctaattaaacgcatcctcacaggtagcctttctttcagtgaacctgtagactagtccagtaatacttattaaaattagttgttagaggctgggcatggtggttcaagcctgtaatctcagcactgtgggaggccaaggcggacagatcactcaaagtcagaagttcgagaccagcttggccaacatggcaaaaccctgtctctactaaaaatacaaaaattagttgggtgtggtggcacatgcctgtaatcccagccactcgggaggtgaaggcacaagaattggttgaacctgggaagcagaggttgcagtgagctgagattgcactgctgcactccagcataggcgtcagaataagactctgtcttggaaagaagaaaaaaaattgttagcctaaaaccaactctctctaaatttaaaagagtgattatttatcttagtatttatagaagtatgagattatcagaaggtgcgatgcacaatgctcattattttatcctagtacaagacacgtataacatctaacagtaaagaagatggaatctttctataaaaacaattctgttattaatagttgactgacttcagtaactttgaggagtagaatgaaacttattaggcaagatctttccacatacactacattgtattgttcaaaattcatagaaattacttgcaatatattgatttaagccttatgtagtgactgttgctatatttgaagtagcatttttagtttgctgtttttcctcactgcttaatcctacaaaaaccagccatctgcctaaaaaataaaagagcaaaaatgaatcagtgcaaccggtatacgaaaaataataattattaataaaactgtaaaggga

SEQ ID NO: 337 - DNA, 13815 bp, Homo sapiens
  source 1..13815: mol_type = genomic DNA; note = NC_000020.11:23361585-23375399 GZF1 [organism=Homo sapiens] [GeneID=64412] [chromosome=20]
aggagagcgccgcgccgagccccgcctggcgccagttctccagcgcccgtggaggcatctgcgcccctagtagccaaggtgagtaccagctccaagcccggctttccgcgaggtccctcgcgtggccaccgtgccctaagggtgcgctcggcctcggggacgtgagcagctcttagtgggaagccagctgcaggccctgaccgcaggctgctggggcccggaagcgctggcgccttgcggccagaagcccggaatggacgcgaaagtgaccacgcgaatctgacgctcacgtgacttttcgcgactggccccgcccccctgtggcgtgccgcagcgcagacgtcgctgtctcctgcgcaggcgcaggccttggctcgcggcgggtgacgcaatgcggcgggtgacgcaatccggcgtcgccagtcagtcgcgcggccagatcaggtaactgcccgaaccgctccgccgcccgacgtgtggctcagccccttcctcagccccgccaggggcggggccggccgcgggaggggaggggcctgcagcgaccaatcggcggtgcccgcgcagggtgctacgccacgcccagccgggccggccgttcctaccggcctggtccagcggacagcggctgcagcgggggcgccggctgggaggtgagtgcgcggcccgtaggcctggctccggcccctcgccgcccgccgccgcctctttgtccgcgcgccccggctgctctgtggacctgcgcgtctcggggatgcgggagcgggggcagggggcggcccgagggcctgatccacgcggccccggatgcccgcgtcgggaggcggcgcgtcgggccgaggaggggcttctctgtggctgcagtagtttgttctctgggtcgtctttggagtggccgagcggcgtccgggcgctggggcggccaagtggcgcgggaagggtgggaggtgccgtgagggcggcgaggacagcggcggatttaagccccactggaaaccccggcccttgtggccgtggactgggctgcgggtagcagcgtctcctggaagggctctggccccgtgagcctcggggattcaggggccgccgacgttggtgcagatgccgggcgcactgggaggcggccggaatgccaatgagattcggcggatacgcagctgtcaccggccgcagactgccctgtcgccacctccagtgcctgcactccagtagccaagcaacataggaaatcgcgctcagaacccactttgttgattgagaaatcaggtctcctcgagggccctgttggcagaggtctggggaagtcagggcatcaggctgagagagccctctgcagtcttgtttccccaggctggggctgggaccactgaaaccccagtggctctataagagccccactcttatagatcccttccttaggctttgtcagtgttctcacagttttactggggcgtctccttcaggcgacattgatcaagcctcataggtacctgtttacagcggaactcccagagggcagtcttttccatgtttgagggactgctagttgtggggagcggtctcattgatgagactggagaaggggagaggggtgggactagtttatcagggaagatgatgacaactttttttctagacacgttgaatccgaggtgacatctgtggtctggccgaaggaggctagaaggaaggcatgtgctttggatggatggaaacaggaatcaaagaggaaggtagattcaggagctgaagggcagggagaaaacacattcagggagtttgtggcaaagcagcagaaatgacgatggggtgacggtatctggaggccttaggtggggttggtgaaatttgcatgcccgctgcagtggaaagatttaggggctaaagatagccctttgcctttggcaaggctgaggggaagagtgtgttgagtagtctgagttgaatccgggcaccaggccctggctcatgtcccaaccagccattgactgttaccttgataggtcctcatctatgaaatggggatcactgtagcaccttggcctatgtgtgggaaaccaataaactagccaacaagtttcaggctcatggaaccctggtaacagccggtcagccttcttcagaggaggaaatgggttcagagaagttgcttgctcaaagtagcacagcttgtaaaagctgtggaacttaacattatttcagtagagtaacaataattcaaattctgaggagtttaggatgttgggaatgggcgatgaattgtgaactacttttccaagaagttttcctcatggaaagtagttatttagttggttcttttcaaaggcagaaatgattccctgaggttttggatttgctcccagatggtggtggctatgtgttttaattatctggtttcctgatcagagaactagacattattgttgccatgaattcttttacagttttggggactatgtaagcaaattagacagtgaccttggtgagcaaattactgtgttaatgtatttcactaatcacaacttccatcatttgtttatcactggaggaaaccttagaatacactatttttcatgccaatttattaccttaggaaaatgcatgaggaacctcactttagaaaactgctaagaagtaaaatgtcattcgaatctttacctgagtaaagctaggttgttaatgagtctatatcctctcaagtactgaaggaatcctcataaattttagtccttttgcatcagtggttgctcatgcataattcttgtttctttttcaaagctgtttttggaaggaagaaagatggaaagcggtgcagttctgctggaatccaaatcctccccatttaacctactgcatgagatgcatgagcttcgcctcctgggtcacctgtgtgacgtgacagtcagcgtggagtatcagggtgtccgcaaagacttcatggcccacaaggcagtgctggctgccaccagcaagttttttaaggaagtgttccttaatgagaagagtgtggatggtactaggactaatgtctacttaaatgaagtgcaggttgctgactttgcttcatttcttgagtttgtctacactgcaaaggtacaggtggaagaagatcgggtgcagcgaatgctggaagtggctgaaaagctgaaatgtttggatttatcagaaacttgttttcaattaaagaaacagatgttagagtcagtacttttggagttgcaaaatttctcagagtctcaggaggtggaggtgagcagtggctcccaagttagtgctgctcctgcccccagggcaagtgtggccaccgatggccctcaccccagtggtctcacggattccttggactacccaggagagagagccagcaatggcatgtcttcagatttgccaccgaagaagtccaaggacaaactagacaagaagaaagaggtagttaaacctccctaccctaaaatcaggagagctagtggaaggctggctgggaggaaggtctttgtggagatccctaaaaagaaatatacgagaagactccgagagcagcagaaaactgctgagggtgatgtgggggactacaggtgtccccaggaccaaagcccggacagggtgggcacggagatggagcaggtttccaaaaatgagggttgccaggcaggtgctgagttggaggaattgtcaaagaaagcagggccggaggaggaagaggaggaggaggaggaggacgaagaaggggagaagaagaagagcaactttaagtgcagcatttgcgagaaggcgtttctgtatgagaagagcttcctgaagcacagcaagcaccgccacggcgtggccaccgaggtggtgtaccgctgcgacacctgcggccagaccttcgccaaccgctgcaacctgaagagccaccagcgccacgtgcacagcagcgagcgccatttcccatgcgagctgtgcgggaagaagttcaagcgcaagaaggacgtgaagcggcacgtgctgcaggtgcatgagggcggcggcgagcggcaccgctgcggccagtgcggcaagggcctgagttccaagacagcgctgcggctgcacgagcgcacacacacgggagaccggccctacggctgcaccgagtgcggcgccaggttctcgcagccgtccgcgctcaagacgcacatgaggtacgcggggagccgtccggaggggtccctgcgcactggaagggtgtgtcaagcactgaggtcgtcctgggatttgatgtctcactgcttaatttctccgctccaaacctgggggcttatttcgagacagcgtttagttctctgtcaaggtacaggggctgcgagtgatggctctgctcccttgttctgagacccctggggcgcccctgctggccgggacgtccctctggtgggaccgcgacagcggccgcgggctcgccccaccgtgctggaggaagagttgggcctcgttacctttatttctcctttcctgactcttcgtttagatcttggggttctgtgaccatccgggtcccacagtctcagtagagacctcagtgagatgccatttcaggctttaggactcgtctctggtcttttggttctcaggcttggaaggagtgccatctaggcagtctgcactccagaatcaggacagacagtgctttctgtttcttaatatgtttctgagctgcaggtgtgtggtgatgtttttaaataagttttcttatagttcttagtatatttattcttgaaatcccaacaagcagttgttttctcttctcttctagatctgccctcaaacctaggtcagtcttgggttagcagcatggtgttcattttttactctatataataagttaaaaatacttggtttaggaagtgctcagtaaattatgtttgattgctacttcatactagttgtgacattaaaatgcttatgcattttaaaaatgccaccttcggcaatttgagaacagttctcctttctctactggtgatgtcatattaggaaatgagagtaacatttttgatcatgtgacacttaatcagcagtagttcctaaggtgtttgtggctgattattctgtatgagacagctttacaaatatcagattgtggtctttagtgtttaaaaaaatctgcaaaggcctggtctctacctgcacatgccttatagcatcagcagtagggcttgtgatcaggtgtagatgaacattccagtcagtgatttatggaaaatgtgtggatccattgaccttgtgcagaaactcagtttattttgggatggagattatgggctcttgacctgtcactacagtcattctcattaggtctcttggagtaaacgatttttgcaggatagagtggaaattgtattgcaaagtgagctttgaaatacatcctaagttatcatctgaatgttgtactttcagaattcatacaggggaaaaaccttttgtctgtgatgaatgtggtgcaagattcactcagaaccacatgctgatttatcataaaaggtgtcacacaggtaaatactcatgctgttgtgattgaatgtctttcctagatctagaaggaaatgcaattgattaattttgaagttggcatctaccaaggtggtgcaggttaaagccatgatatagcttttccatctagtaagtgagcaaaatgaataaacatacacccattgccttgttgctagtgtgcacatggctgtggcttttataccaccaggccataggatctggcatgcaggtcttaggtatcaagagatataaaatagttcttttgtaaccgaaatttttttttctaagactctgtcctaaagaaattgtccaacatatgggaagagctgtatgctattatcccccttcttgctatttttaactaagaatgggaaacagcctgattgtccaactacaaggaagtgctctagtcaactctggtaaatctataccctggcttatgacccggctattcagagtaagggctctgaatgacatgaaaaagtctgtgcttggatgttcaactttaaaatgcacaattaagcatacagttaacctcaattgtattgaaaacctgcacataaaagaccagaagaaaataagttgttatatgatacattaaggtagtaggattatctcatttctgttttccaaagtctttatgatttattaattatgtgacagataaaacttaagttggctttattctgcttcagcacagtaaccctgaggtttagaatcttgtggaagatacagaagcatacagcactgaagtgttccaattcttctcagtttcttctttgcttgcattttttattcttacctgtaaacactggcttacaagcctcaagttcaaatgcatgtgagacagagatgacatgtctctgactcattagacaccacatctgtgtgattagacaccagttctgctcattctgaagtcataattcatgtcattgaatgaaaatctcatttaatgtcatgaaattagcatttaatgacatgcattatgactacagaatgagtagaattgtttaaagaaagcttgggattggggacaaggtcaggttataatgaaggattaagttagaattggtcctttgataatattaacatggtaagattttattaaagtcactatttttattttgatgtctgtgaaatcgggcacagctaataatttggtaagtctgatttgtgggattaaactacaaaaagtgagatatttaaaactcttgtcctacaattcaatcaagttgattggagttgctactctagaatagtgatatatatccattgtcaacttcccctttattctgataaagatccatagaagtgttcctttgaaaataatccagcagttcctccaaacagaagttgtgaaattattttcttgtttggaatgagtaaatttctaaaatgtgagccagctgaacaaacaatacctctttgattctagtcaaatggaatttttcttgcaatttccaaggatattttacaccaactttcagtaagtagcaagcatcttacatgaatatatattttatgatagtttttactggaaaatgtaacatgctgcctaccaaggcacttttgagttcacgtgggttttaacagtggagacctactgttccatgtgtttttaatgcctgtattgtttatgactttatttcattttctcatgtaggtgaaagaccttttatgtgtgaaacatgtggcaagagttttgcttctaaggagtacttaaaacaccacaatagaatccatactggatccaaaccctttaaatgtgaagtatgtttcaggacttttgcccagcggaattcactgtaccagcatattaaagtccacacaggtatggttggaatgtcccagggaagggagtttagtttggccaaaaaaaaaattctaaagcttgtagatttaccagtaaattacttggaactaagcttttgaagaaaactggccaaactttgtatgtcataatagcatttctttagagattgtttctaactctgagaaactgaaaagtgggagcacttatgtgtgtaaacgggagaagactaagtccctttgctacatggagtttttactgaaaaggacagacagcttagtcatggtgtgaatgtaggaagtggatgtggatgtgtggacatagggataatgatctgtacatgttagtaaatgcacatgcacacatgcatattcagttgttaggggtcttgtaattttatactccattaccatggaaaacaggtgtcattcctatagttataatacctgctgcaggcacatgtcctggcccctttttggtgtaggccataaattcttggtattatagagatagtggatttgtagcccttaagttgttcccaacataaccttccttatgttggatgctgaggcttcccagtggtttgcaacagcatcattcactcaagtgtgtattcagaattaagcacagtaggccaaagggacccaccagcagtctcctctctccctgcctcaggggagcgtccctactgctgtgaccagtgcggcaagcagttcacccagctcaacgccctccagcgccaccgccgcatccacacaggggagaggccattcatgtgcaatgcgtgcggacggacattcaccgacaagtccactcttcggcggcacacctcagtaagcagtgggttggcttatttgagaaacaagctgctgcccttagatgcacggaaagagaaatacctaccaccattctccaaggtggttagaggtcgagacaacaggtactttctccttgggttgtctctgcagtggaacgctcacggaatgaatgaagtggaacaccaagccccaaggcccagggaaagcaccatccacgatgactactctgtaacagtgagggtggtggcaggcgggtacttattagtgaaagttgaaaattgaagttgtagagggactattgttttaaaagatgcacttgtccagagacacattcagtgacctttgttttgtgtttaacttatagatacacgataagaatactccatggaagtctttccttgtcattgtagatggctcgcccaagaacgatgacggacacaagactgaacagcctgacgaagagtatgtgtcatccaagctttcggataaattgctgtcttttgcagaaaatggccatttccacaacctggctgcagtccaagacactgtacctaccatgcaggagaacagttctgctgacacagcctgcaaggcagatgactccgtggtgtcccaggacaccctcctggccaccaccatcagtgagcttagcgagctgaccccacagacagactcgatgcccacacagcttcactctttgagcaacatggaataagagcttcaagcagttcccatcctgttagtctgcgtgtgtggtagctgaactcaagatgatgtggggctaagaaaaataattgtccatgtgcaaagatgtgggcaagaatggcctctgcagattttcctgaacttctgctaacttgcacggctttatcacagcatttttaaagctttccctcaaaaatcctgatctgcatgatctcagctactttattgacaaaaaggcagtgaacataacctcacttaattctggtgtagggtgtatgtgctaatcgttctaattcttgattacctagtttatagataactgctggtcttaattgcagagtacagagaactgaaccagctcctgatattgtagttagcagtcttcctggcttctcactctgccttatatttccatgtgggtttacttctctcataactactttcaaggtatttttcttccaagctgaaataaaactggggccacatattttcagtcatttcttccctgttgaattgaagcaaatcagattttctgtggggaccctcaaatgcaactgaagaaatagattgttgcattcattcctccccaccccccatttgtaggcagtaaacaaagtatgactgacagattgaacacctgcaaaactgctagcgtaatctcagcacatacgcagctaggaagtttgtcataaaatcaacttagaaatgagatgaggctgttcagtttgtcttaaaaaaatcagattaggtaaaagctgtcctaccaaagagtctagcaaaacaatatagtatttttttgcagaggcatgaaaaattaagacgctttagagtacttgaaagttgtgtagtcattttatttgcaaaatgaggtgactgtggcaaattatagaacacagagtattattacttttgccaggtttttctgacttgatttctgtaatttccagaaacccagacttctcatttccacacctagagatggaaacaggcaagtaactgacatgtctatttccttgggagcatgtgagaacatagcagtagggaccaaaagtctcagcacacttacctccgattatgccttaaagagttgattgtgaagaaccagtaactttgtcccaaatgcttctttggctgtttcatgcaggacttaattattgcttttaaaaattcacaatgaaaagacgattctgctgtatttgttaaacgttgacatttggttctagggccttgagtatgtgccacgtgcttgtgaaatgctatgattcacatgtaacatttaaacattaatttaaaaagggaaccttggagaattcttttgttcactagttccttttttctctacatttttaatttattaaacttgctgtgaaaacactttgattttctaagaggaaggtactttaagttccagaatgaacatgtagctgcactatgccagaaattaatgagggaagactttcttcctaagtgcttatgttttaacttatgttagtgaaaccactacaaggtgtttcaggcgctgataacatgcttcacacctgcccttggaggtcacagtactaatttacttcaaatttagttatgacagtgtcactgtatcctagttatgtttacagcacaaataaataatgactgtcatacatccagaggagaccgaacctgcccagctgatgtactgttttatggaataaagtcacttgatcagaaggaattgaaacaatagatcattttgttacctactggagggatttttgtcttgaatttgtttccttagaaattctacaaaaaaatgttgttaataaatgtctgctttgtaaaagcagttttgcaattttttaaagatctatttctgttataatttaggttctgcagaaatatgattcttaattgaaacatataatttgcttaattacgtgaataatgaaatgtaaaatccgggtccataagcctttatttcatacagtcctaggattaagctgtttaactgcttggatcccagttggtctctggcagtgggatcctggagaggagaaatcctggcctctgctcatgcgcaggccacaaccgggctggaagtgcggttgagctctctgccactttcttcaatgtaaaaagtaggcatcaaagatacgacttctactatatacatttctctgtccctgagaacagagaaacgtaaccctgtaggggactggttacagaggacctcctggagcatctgccccattcctccaagtccaagcacagccatgctgagtggaagcgaggccaccatctgagtggattggtcccaagtgtgtaatgaggaaagtggccaggtgccggcacagtgcctctcccagagcctcaagaagggccatttaggagcttgcttcaaccattttccaaccattttctgtgaaatgctgtcagcccaaactccaaagggatgtgcagcctttcgttttaccaaattctttgctgtcgtttggaaaaaatgggccatgtggtggagacctttatttaaggtgatttttacagaaatgtgattttgctgtaggtgattatccaaacaagtaaatttgagtgtataatttaatttttaacctgttaaataaaccttgtccctccaaggagttcatttttgggaaacaagatgggtacttgtcaatttaaccaaatgtcatgatattcatgtactcaggagtaacaatatttcatttgatgtgactgagaaaggcacacaggtcagaggatcatctagcacagcagtccccaacctttttggcaccagggaccacttttgtggaagacaattttcccacaggtggggggacagaatggtttcaggatgattcaagcgcattgcatttattgtgcactttctattattattgcattgtaatatacaatgaagtaattatacaatgcaccataatgtatagtgggagccctgagcttgttttcctgcaacttgacagtcccatctgggggtgatggaagacagcaacagatcattaggcattagattctcataaaaagcgtacaacctagatcccgtgcacgcgcagttcaatagggtttgcactcctatgagactctaatgacactgctgatctgacagggtgcacagctcaggtggtaatgtgagccacggggagtgactgcaaatacagatgaagcttcactgcctgcagctcacctcctgccgtaaggcccagtttctaacgggttggggacccctgatctatcacatcatgctaaatgagactcagaaaatcatctgcatacctttggcaatccgtacgtggactcttaactaaggctgacaaaactaagcttttaaactaccatggtggcatcttcattaggaaattgattctgagaagagccacttgatttaggctttgaatgatcaacaactcagaatgcctagatgaggacagcttgttctaccatttaaaacattttgctttgacttacctgaagtgttgtgaatatactttaggacctgaaatcaaggctctatgataggatggtaggatgagccggtctgcactacccgccatgggtcctcttcctcatcagaacttcaggccccagtggtcagtgggactgacccttccccaggggcatctcctctccctgtgcagatattttgcaaaattaaaataaatgcccacactgaccagatagttgagtggtactttcttggggtaggagagtgtcaggcttaggggtgcctcacctccccaccagtcttccagcaaccatgccttcctcaactttgcaagtaactgtagaccctaaaggattcaaggaagggatgagaatgtggggtctgcagggttatcatgtactttagtggactgcatcaacagaagttaccagggtttccttctaaaccctcagtctgcaaaaccattacggtgccctggaattcccaacaaatgaccggagcctagagagtattaacgtctgttgccttaatcttaacgggaacaacttgaaacaatggaagctacttttgacctatgccaatttagcaacaagactcatcaaaatattactgataatttccactttataggttaaaataaaacaagcatactttttctgctaaggtagatttattgttacacatggttagttttcataacgtaatcccctgccccagagcaactcaggactccatggagcaggaagcctgctcttggtcatagctcataccacagcaggcaggtcacgggggcatgctgtgctgccaagtcctccaaaggaagtcacaaaggtttgcatttggacatttaaatccacaaaatcaggagaaacaataaatgcacaagggctggtgcatatactttggttacagtgacgccaccacacacggtcacgactgtgcaaaaatactgctttcaaatcattaaataaaaaagaactcacacaagctataaaaatgttgccacaaaaagcaaaactttcctctaagaaatattaactgactttgactatgaactaactccagatttgctaaagtacaagaattgtaccataaataattatattttgttcataagtaacattctataaatcttgaagacctagctcacaggcatcttgaaacatggcactgtcctacatccatgggacatttaaaggaagtaagtttgcacaccactaactgggcttttctctcattcttttttttaatcttctggcaggtctcttctagccattacaattactttgattcttttcatgtgaaatattaaaaacaaaaattaattcttaaccccggaactggtcccagtgtttattgcaatacaaacaagtgaccctctaattgacacaacaaaatgttacaaacattattgttaaaaaaaaataccccttcagacgggtctgttggagtataatgatgaaagctaaacataattgcccgaaaataaatcatgtagtttttactttaagtggtcagaccagaagatt

SEQ ID NO: 338 - DNA, 7594 bp, Homo sapiens
  source 1..7594: mol_type = genomic DNA; note = NC_000001.11:c211579161-211571568 SLC30A1 [organism=Homo sapiens] [GeneID=7779] [chromosome=1]
gaagaaggcgcccgagaccgggccgagtgcagctgccgtggccgccgcctctctagctcctcagccatccgctcctcagtccagccgccgcagaggagaccagcaagcagagccctcagatgctcggagctttctcggcgcgaagctgcccgtcgccctctcctgccgccctcgcccgccgccctcctgctcctgctccggctgcggctcttggtaccccggctccgggagcccagctccccgccaccgccgccgcctgggtgtgggggctgctgaggctgagccgggcctcggcgccggctctgaggacggacgcctgaggagctgcgcggcgcggcgccgccggctggcggagaacgcccacaggcgcggggctcggcggcttgacccgggcttgtccccgtgcggccgcgggggcccctcagcggtttcccgaacggcccgactcgggcgctcctccgtgtcgcggtcgccgaccctccgcgtcccgccaacgccgccgctgcaccagtctccgggccgggctcggcgggccccgcagccgcagccatggggtgttggggtcggaaccggggccggctgctgtgcatgctggcgctgaccttcatgttcatggtgctggaggtggtggtgagccgggtgacctcgtcgctggcgatgctctccgactccttccacatgctgtcggacgtgctggcgctggtggtggcgctggtggccgagcgcttcgcccggcggacccacgccacccagaagaacacgttcggctggatccgagccgaggtaatgggggctctggtgaacgccatcttcctgactggcctctgtttcgccatcctgctggaggccatcgagcgcttcatcgagccgcacgagatgcagcagccgctggtggtccttggggtcggcgtggccgggctgctggtcaacgtgctggggctctgcctcttccaccatcacagcggcttcagccaggactccggccacggccactcgcacgggggtcacggccacggccacggcctccccaaggggcctcgcgttaagagcacccgccccgggagcagcgacatcaacgtggccccgggcgagcagggtcccgaccaggaggagaccaacaccctggtggccaataccagcaactccaacgggctgaaattggaccccgcaggtgagccgggaaagtcgctgccgcaggtggttgggtttggggtgcccagagcctcgcctggccttcggcggggtggcccgcacgccccctgctgcccgagcgggcctgcgccgcgccgcccctgcctgctccctccccgtcctgcacacgccccgctgctgctccaggaaatcagaaccccctcagtcgggtgcaaggagccggcgacgcgtctggcatatttgtaggtgggggctgtgggtcagaccctaagaaaaagggtcaggaggtgatcatcatcccgctgcagtccacacccgcacttggctgtctttacaggctgcagcaactttgctggagacttgtctggttatggttataacagcgtcagaaatgcttcccaattcaattccttggccctcttgggaaacggagagaatccccaattcgtccccagtagttgggtgctggaaaccttgctctgccaaagtagttcttatgcccattgaactccgtttcataatatgcattcagagcgtgtaaaccctggttaaaggtttcttttatgaacagcagtgtatgcttcagctaattgatccctaatcctggaaatcatagatttaggacctgtctgggcatgtttaacattttcccaggacttttcataatcgtactgaactaaaagtgatggtaatttattcatcttatatttttagtggatgctttttatatttaacattaagtgctcttgaaggaaatttgaaaataaatgttgaaagaaaggagatggaaatgactcaaccagtgtcctactacccaagctcaatggtgcttaacaatttggtcttatttccttcacttacgtttatttaccttgtatcattataaattatgctacataattttccttttcgagtgcagaatatgaagttagtgaaattcaagttgtacattggaaaggtttaataagtaattggttttcctctcactccactcggcaaggtgttattccaaagaaaattaagtttctctggtgtgtaatttcaaaagatcaatactttttatctttttgaatacttttgatcaatactttttgaaaagatcaatacttttgatttaaaagttagtagggcaggtagtcatttagtttcaatttttctaataatctctgtgattattgatttttattgttgatttgtcagtttttaaacccccctaccaagaaacttttatattcataataaaagtttaaaagttaaaattggttttattctcaagcaattggcctcagtgacaaagagtgactagagagtgcccgagtgtcaaatcaggtattttgtattagtagacttattcctagctgcatttaattttggtgttagcattcaattttatgttttcctttgtatataccataaagtatagcagaatggttgcaggactccacccccatagaaaatatacactattttggagaggaggaggcaggagagtggttaggagggtgaagaagcagtatcacaatgacttaatttagccctggctattatgtcctggctcattcccagaatgtcaatttatattaaattgctctgagcacatttttttaattgtactttctgaaaaaattttcaccttcatcaccacttaaaaagaattagacaaggatgtttatataaacactttaaatgtatttgatataaaatttttatttctttgtagacccagaaaaccccagaagtggtgatacagtggaagtacaagtgaatggaaatcttgtcagagaacctgaccatatggaactggaagaagatagggctggacaacttaacatgcgtggagtttttctgcatgtccttggagatgccttgggttcagtgattgtagtagtaaatgccttagtcttttacttttcttggaaaggttgttctgaaggggatttttgtgtgaatccatgtttccctgacccctgcaaagcatttgtagaaataattaatagtactcatgcatcagtttatgaggctggtccttgctgggtgctatatttagatccaactctttgtgttgtaatggtttgtatacttctttacacaacctatccattacttaaggaatctgctcttattcttctacaaactgttcctaaacaaattgatatcagaaatttgataaaagaacttcgaaatgttgaaggagttgaggaagttcatgaattacatgtttggcaacttgctggaagcagaatcattgccactgctcacataaaatgtgaagatccaacatcatacatggaggtggctaaaaccattaaagacgtttttcataatcacggaattcacgctactaccattcagcctgaatttgctagtgtaggctctaaatcaagtgtagttccgtgtgaacttgcctgcagaacccagtgtgctttgaagcaatgttgtgggacactaccacaagccccttctggaaaggatgcagaaaagaccccagcagttagcatttcttgtttagaacttagtaacaatctagagaagaagcccaggaggactaaagctgaaaacatccctgctgttgtgatagagattaaaaacatgccaaacaaacaacctgaatcatctttgtgagtcttgaaaaagatgtgatatttgacttttgctttaaactgcaagaggaaaaagactccactgaaattctaagtttgccaagtagtgtaattgaagtccttgtctggtcacacagtttaattctatttttgtaagaacataatgggactgcataacagagttctatattacaattttgtgattattagtacagagtacagctatgctgtgactgttttggaaagccagttttaacactatgttacatttttgtttaaagtaagttaaaccttatataacataatgacatttgatttctggatttttcccatgataaaaattagggggataaataaaattgttactggaatttctctgcttttcttttcccccagtgttatactttattagaattataattgatagaactttaaaatcatcaacagtttgtttcctttgacattttaggtgatattgccctttgagatcattacatagcataatggcagcatattttaagagtgactcatggctattagtaggaaataagatcagttactatcctgtattctgtattgctggctattaaacagtaagataattaacaaattgaactacagtttacacacaatggggcaaatggggtagtaagagcaaggaagaaagtttaccaaactaaatatttaggttattgtatgataatattgagactacatttctaaattattttgagaatttcaactttttattctaccaaagttaatctgaaacttggacatgttcaccagcattactttctttgaaagattggtataaaaacattgagctgcaagtttatttacaaaatatataagtatttttaaggatgttgacacctaataattacatgctaaacgcaaacgattaatgtaatcttttaaaccgggcgtttgaaaaaaaattttcaaggtcatttcatgataaccaatcatgaatggatttaaatggagctttttgagcacaaccagcaatgtttgtgctttctaagagtcactgacttgagaggaaagaaaaccagaaggttaatgcagtttggatattaaattcttagcaaaattaataattaaagcaaaattaattaagattttgtaagtcatcctgtcttcacatactcagatcttccaatagtggcttattttgcaagatgccacaatatctacacagaaaattgtggctatttcattattgctatagatttcaaatccaacacaaatatttaagggtgtttaagttatatttttcttgatagagggtatgctttgtgacaaaattagatttttgtccttgaaaggattaatattagcatcagttatgtatagctctatttttctagaaacaaggtattctgactacttttatagctgactacttttgggatggctacgttttgggatttaaaatagttcattgtttaatgggttgtaagaggaaaaagtgttaggatttgacagttactttttaaagggatgatcttttgtggtgtgtgtttttcctagtataagcctattgctggcgatgggcctatttaagaacagctgattttttccagtgaaaatatggtaattttaggaacacagtttgtaagttcacatttactataatgggccaaaaccataacctgccagtttgcaatacatcttgatcttttaatattcttatctgatattgtgtaattcaattcctaaactgatagttaccttgaattttgcgaaaaggtttgggtggttttttttaaacatgaaattgagggatctcatctgggcgaacaagaagagaaagctgtgaattgtactgtatcatgtacattcctgatttaatactttacagaacattttattcagatatcaatttgttacataaacatttcagcaatgatacaaagataactgataaaatatattacattcaatgaggttttctttacaaatgctctacttgaggtctgtgtcttaaagatggcatgacacctaagtacaagacatcaactgaatgaggattttaaaaaatggtatataagcataggacaagggctatgtttgtttgtttttcaaaagtgctttgaagataacagcctttaggtttgagttatttcacttttcataatttttaagtagcttatatataatggtggtaccataggattttcttttttcaaatgactgtcggcagaaacagtgggcactgactcaccttttgagttttagcagagaattatttatttctttacaatgcactttctaacccattgtagctatattagcattatcttttaaaaaagacatgcttttgtatttaaatattgtaggatttaagtgtctttctcaaaatagcttattcctttctgaaagaaaatgagggaaatactctgaattattaggagacttaaacccaatatttaaatatgctattttataacactgcatcagttttaggagttgcatctctcctgctggctcttttatatttgagcaagatcagtgtagaatatgtgtttagaaacttgtctgttgtctcagtttagtgaaaaggaggtgctgcatgtgcctgaattaaaaccaagaaatttttccaagccaaatgcagccttagtgatgagagatttaattctccattgtcaccttttagcttttatgattgcttagttttttctgaaggatgtctgcattgtaaaactatggactaaaacctaaaaaacagaatcctcaaaaactttgctgtatgtgttttaacattttagagaacagtatgttgaataactaaggtatgtaacttgaataggaaaaatgtccatcaaatgcaccttggaaaatcacagtaggtagaaggctgtgttaaccgtttgtgtcttattaacatccttaagttaattttgaatttttgacagttttgagggaaaagacctatggaacctaatgtgaagtatttcgtatgttaactggtgttgagttgaagatttttactgtgtataagcagatatcatttgaatgataaaaatgtcattaacctgctgtcttaagatgttcacacaaatatggagagtaattctacaatataaaaatatttattttaatactgagtttcagttaagtcataaacagtgttaaaactcttgggaaggtgtaggggttttttgtttgtcatttttaaaattgaaactgtgtcatacagtgtttcacgtctctgaaattgggattataatagcactattttgatgtagctctaccgatactatgtggtaatgctattttgttttactaacaagctctggaatatttagcagtcattttcactggcacaagagccttttgtatgttattcaatttaaacttttaaaccaaaaattttatggtccagtgtctttggcaaaaagatgctggagggaatgtaacatacaattaatatgtggttatatatatatataaaaagacacaaattgccatgttatggttctgccttgaaacagcacaatgaagtgtatcagtatattctgtgattatgaaacttatatgttgtgttgttttgtgtcttctgttgcctgtcctttgggccagatgtgggccagttaaatgcagttatcatctcattaaatacagatgcagataaaatatctttagtgctgcaacattttacctaactttttgtatgttttcatgactgtgtgttattttccaaagctgttcctacctcaccatgaggctttatggattgttatgtattataaatgttctatatgagacagactactgtgtttcttctcatttattaaaagttaagtagaaaaataaactaattttaatatcta

SEQ ID NO: 339 - DNA, 5601 bp, Homo sapiens
  source 1..5601: mol_type = genomic DNA; note = NC_000012.12:6821821-6827421 GPR162 [organism=Homo sapiens] [GeneID=27239] [chromosome=12]
agccggcaggcagcgggagcccgagagagccgcgtcgggagtgcggtctccatggcagtgctgggcgcagccggagagaggtaagacgacccctgcctgccccgtcccctgtgttgcctccctttccccctcaagctgcctcctctcccctaggccggcccctcctccccagccacctgctgtttctgccctggagaacctggagggggacaggagggaggagccgcctgaccttaccccttcaccccaaagggcgagggaccccgtcggccagggaacctcccagatcccccttcccaccttcctctgatctctccctgtccttcacctccctctctctgtccttcacatctttcctgcctccttccctctctgactccctatctctttcatcctgagcccaccagctgggcctgggtggaggtgggtgggaaggggtccagggctgtaggagaggacactgggggctgctcttggccaagtccctccacctccctctggctggccattgccatggcaactagggtgtactgggctccggagggaagccaagggtgggggtggaccaggacctcttggggaaagcaagggtctgagctgcttccatgggaaacagaccctttcactgctgtgccccatttttaccccacttaccctaaagccattatgtgcttccttacagccccactctgttcagggtttcacccgattcccttaccccccttcccagggctcactgaagctcagcatcacgcactaaaactgggaccatccttcctcccatgagagggaaactgaggctctgggccagggaggaagagtcaaggtctccccacggggagtcagcaccttattgaacatttggcttttcttctcagcctcctattccctgctccctccctccctccctcctccagtccctcctccctccaaagcctcctctccagggggtttgagcttttcctgctattttcagatactaccactttgccccctctttctcttctgctcaaactctcctccttctccctagttccccctctttccatttctggatgcttctgatgtcagcggtttccccgccttcaggttccctagcacccccttcggtcccagactcctttctcccattttcccagatatgggtagctggagggtgatcacccaggtttggggaagtaggggctaagcaccaagacccctgcatccaggagaccggcaggtaggggaggaaggctgtgatgccatatcccagttcactgtgaaccctcaagaggaaaccagtcttgtgtctcccatcagtagttctgaagagacatttagggacttgaagataggggtggagtagtgctgagcaggggatgttctaagaaggaacctgggagttccagcgggaggaggaagggctaaaggagacagggaggtgggaataccttcttccctagaggtctggaagagtgcggctctcatctgtgtggggtgtttagctgtcagagttaaggcaaaggaatgttctgaatgaccctcagggccttagtaatcagtcatgcctatagtttcaagaaagggggcacaggaggctgattggagaccagcccaggccctacctttgccctctccctcccacatctcatctttcccttgcagcctgtccagggggctgagccccacccccaaatccctggggcatccagaagattcctgactggtcaagaaccagaggcaaaagagacctggaagtcccagcatggggaccagaaccccccagccagcctcatagttgggaaagtagccagcttgcctgccccatcaattgcagggatgcttaaggaaggccccgcccagtatgaaagctgaggattgcctctgctgaccctcagtctcctcccctgccctctacatctgccctcagctgggtccatcatgcaatgctgagcactggggtgagcctgggggcagcctgcctgctgacagggcgaggattgtggggatcatgggagtgtttgtgagtggggctcctgggtgagacctagcccccacccccacagagctcaagggggtggggggctgaggataggatggctcggggcggggcgggggcagaggaggcctccctgcgctccaacgcattgtcctggctggcctgtgggctcctggcgctgctggccaatgcctggatcatcctcagcatctcggccaagcagcagaagcacaagccactggagctgctgctctgcttcctagcgggcacacacatactcatggcagctgtgcccctcaccacctttgccgtggtgcagctgcgtcgtcaggcttcctccgactatgactggaacgagagtatctgcaaggtcttcgtgtccacctactacaccctggcgctggccacctgcttcacggtcgcctccctctcctaccatcgcatgtggatggtgcgctggcccgtcaactaccgcctcagcaacgccaagaagcaggcactgcatgccgtcatgggcatctggatggtcagcttcatcctctccacactgccctccattggctggcacaacaacggcgagcgctactatgcccgcggctgccagttcatagtctccaagatcggcctcggctttggcgtttgcttcagcctcttgctacttgggggaattgtcatgggtctggtctgtgtggccatcaccttctaccagacactgtgggcccggccccggagggctcggcaggcccggagagtggggggtggtggggggaccaaagcgggtgggccaggggccttgggtacccggccagcttttgaggtaccagccattgtggtggaggatgcccgagggaagcggcggtcctcgctggatggctcggagtctgccaagacatccctgcaggtcaccaacttggtcagcgccatcgtctttctctatgactcactcacaggggtgcccatcttggtgagatcggggtcctccccacctgttctccccaatatccaggccccagcatcatcacctgacctccaacttcatcagccatacagcagctccgtcatctctcctccagttccatcatccatcttcctctcctctgtccatcccccactccatttgtggcccccatcttgatcatctgtcttttagttcccactaccctgtttaccccagctccagcatctgcttcagttcccactcctcagctccatcaccgtccttcagttccacgacctgtcctccagctccgtcatccatcctgcagctccacggttcagccgcagacctctcatccagccgctgggctccactctccattccctccttccctcgggctgccacatggtctctgagcactcttggctggaaatcccacagggctcaccccaccaccccatctagtcactgttcctgggttcctgtctgtctctacggttcctggtccacctctgttcctctccctcctgaccgcagggctttgtctccagcactctccccgaccttcctctgagtcagtcccttccctctgttcactccatctccacctccggcttcgcctctgttggagcacagggatcaggcattacttctgacgtcttgcccaccagctgcactaggatatggggttcaggtgggctcctcagctctggccctgacccagcccgctcccacccttccccaggtggtgagcttcttctccctcaagtcggactcggcgcccccctggatggtgctggctgtgctgtggtgctccatggcacagacgctgctgctgccctccttcatctggtcctgcgagcgctaccgcgccgacgtgcgcacagtgtgggagcaatgcgtggccatcatgtctgaggaggatggagatgacggtcagaggaggggctgggctttggctttcctggacatctgtctattcccttttctgccgctccttctcagccagaggatgggctgccctggagtgccccctactggacagaatctgcaccaccctgggctcccctttccctaagcaggcaccctgctgtccactcactgcttcccgcagcactcagggctcccttcactgggcctaggctcccctccagaaacccacactgcccagctctggcactatggggaacctgagcttcccgagagaggccccccagctatagggacggctcttgggggagtgcaggcaattgtttcaataacttcatctatatgtatgaagcactccactcaggatttagcactgaacgcagcaaatgctagccactctcactgtcctcttggaacatacatgctaatgggaactaaaggggtctctgggagcttataaaggcagtggtgggaggccgcggtaggcattccctacctgtaaccactctgcccattttctctcctagatgggggctgtgacgactatgcagagggccgagtttgcaaagttcgctttgatgctaacggagccacaggaccagggagccgggaccccgcccaggtgaagctgctgcctggaaggcacatgctcttccctcctcttgagagagtccactacttacaggtatggaactgggggatacatctcctacccttggtgccgctcatcacttttctccagtgtctgttaggcaccccaatcccctcttccctagccctggctttcagggcaccatagagctgggtgaaagaaagctatagcaagagaggcatcccttcagacctcgtggggccaggtttgcccaccggagcaaacgttttgaaggttaagaaggtggcaccatcttccggagtccccacttggttcctgcctctgcctctgtccctgcagcaccttcaggtcttacccgctcctcttcccaggtccccctatcccggcgtctgtcccatgatgagacaaacatcttctctacccctcgggaaccaggctccttcctgcacaagtggtcatcctctgatgacatccgggtcctcccagcccagagccgggccctcgggggtcctcctgagtacctgggacaaagacacaggttggaggacgaggaggacgaggaagaggctgaaggtggggggctggccagccttcgccaattcttggagagtggggttctggggtcaggtgggggacccccacggggtcctggcttcttccgggaggagatcaccaccttcatcgatgagacacctctgccttctccgactgcctcaccagggcactctcctcgtcggccccggccactgggcctctcaccccgccgactctcccttgggtcccctgagagcagagccgttggacttcctttgggactaagcgcagggagacgctgctccctgacggggggtgaagaaagtgcaagggcttggggaggatcctggggcccaggcaaccccatctttccccagctgaccctgtgagcccaagcaggcctgctgaactcagaggagaaagcctgagtgagtaacacctcattctggccgagagtagggcagctgcctccagactctggggagacgggcgctagatttggggctcagaaggccctgctctctcccatccaagtgaccagatgccctactcagcttccatcacccctagcaatatgtattaaagtctgaagtgttgccatggaaa

SEQ ID NO: 340 - DNA, 43893 bp, Homo sapiens
  source 1..43893: mol_type = genomic DNA; note = NC_000014.9:c63728108-63684216 SGPP1 [organism=Homo sapiens] [GeneID=81537] [chromosome=14]
gggcgcggcgcgcgcggggcgggggcgcgcggcctgtggcgccgtcacccggcagactccggagggtagagcgctgtgccggttccgctgccgctggccaggagcgcggggacagttcggggctgcgccggaggccggcccgccttcccgggggttccgttatcatgtcgctgaggcagcgcctggcccagctggttggccgtctgcaggacccgcagaaagtggcccgtttccagcggctgtgcggggtggaagcgccgccgcgccgctcagcagaccggagggaggatgagaaagcggaggcgcctctcgccggagaccctcgactgcgagggcggcagccaggggcgcctggaggcccccagcctcccgggagcgaccgcaatcagtgcccggccaagccggacggcggcggcgcccccaacggcgtgcggaacgggctggcggccgagctgggcccggcctcgccgcggcgcgcgggcgctctgcgccgcaactcgctgacgggcgaggagggccagctggcccgcgtgagcaactggccgctctactgcctgttctgcttcggcacggagctgggcaacgaactcttctacatcctgttcttccccttctggatctggaacctggaccctctggtgggccggaggctcgtggtcatctgggtgctggtcatgtacctgggccagtgcaccaaggacatcatccgctggccgaggcccgcctcgccgcccgtggtcaagttggaggtcttctacaactctgagtacagcatgccctccacccatgccatgtccggcaccgccatccccatttctatggtcctcctcacctatggccgctggcaggtagggttccttctcgtcctgttcagcctgggggagttcaaagaactcggagttctctttgctctctgcatttattttaattcgaccgttcccctccaaagcctctctttccacaggttttcacaatactcgcaaacaggccctttctgggttttgaaaaattaagtgattgggggaaactggatacttagccgttgaattctattttaatattaaattccaatttaatgccttagaacccaaaggacacacttttcctagagtaatacattgtcattgggctttggttgagttttttaaacggctttaattcttgtaatgcacagtggaagtgaattttttaaataatcgctatgtaaactaagacccagtttcaccgtaatatatggtgccttcttccctaaaactgtttcagaaagaggtaaagtcattagctttaccgtgagacagtgtttacaaaacgttagtgtaattccaaaacaaacatgctagttccaagcaatgaagtaatcgattttcatcgaagttccctttatggaagttaatggagcacagggtgagttctgtttttaaggggtgtggttgctactttgctgataaagtttgattatcttctggatcactaatctgtagtatctaacagttgttgagctacaactgtaatactatagtgttattgcctcattaactctaaaaatgcatggtttaaaagttattcttaaagatagggctcttgatcaaactagtgggtttataaaaatggcaaatatgacagcagggtcagcctgacaatcaggaaaattttttttttttttaaccctctctgaaaactgccaagggaagagtttttaatggtaatcgtttttattttgcttacttcttttggccttccaatgtttatctgtctttgaactgtaagatttgttaatcctgcagaccagtcccttattttaagaataaagtgcgtaattgtggagattctaaggaaacaaacttcctctattttttccccctttacttcacaaaatcattttacattgagaaatacacattctgtgtaaaactccattatgataagcttacttatcccacattaaatttcagtgtagataaaatttcgtccccatggatacttctgtgtagtgcatctctcttacagtacatggaaaatacgcattgtgcatagtaagaatggcagaattaggaggaaagagtaccatgggaagtttttttctgtttaaccaaaggagctatacggtgatgttcagattgtgaagcagtgctacctgttttgcgtaacagataaatatctcgaagttttcatttaatctaaatatttcagaatttaagattttcaatgagctgtgtttggcctggtgatgttagctgatgatgtttctcttattttcgtgagacttttaggattctgtaacaatagagccttttatgatgccttctcagtgagtagctattttgtatgctattagtattagcagtcaaagtaagagaaaatagctatttttgctctttatttgttctggacacatactaactggaagtctgaaaacagtactgctgaatcgtttatgggatattgatattctaacatttcagggttatttgaattatcagaataagcttagatttagtttttaaacaacctagtatatttaactcaaagtttaagaaatttgcgtatcatagaattttagactttgaagtagaccggatgttagaaatcacttagtttcaaactgtcattttacagatgtgcaaactgaccagttacattaaaattaatcttgtaatgctttaaatttcttattttacattttttcactctaaatttgcatgatttttcggttagttgttctgaaagaaagcctcctgacggagtctcgctctgttgcccaggctggagtgcagtggtgcagtctcggctcactgcaacctctgcctcccaggttcaagcaattctctgcctcagcctcccgagtagctgggattacaggcgcctaccaccacaccagctaattttttaaggatttttagtagagatgtggtttcactgttttggccaagctggtcttgaactcctgacctcaggggatccacccatctcggcctcccaaagtgctgggattacaggcgtgagccactgcgcctggcctaagcctcctttatatgaaagttctgtgtttataaatgtttgactaataatccagtacaaaaaacaagatggctttttaacctttttccttttttttttccctaagagtcggggtctcactatattgcctaggctggtctcgaactcctgggctcaagttatcctccctccttggcctcccaagtgccagcttttccttttttttttttaagacggagtctcgctctgttgcccaggctggagtgctgtggcgcaatctcggctctctgcaatctcctgatctcaatcaggagattgagaccatcctggctaacacagtgaaaccccgtctctactaaaaaatacaaaaaattagccgccccccgctcatcggcctccccaccactggcctcccagagtgctggcattacaggcgtgagccaccgcgcctggcctccttttccttttcctttttttttttttttttttttttttaaagatccttgttatctattgaaaacaaaagtaccttcctttgcttcagctgtttgggtcctctactctgtgaattagtattgtactgcattggaggcttatatagaaagcctttcccctagaaactgggggaagaattaaataatgaaagcctggtgtttttctaataagttttggttggcagtcttgcctatctgctgtgcctcagctgcttatttgggacaggtatggttacttatatatgcctggcgtgctgaaacatctcttgaaactgagttctataccattcctttgtcttggctttactacttcactactacctactacttaatgtttctgccctcattgaaatttgctcaagattcaccacccagagcattttaaattaatcctttctgtttcattattcctcacttacacttaaaatgacagtatatggccaggtgtagtggttcatccctgtacacctagcactttgggaggctgaggcggaaggatcccttgagcccaggagttggagaccagcctgggcaatatagcgagaccctgtctctgcaaaaaaaaatcaaaaatcagctgggcatggtggcgcatgcctgtagttctagctactagggaggctgaggtgggagcatcacttgagcctgggaggttgaggctgcagtgaggtgtgattgcaccactgcacttcagcctagatgacagggcaagaccctatctcaaaaaaaaaagacagcgtacaaactcggggttgtttaaaaatgcagatttctacatttcccagggtaagtttcccagagattctgacccattagatgagtgaggagttagttgtatttcttcaagattgctgtctcagcttctttgaaattccagtctttgaattttttttttttttgagacgaaatctctctttgtcacccaggctggagtgtggtggtgtgatcttgtctcactgcaaactctgcctccccggttcaagcgattctcctgcctcagcctcctcagtagctgggactacaggcgcacaccaccacccccggctaatgtttgtatttttagtagagacggggtttcaccatgttggccaggatggtctcgatctcttgacctcgtgatccactcccctcagcctcccaaagtgctgggattacagacgtgagtcactgcaccctgcctgaatttttttaaggtacgttataagacaaaggagagattggaatagtatagctccaagtaattacttaaagagttttgtatataaattttatggtgatggaggatagaaaatgttatgaccttttcccaaggattaaataacttgagatccattgcctaggataatggttattgctctcatattattcattggaattttttgtagcctgaattggaaaaaaaattaagaaataaggagcatctgatataaagacaataaatagtcctttgaagaataagataaacaatatgacgttccttttccatttatgtttgcatgttcttttcaaaaataaaatttcttaatttttaaagctctgtttgacttgaattaatttaatttttaaataatatggaatgtaatcagttttaactgtatactttatttaattagaaggttttagattaattttttttttttttttttgagacagggtcttactctgtcgctcagactggagtacagtggcacgattccggctcactgcagcctcgacctcccaggcttaagtgatcctcccacctcagcctcccaagtagctgggaccacaggcacacactaccaccagctaattttgtttgtttgtttgtttgttatagagacggggttttgccatgttgcttaggctggtcttgaactcctgagctcaagtgatcctcccacctcggcctcccaaagtgctggtattacaggcgtcagccaccttgccctgctaaaaattagctgtagcacttactttatagacaactcattgccaactagtctttcattttgtgtgcttttactactttttattataataattatattttataataataatgttatagcattgttaatatttttattttttattttttattttttgagatggagtctcactctgttgcccaggctggagtgcagtggtgcgatattggctcactgcaacctctgcctcctgggttcaagtagttctcctacttcagcctcctgagtagctgggattacaggcacgccccaccacgcccggctaattttttttttttttttttttcaatagagacagggtttcaccatgttggtcaggctagcctctaactcctgaccttgtgatctgcccaccttggactcctaaagtgttgggattacaggcatgagccactgcgcccagctgttaatatatatttttaagcacttactatgaatcagacattgtttgaaatgtcttttatctcatttactcttctataataccccaatgttcctattactagcatgggtttacagatgaggaaactgaggtacagggaggttatattatgtaacttaagcaaagtaacctagccagtaagtgtcaggggctcagactgactcagcagcttatatagaaaattcattttaaatcacactttgtgtgtgatttttaaggtatgcttgcagtaatattatttttgaaatatatgattgtattcttaaaatatgagaatagcttttatataccttgagaagataatttgtgtttgtgtatgtacatacatatgcaacatccacaaatatttgtgttttaaacatgtatgaagatgttgactgaaatcaaatgctgatttgtcacctaatataaataaaaaatttgataaacatagtaagagctttggaaaagaaagacacataagaatattctgtcaaaatgttgtttactgtaaataatagaagaagatatctgtgaggtcatgaaaagataaatggaagaaaggcaaaaagtaagagttacaaaagtaggtcacagtaaagaccagaggaggctgcaagatccaagaaaaattgatcactatggtaattctggaaagaaacacagtttattaaaaaattgaattggcttgcctcttttttatggagcacgatacttgtgtttgaaattcacgttttcctgagtttataagtccttattactaattccttttttttttttctggatacgaagtcttgttcttgtcaccaggctggagtgcagtggcatgatcgtggctcactacaacctccgcctcctgtgttcaagtgattcttctacctcagcctcctgggtagctgggatgacaggtgtgtgccaccacacccggctaattttgtattttttttgagatggcgtcttgctctgttgcccagcctggagtgcagtggcacgatcttggctcacccaccaccatgcctgtctctactaaaaatacagaaattaggctgggtgctgtggctcacgcctgtaatcccagcacttttgaaggccgagacgaacggatcgcctgaggtcaggagttcaagaccagcctgaccaatatggtgaaaccccgtgtctattaaaaatacaaaaattagctgggtgtggtggcaggtgcctgtagtcccaactacttgggaggctgagacaggagaattgctttaacctgggaggcagaggttgcttgaaccctgctgacagaacaagactctgtctcaaaaaaagaaacatgaaaagaagagtacatttctttctctgtcccacagcttctagggtctttttttctgaaggattcagtgttagacatctcttgtttagcttcccagaggtagtctctacttttgcagacatacatttatatagttgtttgtttgttttgagacggagttttgctcttgttgcccaggctggagtgcagtgcaatggtgcgaccttggctcaccgcaacctccggctcccaggttcaagtgattctcctgcctcagcctcctaactagctgggattacaggcgtccaccatcacgcccggctaatttttttaatttttagtagaaatggggtttcagcatgttggccaggctggtcttgaactcttgacctcaggtgatccacccgcctcgacctcccaaagtgctgggattacaggcatgagccaccgcacccggcctatatagtttattattcatacacaaggtaatatactgtactgttctggatcttgcttttatcacttagtaatatattgcaaagaccttccttcccctccctccgtctctttcttccttccttccatccatccatccttcttttcctttttctctttccttcccatccttccttcctttttttctatttcttctttttttcttaccatttttgtttttacataggtttcaccatgttgccaaggttggtctcaatctcctgggctcaaatgatcctcctgcctcagcttaccaaagtgctgggattacaggcatgagccaccatgcccagcatgtttttttttttttttttgtgagatgcaggctccctctgtcgcccggctggagtgcagtggtgccatctttgctcactgcaacctccccctcctgggttcaagcaattctcctgccccagcctcccgagtagctgggattaccggcacctaccaccatgtccagctaattttttttttttttttgtattttcagtagagatggggtttcaccgtattggacaggctggtctcgaattcttgacctttggtgatccgcccgcctctgcctcccaaagttctgggattacaggcatgagccaccgtgcctggccttctttttttttttaagtccaacaattaatgaatactaattatgtgtctatgatttttaaaaatgccttacataaattaattctatatatatatagagagagagagggagagaggcaaacagaaggagagagaaaatgctatctaatttttttcacatttgcatgctgttccaatatattaatatgacataatttaataagttgactatttctatacatttatttatttattttcccagcgctcccctcaagaaatattccaatacctttagttttccaattgtttgctagtgtaatgacacagtgactgtttactggaacacattactatgtcaaagaatataggcatttaaattttaacagataacgtaaaattgcctgtcataaagattgtactaatttacattcatcctggaaatgtatgagagtatctggtttcctatgctttcagtgttgcagtatgttatcaaatttattgatattcctcaaaataatttttcttaaattaaaaaaaaataatttttatgtggccaggcgtggtggctcacacctgtaatcatagcactttgggaggctgaggtgggcggatcagccgaggtcagacatggagaagccctgtctctactaaaaatacaaaaattagccgggtgtggtgacaagcacctgtaatcccagctactcgggagctgaggcaggagaatcgcttgaacctgggaggcatacgttgcagtgagccaagatcatgccactgcactccagcttggatgacaggagctaaactccatgtcaaaaaaaaaaaaaaaaaaaaaaaaaaaaaatatatatatatatatatatatatatatatatatatatgtatatacatatatatgaatttttactatcctaattttacagatgacaaagtaattttaacattgtatttaatttgaattagtcttatcagtaaagttgaagaactttccataggtttattgaccacttatgtttccttttctgtgagctgtctattcaaagcatttcttttattttttttcacttagattattggtattttacttactgatctttacagatttttaatttttttattgctatgggtacctagtaggcatatatttatagggcacatgttgatttttaaaaactgtatctttttttagtggttgcttcaccttaaaataatattacattagttcaagtatagcatcagaaccttgcaacagtatatttccacttatccctgccctctctttgtcatgcatttatatccatatatgtcctaaggctcacaattcatcgttattatttttgtataatgttccaatgtatgatatagaatgtcccaatatggttttggaactggtataatttttctcctacctaaagagcctcttttcacattttttctactatagatctgctggtgataacatttccttagctcttttatttgaaaaatatattgaattaattttggaaaaatattttcatgaggtacagaatccaaaaataaagatacagaattcagaattctaggttgatagttttgttttttctcttggcacttcttttttttttttttgagatggagtcttgcgctgttccccaggatggcatacagtggcccaatcttggctcactgcaacctccacctcctgggttcaagcagttctcctgcctcagcctcccaagtagctgggactgcaggcgagcaccaacatgcctggctaatttttttgtaattttagtagagatagggtttcactgtgttggccaggcaggtctcaaactcctaacctcaagtaatctgcctgcctcagcctcctaaagtgttgggattacagttgtaaaccactgtgcccggctacttttggcacttttagtactatgttgtaccattgccttctggcttgcatagtttttgacaaaatatctgctgaaattcttatttgtgatccccagtacttaatatgtattttttattctggctggttttaaaattttctctttttctctagtgttgagcaatttaaaaatgatgtgccttaacatgctttttctttgtatttcttctgctttgaggtcattgagcttgaatccatgggtttgtagttttcgttatatttggaagatcttcagcattatttttagaatttttttcctctcccttccccacttccattcggttctttggaaattccaatttcagtacgggtgtggtggctcatgcctgtaatcccagcactttgggaggccgaggctggcggatcacgaggtcaggagattgagaccattctggctaacatggtgaaaccccagctctactaaaaatgcaaaaaaattagccgggcatgatggtgggtgcctgtagtcccagctactcgggaggttgaggcaggagaatggcgtgaacctgggtggtggagcttgcagtgagccgataacggatatcatgccacagcactccagcgtgagcgacagagtgagactccgtctcaaaaaaaaaaaaaaagagaaattccaatttcatgtgttttaaactgttcattcacaggtccctgaagctctattcttttttttttttttaagcatttttgctttccctgcttccttttttacagtttctgttgctatggctttaagttcacttacctgttcttttgcaatctctaattttctggtaattttatcaagtaggatagggtataatttcagattctgtgtagtttatatctagaaattgcatttgggtcttttaaaaaatcttcaatttctcagctcattatatttctgtattcttgagtaagttcagaagatttttaaaaattacagttgggtcctgggcacggtggttcatgcctgtaatcccagcactttgggaggccaaggcaggtggatcagctgaggtcaggagtttgagaccagcctggccaacatgcagaaacctcctctctactaaaaatacaaaaattagctggcatgttggtgggcgcctgtaatcccagctacttgggaggctgaggcaggagaattgcttgaacccaggaggcagaggttgctgtaagctgagattgtgccactgcactccagcctgggtgacagcgtgagactctatctcaaaaaaaaaaaaagtattattgggtacagagactcactgtcacccaggctggggtgcaattgtgagatcttaaacccaagagcctcgaactcttgggtttaagggaacctcctgcctcagcatccagagtagctaggactgcaggtgtgtgccaccatgcctggctaattttttaaattttttaattttatatttttaatttttttgtttgtttttttgagactgagtcttgctctgttgcccaggctagagtgcagaggtgtgatattggctcactgcaacctccaccccccggattcaagcgattctcctgcctcagcctcccaagtacctgggattacaggcgctcgccaccacacccaggtaatttttgtatttttagtagagatggggtttcaccatgttggccaggctggtcttgaactcctgggctcatactatcctctcacccccgtttcccaaagtgctgggattacagtaccttgcccagccaatttataagatgttttatagcaatcttaaggtatttatcttctaattccatcatctttgtcatctttgtgtgtttctattatttctcctgattatagatcatattttcctaattccttgcttggtaatttttacagttttggattttgttgtatttctttacatagtcttggagtttgttctggtgtgcagttaaattacttgtcagtttaaatccttctaggtttgataggatggtccagaataatcgtaggttaaggctaatttagcttcactacttacatgataaccttctaaccattctacccaattccctcttcactgcttgatgggaaagcaattgcaagcttatatgagctttgggaattgtttggcctgctcctctccacagtggttttttctacagtctggtggatttctccccatgcatgcacagattagtactcagccagcaacttcatgagttccctctacatatctccagggctcagtctctgagatttgtctctccaatactctgtcctgcaaattacagcctctttggcttctgaggatactagtctttctccccttaactcagggaaactgctggactcagttttgattcttcctcctgtgctacagcctggaaactgcctctagcagcaggataatgcaatcacagggctcatttgtttcccttttctcatggatctgagtttcacaagagtgaaactccggctcaaaaaaaagggggttttattcgaacaacatacaaacacacaacagaatgcttcataagtcactttaaacaataaaatagacaataataacatacatatttttataagcatactcaggtatactaatgacagttgcacaggtacaacagttatgagcagatgaactgtattcataaggtcattggctgggtgcggtggattatgcctgtaatcccagcactttgggaagctgaggtgggtggatcacctgaggtcaggagttcgagaccagcctggccaacgtggtgaaaccctgtctctactaaaaatacaaacaattagctgggcgtggtggcaggcgcctgtaatcccaactacttggtaggctgaggcggagaatcacttgaactcgggaggcagcggttgcagtgagccaaaatcacagcatgagcaacaagagcaacactccatctcaaaaaaaaaaaaaaaaaaggtcggctgggagcagtggctcatgcctgtaatcccagcactttaggaggctgaggcaggaggatctcttcagctcaggataccagcctgggcaccatggtgaaattccatcactataaaaaatatagaaagttagccaggcgtggtggtgtgtgcctgtggtcccagctactctggaggctaaggtggggaaaaatcacctgaggctgcagtgagctgtaaccacatcactatactccagcttgggcaactcagtgagaccctgtctcaaaaaaaaaaaaataaataaaaatagaaggaggtcaaggctgggcatggtggcacatgcctgtaatcccagcactttggaaagccaaagcaggaggatcacttgaggccaggagttcgagaccagcctgggcaacaaatcaagaccctttctctacacaaaatttaaacattagccaggtgtggtggtatgtacttgtagtcccagatacttgggaagctgaggtgggaggatcacttgagcccaggagttggaggctgcagcgaactataatcatgccactgtgtcttagcctgggagatagaacgagactccattagtaaaaaatgaaaattaaaaaaaataaagagttaaaaaagtgaagtacaaacatttatcactatggctggtaattgtgtgcactccactttattaactgtggtcatctgaaataccatgatagacaatctgagccttttgatgagatccatcaaaaaccacatgggccagctaccacatgtgcagtcacccaaagagtcaagatctcaagaaattttatctttcacaaatgcagatgtacatcacttcgtttattaagtttctacatttttaccttgtgaaccagggaagttgatggtgtaactcccagtccaaggctgaaagcctcaggatctgggtggttgctggtgtaagtatgtgctggaatcccaaggctggtgagcctggagttctaacatccaaggcagcagaagaaaagtctgtcccatctcccaaagaatccagttaaccttctggatatgttctgtctgggcctcctgcagattagatggtgcatgccaacattgagggcagatctttcccatctagtccactctgactcatacactaatctcctctggaaacatgctcacagacacacccaaaatgatgctttaccagatttctaggtatttcttaatccagtcaagctgacacctaaaattaagtccacaaattcaaaccttgtcaacttcacacccatatgtatgaactgtatataatttccatgtaaagacaatagcaagaaaatacttcacctaacatgatatggctatcccacatacaaccaaaaatgtgctaaatttcttccctagattttggctttcaaattccaggattttaatattttgggtttttaattttcaggattttagatattagagattttagactttagagattttgatcttttgggatttcaacattcaggattgtatcttttgggattatgactgacaccagttctgacatagaccgtttaggccacagagcctaaatagttgctatcaggctctttacaaaaagctttgccagtccctgacttagtgtcaatggcagtagagagaaatgggtgaatttgatagatattaagaggtagaattgacaaaacatggtgactaattggatatatcagtaagaaggaaaaaaagtattgttctgaggtttcctgcttggcaagctgagaagtagtagtttggtttatagaaatagcaaataatgaaagtgggtcagatttggggaaagtggcaacggcatggagatgacttcagttttaggtatttcgagtttgaagtgtctataagtcatctggagctgtccaggagatggttctatacatgaagatcaggaccagtttcttgtcatcagcatataggtgcaaaatgagtacacacagaagaagagagggtctgctgggcacagtggtgcaggtctgtaatcccagaactttgggaggctgagaatggtggattgcttgagcccaggagctcgaaaccagcttgggcaacatggtgaaatgccattttttttttttttttttttttgagacagagttttgctcttgttgcccaggctggagtacaatggcacgatctcggctcactgcaacctccacctcacagactcaagcaattctcctgcctcagcctcccaagtagctgggattatagtcccagctactcaggaggatcacttgagtccaggtggttgaggctgcagtgaactgtaacggtgccattgtactccagcctgggcaacagagcaagaccctccctcaaaaaaacaaacaaaaaataagtaaaaaatacaaaaaaattaaaaatgttctgttttcatacgcacatgtctgcctcactcatagttttatttttataaattcaagcacacagtagagactctctttctgactttatttgcagctacttttagaaaaaagaatctgactggctcagcacagccaatggttttgcttccctagtgccaagtgttcattcctgatccaagtagctgtggtcaagggagcaggatcacaggggatgagcatgtctccagggccacactgctgggtccaagtgggggaagttttcagaagagaggggtgtagattggacagtatcataaaatgaatgtagtacagagggaagccagaagtgaaagtaagagagagggtgtttctagaaaagaaaagtagttaacattgttattctgctaagagaacaagcaagataagtactgaaatttatagaagacttagaaaataaattaaaaaaagaaaaagctaatgttaattttttatttccttacaatttgaaaatagttgggaccatattatatgtggagtttattctttttatttaatattatatgtgattattaattttatgtatcagtttatttgagtaaaggtactcagattttttttttttttttttgagatggagtcttgctctgttgcccaggctggagtgcagtggtgcgatcttggctcgctgcaacctccgcctcccaggttcaagcgattctcctgcctcagcctccccagtagctgggattacaggtgcctaccaccacgcctagctaagttttatatttttagtagagatgtggttttgccatgttggccaggctggtctggaactcctgacctcaagtgatctgcccaccttggccttcctgggattacaggccttgaccaccatggccagcaaaagtactcagcttttgatcaaaaatgatcaaaacatctagatgtttttctgaaagtagtttttagacaagtttaacatttaaatcagtggactttgagtaaagcagattatcctccataatgtgagtaggtcttatccaattaaatgaaggccttaagagaagactgacctcccccaaagaagagtgaattctgccaacagaatggtttcagacttgagctacacattaactcttccctgggtcttcagcctgtcggcctgccctgcagattttggacttgccagcccctacaactgcatgaccaatccttaaaataaacttttctttgtatatgtagatatacatatcctattggttctgtttctctggagaaccctgagtaatacattatgtaaagaattttcccaccaatataaatccctagaaaacaatcttaatggccaggtgcagtggctcacgcctgtaatcccagcactttgggagaccgaggtgggcggatcacctgaggtcaggagttcaagaccaacctggccaacatgtggaaatcccgtctctactaaaattacaaaaaattagctgggcgtggtggtggacgcctgtaatcccagctacttgggaggctgaggcaggagaatcgcttgaacccgggaggcagaggttgcagtgagccaagatcgcgccattgcactccagcctgggcagcaagagtgaaactctgtctcaaaaaaaaaaaaaaagaaagaaaacaatcttaatgaatgaaattttaaaaatattcctatgaaatagtttttatactgtagggttatgattattataggtcttagtatccccatttatagatgaggaaactgagatgtaaagagattatgcggctagccctatcccatggtcctacaactgaagaagtagcttttggggtgtctgcctagtttataactctctaaaagctcccttacctatagggaagctatattttctttacatgatctcgtcccttaggatttgagaacaggtacagagtctgggctggttttctcaatgaggaagtaaattcagaagcctttgtctgtcatgtggactgaaaggcagagaagctggtctgtagaaaaagaaaaatgaagcggaaatatagaaagaaaagatgatcctgtgactgttctgtttatagttgtggtttcttctccaagcttagcctcattccaccttagggttctgtgagacgctgtctatccttttaatgcatctcctttttttcttcttaaaataatctaaattggtttctgttatttacatgtttggagttccaatataatgcatgaagtaaatagtgataggtctatgtagctctataaactcatatttttaactacttcattataaccaataaatttggtttataattattgtatgttatcaataattttatgacaaacatttaaaaatatgaatccttacccacatttctatgtccttagtatagaattctagcattgctgggtcaatatatatgaacatttagagctcttctgtgtattgacaaaatgctttccagaaaggttgtatcagttttcattacactagtaatgtatgagaacaaggcatgtctatctttaatgtgccattattgtcatccgtttacatgtacactattcattcctagaattgaacagaaattctttcctgtgcctgccttccatatttaagttactctgaaaaatttaaattgtattaaagacagtttttgtaattgttttaattgcaagtgattttattgacttaatttactaccttcaatgaatgtaaatggaacatgccaaaatatgcaaaataattcttattatgtataatagtgagaaagtatatcacaaagaaaaaagccgtttggtagaataattgagggaaacgtttagataaattttcttgtgatcaaggatgtgcagtgaaaagattagatagtggtatgaaattaaaaacatctaggatgtcatgtgatctgttttgggtttggtacatttttacatttttatgtatttgaaaataatgtgaaggacttgtaatttttactttctactctataagacctaaagatttaatttcagtaaaaacattcttattagaggaaatacataaatgccacagatacagctcaacattctctatgaaaatgaaaacagaagccaggaaacccctgccaaatttaaaattgttacccatttgtgtaatgataaaaatataaagtaagaagcaatgataaattggaaaaggaattagaataggtcactagagtataatactgaatgttacttagcatccataggtctgttctttaactgtaaagagagagggatagaattaatggttttttttttttttttgagacagagactccctcttgttgcccaggctggagtgcaatggcatagtttcagctcactgcaacctctgccgcctgggttcaagcgattctcctgcctcagcctcccgagtagctgggattacaggcccccaccaccacacccggctaattttgtgtttctagtagagacggagtttcactatgttggccaagctcgtcacgaactcctgacctcaggtgatccacccaccttggcctcccaaagtactgggattataggtgtgacccaccacgcccagccagaattagtatctttaagctctcttctacctctaattagatgaaatttttatttagccttcattctaagaaaaacttaaaatatatttgagtgatattctacttgatcctaaggataaaagaaattaaacaacacactttgaacaactttatatatgaagggcagcatagtgtagtagttaagagctcagactcaggaatcagacttcctgtgcttgaatcacagatccataacctgatagctggttgacttagggcaaaaatttgaccctgctgtgccgcagtttcatctataaaatgaggtgaattagaatagctacgccatatggttgttctgatgattacatgggttaatatttgtaaaagctcttagaatagcacctggtatgtagtaaattgtatgtcaaataaaaattactaacctctcagtaaataataaattcatatttatttctcctaatgtctgcctagaattgaattttggcttaaaaaagtctagccaaattaacggtcagaaataaaggattgctggctgggcacagtggctcatgcctgtaatcccagcactttgagaggccgaggctagcagatcatctgaggttaggagttcgagacaagcctggccaatatggcaaaaccccatctctactaaaaatacaaaaaaaaaaaaaatagctgggcatggtggtgggcacctgtaatcccagctacttgggaggctgaggcaggagaatcatttgaacccaggaggcggaggttgcagtaaaccgagatggggcattgcactccagcctgggagacaagagggaaactccatctcaaaaaaaaaaaaaaaaaaaaaaggattgctgctatagccagtgagtaccaagaaaaaaagaaagattgggttaggtaggaatagaaaagaagtggagagagtggaggacgataccacaaatatgtatcagaaacaagagaaaggtcagttagattgctgtgactgaggaatgggggaagagatagtccccctagttctgactttttataaaatagaaactaagctcttacagaattgctaaatttactaatgtgggaaagacagaatttgagtttgccattgtaatgcgttttgcattttgaaaattattgtacttaatgagcctaccacactcactttttcctgagtgccgaggcagctatacaactattgtcaccacagactagatttgttctcaaccctggaggtttgaatagggatttaaaaaaaaaatctgcacagaatccacacaagacactggagaagttttctggagcctcgaagcagatgagggtggattatccaagacataaaaaaatacttaataagggcttggtgcagtggctcatgcctgtaatcccagcactttgggaggccgagataggtggatcacatgaggttggcagttcaagaccagcctgaccagcaggagaattgcttgaacccgggaggcggaggttgcggtgagccgagatcgcgccattgcactccagcctgggcaacaagagagaaactccatctcaaaaaaaaaaaaaaaaatcagtagataatgaagaagtactaatgacttggaaactgcctggacgtctatatttattggtttctggagaggcaatcaggaatttcttcctcatgatctggaatgctggggcctgcctgtagctctgacgtgttacaagctataacatgtagccctactctttcttcacagattctttccttaataggaactggaacacagatcctgtttttttaacgtaagattatatcgactagtatggtagcaaatagcacttcccttactgtggtttttgatataaaatatatttttaattataatgtgtatatggtgagttcagttgctaaactgattctttgtaacttaagagttcaaaagagaaacagtaataacactgacattagatgcaaataggtcaaaaccgtagattgagaatgttttaaattatatttttctcatttaatgtgtacattaaatgattatatatgggtcagtttttttttttttttttttttgggacagagtctcactctgtctcccaggctggagtgcagtggcatgatctcactcattgcaacctctgcctccatgttcaagtgattctcccacctcagcctcccgagtagctaggactacaggcgcatgctaccaggcccagctaatttttgtatttttagtagagacaaggtttcgccacattagccaggctggtctcaaactcctgacctgaggtgatccacccatctcatcctcccaaagtgctgggattctgtttcttaagtttactgaaaaggattttcagattgcaatttattatggtggatttcacagttgctcttagaactaagggttaacacagcccatgtttgaggccaggaactgaatgatactatggcgtttgacacatgttttcatgaatataatatggtaaggctggtggctgaaggcttatgtttactttgttcaacaagtattaattgactgcgcactatgtgccagacacatattatagtaatacaggcaggagagaattgctggtggcttacagcaggtaataatggtagaggtagaagtggtcacattctggatatgtttatttttggtttatttttttttaacttggggtaaaacttacataaaattaataattttgaagtgaataattcagctctagtacattcacaatgtcgtacaaccgttgtttctatctagttccaaaacacttttatcaccccaaaagggaaccctcttcccattaagcatttggctccccgtttctctctccccctgacttctggcaaccatccatgttgtggctgtataggtttacctattttggatatttcatataaatgaaattgtataatatgtgaccttgggtgtctggcttcattcacttaacataatgttttttaagttcatccatgttgtagcatgcatcagtacttcattccttttgtgttgactactattccattgtttgtatataccacaaataatttacccattcatctgttgatgaacacttgggctatgcccgccttttggttattgtgaatagtactggtatgaacatatgtataaatgtatttgagtactggttttcatttctttgggggatatagttaaaattggaaatgtgtgggtcgtatggtaattctgtgtttaactttttgaggaactgctaaactgcttttcatagcagctgcttcattttacatcccaacagcaatgtataaagcttccaatttccccacatactcaccaatacttgttactttcctgtcttttttctttctgttaattattatagctatcctagtggagtatgaagttgtacctcactgtgattttgattttcatttttcattttcatttcccattttttgagacagggtttcactttgtcacccaggctagaacgcaatggcatgatcttggctcgtgggaacctttacctcccaggctcaagtgatccacctacctcagcctcccaagtacctgggaccacaagtgcatgtcaccatgcctggctaatttttgtatttttgttagagatggggtttcgccttgttgcccaggctcatctcaaactcctgggctcaagcaatctgcccacctcggccccccaaagtgctgggattacaagtgtgagccaccatgccaggcgagcatattttcatgtgctttttggccatttgtatatcttctttggagaaatgtctattcaggtcctttgcccatttttcaattgtgttgtctttttgtttttgagttgtaagagttctttacaaattctgcatactagatccttattaaatatatcatttgcaaatactttctcccatttagtaaactgtcttttcactttcttgataatttcctttgatgtacatgagtgttttgttttgtttttttgtttttttttaaagacagagtctcgccctgtcacccacgcaggagtgcaatggcacgatctcggctcactgcaacccccacctcccgggttcaagcgagtctcccacctcagcctcccaagtagctgggactacaggcacacatcaccatgcctgactaattttttgtatttttcatagagacagggtctcaccatgttggccaggctggtctcaaattcctgacctcaagtgatcttcctgcctaggcttcccaaagtgctgagattacaggcctgagccgccacacccggccaatttgtaaattttgatgaaattccagtttacctatgtttttcttttgttacacatgcttttggtgtcatagttaagaatctgttgcctaatccagagtcataaagatttatccctgtgttttcttttaaaaatttttttaaagattttctttctttattgagacagggtcttactgtgttgtccaggctggtcttgaacacctgggctcaagcgatccttctgccttggcctcccaaagtgctagaattacaggtgtgagtcactacacccggcccctatgatttcttctaaaagtttttagctgctatatttaagttgttgacccattttgagtgtatatatggtatgagataggagtccaacttcatcattttgcatgtaggtattcagacgtcctagcactatttgttaaagagactattctttacctatttaatggtcttggcattcttattgaaaatcagttaaccatacgtatatgggtttagtttggggcccacgattctatttcactggtctatatgtctgaccttatgtcagtaccacactgttttgaatactgtagtaaattttgaaattggaaaatatgagtccttccacattgttcttcttttttagtattgttttggctcttcaggaccttttgcaattccatataaatttgaggatcagcttttcagtatctgcaaaaatgcaattagaactttgacagaagggctgggcatggtggcttaggcctgtaattccagtgctttgggaggctaaaatgggaggatcacttgagcccaggagttggagaccagcctgggcaacatagcgagacccccatctctataaaacattaaaaaattagcagggtatggtggtgcacacctgtagtcccagctacatgggaggctgcattgggaggatcacatgagtccaggagttggaggctatggtgaactatgattgaaccactgctagattgcactccagcctgggtgataaagcgagaccccactccccacctgccgccaaaaaaaaaaaaaaaaaaaaaaacttaaatagggattacattgactatagatcattttagataatagtgccattttaacatattaagttttaatgtattaagtcttctaatccataaacatgggatatcttttcattaattaggtcttttttttttttttttttttttgagatggagtctctcttgctccgttgccaggctggagtgccggggtgcaatctcagctcactgcaacctctgcctcccgggttcaagcaattctcttgcttcagcctcccaagtagctgggactacaggcacgcgccaccacgcccagctaatttttgtatttttagtggagacagggtttcaccatgttggccaggatggttttgatctcttgaccttgtgatccgcccacctcagcttcccaaagtgctgggattataggcatgaaccactgtgcctggccttaattaggtctttaatttctttcagtaatgttttatagttttcaatggacaaacctttcacttccttagttaagtttattcctaggtatgggtattttattctttaggatgctactgaaagtggaattatttttcttactttcattttagggttttttttttattgctggtatgtagaaacacagctgatttgtgagtgttgatcttacaccctgcaactttgctgaattcatttattaattctaatatgttttcttcatggattatttgggattttctatctttaggatcacttcgtctgtgaatgggggtatagtagccccgctcatcagcagaggatatgttccacgacccccattggtgcctgaaactgtggatagtagtcaacgctatatatactgtttttttcctgtacatatgtatctatgataaagtttaatttataaattaggcacagtaaaaaaaaatatcactttatctgttatttcctttagccattaagatctgtagtcttttttgtctgcttactgatgaaattcttttttactttgacacttagaagttcagaattctgttattcaatggggagtaaatatgaaagtcatcatgtagtcagaactggatcaagtgttccccaaaatgttttctttttaatttttttttagacagagtctcacttcttcacccaggctgtagtgcagtggcgcaatctcggctcactgcaacctctgcctcccaggttcaagcgattctcatgcctcagcctcccaagtagcttggactacaggtgcgtgccactacacctggctaatttttgtatttttagtagagacaaggtttcatcctgttggccaggctggtctcaaactcatgatctcaagtgatcagcctgcctcgaccttccaaagtgctgctgggattacaggcatgagccaccatgcttggccccaaaatattttttttccataaaaaaatctagagaacatatcataaaggtggagagtaatgaccaaaaaaagtcggtcaataaaaatgacttattttgttttctttagtcacctcatcccagtgaaatctgaaggtgccatggagcagagaaaaggaaagcctcatagcttctttagcctctgcatctggcttgataacattccatctctcctttttaaacaccttggacatcgtaaaattgaataaatgtgggttaagtcatacttggtttcattgctcctatttaaaatctctacccttccccgtcctaccttcacctctagcttctgagactctataggtgattttttcttcagtttgttgtgtataaagaactcttatcagtaattttgtacatttctacttccttatagggtccaagttagagaaggaagtgcagaaagatttttttaaagttgactttttttttttttttacttcttttggttcttttttttttttttttgctgtcaacagctttttaaaaattagactttaaaggtttttaaagactttaaaggtcaagtccctgctgtagagacagacaccactgttatctcttacctagattataccaacagccttctaactggtcttcctgtttttgccttactctcttaaaatttaatctctacatagcagctttactcaaaaccctgcagtggctccccatttgattcacaatagaagccagttttcttatggtggcctcccaggctctacttgatctggccccccattacctccctaacctcttctacttgctctctctgctatggccacagctagcctccttgccagtcatacttggtgatcagaaactttgctcactgattcgcctgcctagtatatgctattcccacagataatctgcttggcaagtatactcacctcacctccattccgtcttgcctcaaatctcaacttctcaataaagcctacactatcttctatttaatactgtaacctgccccatttacactctgaaactcatgaccctatttttatatctgttttaattaagttagacttgttgatactgtggcaatgacttaatcccaaaattgcaatgacttaacacataacaaaatcttgtatcttggccaggagtggtggctcatgcctctcatctcagtactgtgggaggccaaggcgggtgaattgcttgagcccgggaatttaagaccagtcatgggcaacatggcgagaccctgtctctgcaaaatattttttaaaaaatcagctggatgtggtggcacacctctagtcccagctactctggaggctgaggtaggagggtcgcttgagtctgagaggtggaggttgcagtgagccgagatcatgccactgcactccagcctgggcaacagagcgagaccctatctcaaaaaaaaaaaaatcttgtgttacaaatccattatgcgttagcaaacagctttgtccactttgaccctcaaggacctaggctgatggaagcttgcccgtctcgtgatgcatctcaacatgtagtttcccagggtcacatctataggaaagagagagttcaaaggaagattgaaagtggcataagtcacttttttccccagctcactggccaaaattagttgcatgaccctaatgtaagtgaatccaaaatgtaggaggagcacaaggaatattaatgagcattactatttcttcaacacatgttctctttttattttctccatgttacctatcaggttttattatatgatttatatattttatataacttatacatatttacatatcatatcatttgcatgcttttgtgtttactgtttaatgcctcctccagcaagaataggaacttatactcccagaaaagaatataattattctcccaaggaatatttagaatataaaattagtaaaacttgattatttgttgaatacaacggctaaggaaagaattaaggataattcatgtttctcatttggattacttggtttttggtgtttccaaatgaaatagggaatatcagaggaggaacaagtgtgggtgatatgatgatgagtttggtttgaggtatagtgggtttactgccatagggacctcaaggtggaaatatgtgcagagttggatatatggttcttaaacccggggaaatgggtaggtcttcagcatgcctagtctagaagtagttaaaaaaataagaaagggggccaggtgcattggctcactgcacctgtaatcttagcactttgcgaggccaaggtgtgtggatcgcttgaactcaggagtttgagatacccatctgtagtcctagctgctcgggaggctgaggcaggaggattgcttgagcctgggaggttgagactgcagtgagccatgattatgctgccgcacatcagccttggtgacagagtaagaccctgtctcaaaaaaaaggaaaaggtaagactgtcagtaactactaaggacagaatccttctgtatactaatgtttaaagaacaaaaagaggaagatacgctcttgtgtgggaaatgcagcaaaaaataaatggtgaaaggtgaaccaggagagtatgaagctatgactatcgagggtatttagagtttcaaggagaaagtgagggaccatgttaaatgtagtagatatgtaaaaaaaacaacaacaaccaaaaaaaaaaacaactctgcctgtagttccagctactcaggaggctaaggcaggaggatcacttgggcccaggagttcaaggtgttagtatgctattatcacacctgggaatagcctcagtacttcagcctgagcaacatagtgagaccctgtctttctaaaaaaacagaacaaaacaaaccaccaaaaaccaacaatttcgtactaaatattttctactcttcttacaagcttacttaagtcccttgctcctttatttcaacccaacttccctaaccacattggcttcaatttcattgagaaatttgaagtcatcaggcataaacagccccaaatgtgccctcccttcttccctttacaaacttaccaccatgcccatccatcctttcctctttccctccaatctcaggacattcacagccaacttttccactagtgccattgataccaagaattgtctgcactttctgtttatgctttttcccttttatgatttgtgctcctagtattccacggaaatttttctcagtaaggggaccatttgaaattttagtcaatggggtggaagtgaaaaactaagtacaaagtgttgaatactgaatgcaaggtaggggaatagcaatataaattggagatagcagtcactgatgaagtgagagggagataatgccaatcctcctccccagacaactgaagacatttacatggaccagattcaggtactattccagaggccctttcattttggtggccatattaaaagtatgtctcttacctgtcctcctcctcctataccatgccagtgattgaatcttcattgtagaagcagaagtgagccagttcccacaataaagaatttagacacatgagatttcattcatttgttcatttgtggaaaagtatttcttgaatgtctgccatgtgccatactcagggttaggtgctggaaatacaatggggagtaaaaacaaatttcttgttttagtggactttatagaatagtgatttgatttgtcttttatttgtttgtttatatctaacttaaatttgtttaactaattttactttttttcccctttagtaccctcttatatatggactgattcttattccctgctggtgttctctagtttgcctaagtagaatttacatgggaatgcactctattctggtaaggaaaatgttgtcttcttaatactttattttttatgacattgacaggaaattttataatttttaatcatttgcaaacttacctgaagcctaaatgagaaaatattgtaagtcgtctaactttgttttgcgaaaatatcaacatgatggtttatgaaatattaatgtagtagtcacatatttcatagaaacagtttccagcaatcacaatagccaggtattataatcaagataacatttcttcctccttccagtctcccttttattttcctttgcagtcttttctgtgtctctcttatcactgagtcaaaaccagcaatgtggctacagaaaccaaggagagctcctaagtattgttgaagaactagtgactagaaactatgtgaacttaaactttccaggggccatttgtgtttacatattaaactctacttttcttttctttcccatcagtatgttaggactcacagtggacattgtgttttgagaatgcaattcggttcccaaagcagcagcacagggaccctgtactatttgcagccacacccattcactttccctcctcgctatccctattgacacccccttagctctggcctgcaacatatcttgaccagattactgtgatagcatcttaattagtagccaacttccagtttgacactgctccactagcattcagctgtttcgtagactttccaaaacacaaatacgatgctatactgaattattaggtttcctccaatgcaaagggtttcttacctccataactttacaaatgctgtaacatttacttggaatgcccctttcactttctttaccttaactatcccattcattcttcaagactcactatagatattcttaacccctcaaagccttattaccttccccatcttctctttctcaagacttgtgaggtgacccttccccacttatcctaaattgcaattgcttttttccttatctgtcaagtatactagactccaagttccttgagaacagcaactgtgtgttttaactctacctttagtatccaacatggtgtctcatgaggcatctatgaatgaattatgtattatcatggagataaaggatcacaaaaaaaggtggaagaattcatggaattctagtttctaatgggtcatgtcagtttttttcttgtccttaacatgttaccatttttagaattttttttctcatattatttcattctcttatttcttagttatagaaatgttggtttctatctcaaatttcttgcttccagcacctgctccttcacagataaatttccagaagtcccaaacactattttattttgttgggaggcagtgtgtgctgtaattttggggttggtcattgtttctaggtttttttaaattttaattttagattcaaggggtacataagcagatttgtttgcaaaggtatattgtgtgatgccaagatttggacgtctattgatcctgtgacccagatggtgaacatagtacccaacaggaagttttgcagccctttcctccccccgctctccctctctccttttgaagtccctaccaaacacttttttttctttttgagacagagtcttgctctgttgtccaagctggagggcagtggcacaatctcggctcactgcagcttctgcctcccaggttcaagcaattcttgtgcctcaacctcctgagtagctgggattacagacatgtaccatcacacccggctaatttttgtatttttagtagagacagggtttcaccatgttggccaggctggtctcagactcctgacctcaggtaatccacctgccttggcctcccaaagtgctgggattacagatgtgagccactgcgcccagccctaaacactattttaataaacaaattatttgtgtttgactttttataattatttgtatttaatatgaattgtgaatttacatacacttctttctgactaatctctcctaattttgtaatcagattaagtatcatatttttatgcaaaatcaaatacttgttacaagaaaatgttttctatcttctgtgtctttttagagttattctgttccacccctaaaagttagcatcactacttctgaaaaaactaccaaatggttatgcatctttagtgataaaaagtgaattcctggtatttcttggagaaaaagatattagataatatcccttgactcattatcatcatacaaggaagaaaaagaatctatgtgatcacattgaatatataatctcaaagatactggttttgtttgcttgcttgtttgtttttgagatggagtcttgctctgtcacccaggctgaagtgcagaggcgtgatctcagctcactgcaacttctgcctcccaggttcaagggattcttccaaatagctgagattacaggtgcatgccaccatgccctgataatttttgtatttttagtagaaacagggtttcatcatgttggccaggctggtctcgaactcctgacctcaagtgatccacccacctcggcctcccaaagtcctgggattacaggtgtgagccaccatgcctggctgatactgttcttttttaaaaatgaaatgtttagttgggttagtcaaatatccaggatggacaacatctgttcttttttgtttgtttgcctttttagagacaaggtcttgctctgtcacccaggctggagtgtgatggtgcaaacatagctcactgcaatctcaaactcctgggcccaagtgatcctcccaccttaccctcccgggtgtctaggactacaaacatgtactataatgcccagctaatttttaaattttttgtagagatagggtctagctatgctgcccaggctgatatcaaactcctggttcaagtgatcgttccacctcaacctctcaaggtgctgggattacagatgtgagccactatgtccagcctaacactaagagttttaacaatggttattgttaggttaaaaactgtttgttattgtttatctataatttttactttttgtgtagtgagcatgtattaaatgtgtattttaatgaaagaagatagatacttcaaaagtcatccctaatcatagcttttataatcaaaaacaatgcattataacaatacattttgttgtcagaaactgttgtcattgtcatatttaaactggatccagggcacctgaaatatattatagttaaaataaaaacaaaaggctgggcgtggtggctcacgcctgtaatcccagcactttgggaggcagaggcgggcggatcatgaggtcagaagatcgagaccatcctggctaacacggtgaaaccccgtctctactaaaaatacaaaaaattagccaggcgtggtggcgggcgcctgtagtcccagctactggggaggctgaggcaggagaatggtgtgaacccgggaggcggagcttgcagtgagcagagatcgcgccactgcactccagcctgggcgacagagcgagactccctctcaaaaaaaataaaataaaataaaataaataaaaacaaaaaagccattatgagatgggagacctgaatttcagtctcagcaaatcactagcctctctaggtttgatcagtataaatgaaaaaaattttcaaatttaatacctaataaatcttcattaaatgtatggtatttaatatcatctaccataaattgacgataacctggagtattccatttagatgtgtaattaacaaattttggggtataagagttatttataataataaatagctaaaattatttgctaaatttccttttagaaaatttgctactttgagctctttgttacctttaacattaatgttctttattgcatactttgtgctctaacacttaaaaccacttagttatacattttaatgttatccattatattgatatcaaaatgatagccaacatggttatgtcgtaaatttgaatgtttctttttctgattctattggataggagttcaatataccctatctagggaaatataaacaatttaaaactcaaacagaaaaggaagcagatttgtctagtttcgtagcaatctaagttttgttttgtttttttttcctggtcagacaaggtgtggaacaatctaagtttaatactcgtggagctatacacaaaaagtagaggacaacaaataatggattttttatgtcaattgatacatgagaagttattattttaaagaattcttaatgttaaagagatcaaacataacaatttaaagacatttaatgaattttttcttttttttttttcttttcttttctgagacagggtctccttctgttacccaggctggagtgcagtggcgtaatctctgctcactgcaacctttgcctcctggactcaagcgatcttcccacttcagcctcccaagtagttgggaccaccatgccctgctgatttttctattttttctttttggaagagacagggtttggccatgttgcccaggctgctttcgaactcctgagctcaagcgatccactcgccctgacctctcaatgtgttgggattacaggcatgagccactgtgcctggccagttttttcactttttaaggtactataaaagaaacattttacaggattgaacatatgcttatatctattatgaaaaaatacataatttaaaaaaatacctggctgggcacagcagcccacgcctataatcccaacaatttgcaaggccaaggtgggaggagttcaagaccaacctgggcaatgtagggagacttcgtctctataaaaaattaaaaaataagttggtcatggtggcttgtacctgtaatcccagctactcacgaggtcaaggtgggaggattgcttgagccaggaagattgaggctgcaataagctgtgattttgccactgtactccagcctgggcaacagagcaagatcctatctaaaaataaaaataaaaataattaataaaaagctaacttcagagctgttaacccttcatttcacttaaccttagagtaaatatgtatggctttatataaatagcttatcagttgtcatttgtctgaaacatctgacttgatataaattctatgtgaaaagtacaaagtttagaatatatacactttagcatataacatgaaattctaaatcactcatgaaatttaagataaaaagtaaagcaacagcttttatttttgtagccaaaatcctatgggtatttaccaagacttgtgcctttaattacaaggtagggaagtaagggtaagatagcaaacaaagggaatgtaacctcataaggtgaagttattttggcaatttgggctctgaaatatgaagaattggccaggtgcagtggcttacgcctgtaatcccaacacttcgggaggccgaggcgggtggatcacttgagcccaggatatctggatcaacctgggcaacatggcaaaaccctgtctttataaaaaaaaatacaagaagttagccaggtgtggtggtgtgtgcctgtggtcccagctacttgggaggtgggaggattgcttgagcccaggaagtcgaggctgtggtgagccatgatctcccctccagcctaggccatggccatacagtgagatcctctctcaaaaaaagaaatatgaagaatagaggtttgacagtcacatcatttgagatctccttatccaaatgcatggtcagagtttgagtcacttgtggaatctttgagtaactgaaataaaatccagttgatcagaattctttggtaatttttagtatgtatcagtgagttttctcggaagacatcctgttcaaaaaaaaagtgttgaggctggatgtggtggataatgcctataattccaacactttgggaagctgaggtgggtgaatcacttgagcccaggagttcaagaccagcctgagcaacatagggaaagcctgtctctacaaaaaaatacaaaatattagccaggcctggtggcttgcgcctgtagtcccagctacttgggaagctgaggtgggaggatcaattgagcccagggggttgaggcttcagtgagctatgaccacgccactacactacaggctgaatgacacggcaagacctgtctccaaaaaaaaaaaaggaagttgaacatttagtttctcttcactcccaatatttaatttctgattctcaaaatgttaatttttataacaactgtgtcaagtaccttcaatgtaagaggttaaataagcagctgtgtgaccttactccagttttcattatttaaaaactggttgattaaggtaaccataaatttccatcaaatttgcacacttttgaaagggaaaaaggtgcttttaatacctgtcctggggacaagagcaaaatgggacttttcgaggcaagctgtttcatattggttgttatggttaaatgtgacaataattgtaaagtattgaagcagtgtttttagtacggaaagttattattctccaaaaatgtcttaggcctggttcaataaattatatatcatctgcttctcttatagagctcttgtcaggcaggattatgtagtcaatgtgatgagtctaaagaataccttaactctttttctttcttcctttcttctttttttttctttctctttttgttttttatttttatttttaaagaattaccttaactgtcttaatttaactaaccaaacatttatttcctgcttacttatttttcatgcactgaaaatatatgtataaataaggtaaagtctttgcctttgagtagtcattgtctaaatatgcagtatgtaataaaacagtgtaatgcaattgttttcaaccagggtgtacatcagaatcactggggagatttttaaaaaatactgatgccctacccccacttcagttcaatcataatctctgaatattgtcccaggcatcagtatttttatcaagttctccacttgattttaatctacagcaagggttatgaacttttggtttcctggagaaacagacaagcaaagaatggaaaacagtcatagcaggtatgtggaggatgcagtggaatcaaagaagagaaaatttcttattacagggtaggagaagaaagtttatggaggaggtagatgcctgaggagaatctcaaagaatatataatagtttgcctgaaatataggtaggaaagataattctaagacaagaagaaatagtctataaattcattttgggatctggcattaaatgaaacttaatgatagacaaaactcagttatgaaatgctttatatgtccttctaagagttggaatgcacacatgatatttattgccttagttgacactttcctaaacattttgttaattgatcacctctcagccttttggctaagatcgagcgtaaacattttgttaattgattgtgtaatatctttccttgacctgttataaaaggaatcacttatttaaataaagagaatacaattataattttaagcaactttatttacttactattgtacaataggagactatcagccaaactatgttttatatctaaataaaatttttaaaatgtttttcatggctgggcatggtggcttacacctgtaaccccagcactttgggaggccaaggtggacagattacctgaggtcaggagttcgagaccagcctgcccaacatggtgaaaccctgtctgtactaaaaatacaaaaattagctgagtgtggttggtggcgcacacctgtaaccccagctacttgggaggctgagacaggagaattgcttgaagccaggaggtagaggctgcagtgagcttagatggtgccactgtactccatcccggggaacagagtgacactcagtctcatataaataaataaataaaatattttcttatatctatcatgtagtacatcatttaaagagaggaaagatattcatttacaagtaatttggtagattctgctagacaaaacaaattcatgtgaaggatttgtttattcattcattcatccatccaaaaaatatttgaggttgaacaaaacatagtctatttccctaccattttatagttgaatgttcaactgtattctttttcataattatctgtatcttcttctccagctattcttatattccaaagtgttccgatttggagttatatctcttttagaacaatggcttcaagcactgcaactgcggaccctgtcatttcatgacacaatttttattgcatagaaaagaaatagcccagccggtcacagtggctcacagctgtaatcccaacactgtgggaggctgaggcaggtggattgcttgagctcagaagttggaaaccagccttggcaacatgacaaaaccttgtctacaaaaaatacaaaacttagcctagctgggcatggtgatgcacgcttgtagtcccagttactcaggaggctgaagtggggaggacaacttgaggtggaggttgcagtgagctgagattgtgccaccaaagtccagcctgggcgacaaacaaaacaaaacaaaaaacagagaagcattcaagttcaaccgtaatcaattaactaatccaaaacccaaaaacagcttaaatgaccataagtgggaaaaccaataaattgtataatgatgcagcagaatattacatgattgtgaaagtgaatgaccgataactacatataatataatgaatgaatcttaatgttaagtgtaaaaagcagttcaaaagagactgctgtaacattttagcaaagctcagaaagaagcaaaactagataatttttttttttttttttgagacagagtcttgctctgtcaccaaggctagagtgcagtggcgtaatttcagctcactgcaacctccacctccggggttctaagcgattctcctgcctcagcttccagagcagctgggattacaggcatgtgccaccacacccggctaattttgtatttttaatagagatagggtttcaccatgttggccaggccggtctcgaactcctgacctcaggtgatcctcccaccttggcctcccaaagtgctgggattacaggcatgagccaccacccccgggccaaactagataatattttgcttgaagatatgtggtaaaacgatttgaaaaaataggtatttatggccaggcccggtggctgatacctgtaatcctagctctttgggaggccaaggtaggtggatcacttgagcccaggagttcaagaccagtctgggcaacctggtgaaacctggtatctacaaacaaaacaaaacaaacaaacaaaaaatcccaggtatttatgaagccaaaattcatgcttgcaaattgcctccagggaggaatgcagagtgataggttgagaaacagcacaacagtagatttgacaattcttgtaatattatagttcttttgttgggaagtgatttcatagatatgaattttatagtttcatatatactgtacatgtattttgctatgtatcaaatcctatataataaaaaattttaagacagaaacatcaagcaactagtctgttgcttaactgtattgaatattgttaagaaatgacctggccagatgcagtggctcacgcctgtaatcccagcactttgggagactgaggcgggaggatcacgaggtcaggagatagagaccatcctggctaacacggtgaaaccccgtctctactaaaaatacaaaaaattagtcgggcatggtggcgggcgcctgtagtcccagctactcgggaggccgaggcaggagaatggcgtgaacctgggaggcggaggttgcagagagctgagatcacgccactgcattccagcctgggcaacagagcgagactccatctcaaaaaaaaaaaaaagaaaaaaaaaagaaatgacggttgtttttgaagacctctagtatccatgaaaaaagtggtttcagtgtagtggtgagtttagagaaaaatcagaggtgaggaagtggagacagtgaatataaacattgataagtttttcagtaatagtagatcatagggttttgttttgttgtaaggtagaaatacggaacatttttgtatgttgtcaggaatgattcagaaagttatttaatagctttgtttcctcaagtaaaccatcttctatcaagtctacacaattgctcctacctaaaactaggaaccgtctctgattcctctctttcttcttgctgtttctcacattcaatccatcatcaagttacagttgtcaattcttttaaaattttttttttttttttttttttttttttgagacagagtcttgctctgtcacccaggctggagtgcaatggcgccatctcggttcactgcaacctcggcctcccgggttcaggcagttctcctgcctcagcctcctgagtagctgggattacaaacgcgtaccaccatgcccggctaatttttgtatgtatgtatgtacttatttatttatttatttttgagttggagtttcactcttgttgcccaggctggagtgcaatggtgcgatcttgactcaccccaaactctgcctcccgggttcaagcgattctcctgtctcagcctcccaagtagttgggattatcggtgtgtgccaccacacacagctaattttcttttgtatttctagtagagacagggtttcaccatgttggccaggctggtcttgaactcttgacctcaggtgatccacccgcctcggcctctgaaagtgctgggattacaggtgtgagccactgcacctgacctcactttttattcttaagagacgaagtctccctgtgttgcccagcctggtctccaactcctgggctcaagcagtttcgacaaagtgttgggattataggcatgagccactgcacccagctcctatcacttttgaaataaaatctactctcttacctagcctacaaaagcctttgcacttgatattccctctacctggtacacatttcctctgcctctaaatataggctccctttagaatcagatctgtgctcaactgtcaccaccctcagacaggcttccttaatcaatcagtactctaatcgggtccttcatcatactattctgttgtcctgttttagtttcttcataagattcataacaatctgaaattgtaatatttatctgctttcttatgtggttatcaacagtcttgctctgttactcgggctggagtgcaatggcatgatcttggctcactgcaacctccacttcctgggttcaagcgattctcatgcctccatccccaagtagctgggatcacaggctggagccaccatacctggctaatttttgcatttttagtagagacagggattcactatgttacccaggctggtcttgaactcctggcctcaagtgaaccacccacctcagcctcccaaagggatgggattacagacatgagctaccttgcccagccacattcttgtcattttttaaagcaatgtatcctcaacccctaaaataggggttggcactcataaatatttgttcaatgaatgaatgaatgagaaaagaaaattacctaggatgtatatcctgtgtggtcatggagataattacatacataaacatatgaaaatgaaaaccatttctttgaataataagtgtacttttccccagaaatcaaaactacacaattttagcataatttgttgttcagaatttgaatgtaaatttgtggatattatatatgtagttaatttataaaagggtagaattatgaaaatataaatccttttattattaatacagcttttagtgcctcttatatggtcagttaataaagtttactttgagaatttgacaactttaaaaaatttatgtatattcaacatttgaaatgtcaaatataaattattttttaaatgccaaaaatattcagtattatactaaacaacgatacttttatcttttcctaggatattattgctggattcctatataccattttaatcttagctgtcttctatccatttgtggacctgattgacaacttcaaccaaactcacaaatatgctccattcatcatcatcgggcttcatttagctttggggatcttttctttcactcttgacacctggagcacatcccgaggagacacagccgagatactaggaagtggtgctggaattgcatgtggatctcatgttacttataacatgggtctagtattagatccttctctagatacattacctttagctgggccccccattactgtgactctgtttggaaaagccatattgcggatcctcatagggatggtatttgtactaataatcagagatgtaatgaaaaagatcaccattcctttagcctgcaaaatcttcaatataccgtgtgatgatattcgaaaagcaagacagcacatggaagttgaacttccttatcggtatattacctatggaatggttggtttctccatcacattttttgttccttacatatttttctttattggtatctcttgatggagaagtattgtttatgataagaaaggagggtatcagttactgatacccaaaaatatattccaggtaaagccaggtcagaattaggcttttgcaggaatttaacttaaataattatttaagtaaattcataagagtcagtgcattttatcattgcacatccagatactgttttaggtgagctgagctatttcgttactgagaaaatgataagtatccatttagaatgttcatgtaatgtttggagagttttgtattatggattcaacttatatataatatatataaggtacataatatgcaattatatatctgatatatattatatataaaataatatacctaagtgtttttttaaactatgggagtgtattataaaatcaataataatatgcaaacagttgtgcctgtgtatttgaactacatacaggtatgttgttattaacagatatatttaacatttatttactatgggagccatttcctaattgaattgcgtaattactagaccagaatgcatatgctactatacattgatttactgcctgtttttacactgccattacctttcatgttatccatgatgttgaacatgggaggcatttttaatggaccaaatttttagaaaaattagtttttggatttttttttaagttctgtatactgttttgaatgaactttatttgcagctattctggatgtcagtttaataattcaggtactgaattttattgcttgctaattgtgcctttccgttgctaaattaagaaatgctatgtgtactgtgatgtaaaaataagacattaactttatcttaagttacatataatcaagcaaatattttaaaaaatgtatgtcagggtgacaggcataaaagtaaattacccttaactctttagcctttatttagaaagaaatgtggaatgggctaaactttctcaccaatttattagaaagctaaatggataaatacttccctttttgtagatatttttctgtgcattgtaagttataggagcaggacatattttttgtacattgtcttgattgtttatactgcaggtaggtatttccagtgaatggaaacgttgaaatttatagatgggacaatgcacatacttcatatgtaaacaaagcatttttctaaataatttggaaaggattggatttagcaccgttaacttttaatacccatttattggctatttaaggtaaattataaaacctaaaattagtatcagtattttagatcctattattttttcaactttctattattttcacagtggaaaatttgcgtatagtattaaactattcttttttctgtctacctttatattttgaagtgtggttgtacttacgttaatagtaagtgtatttgtagaaagtttttcataaagaagagattaactttccatataaataaataccaggtatgaaattactgattttagtgcaatatctgtatgattatccagaactatcacttcagatgtttctattttgggcaccataactatttgagctcatatttttataattctgattgagaatttaggggcatggtaatttttaccaaaactgaagctggtaattttaagtaaagcaactaaatttaccctttacttattagttaaaaggaaaccaaggcatgtaggaaaatattggtacgttggaaaatgtgaaaagagctttactttcaaaatgtatgtttaatgaattgaattttagggaccgtttcccataatttgggcctatgctatcctgttgatttttatgtctagcttaaaaggtatttgaaaatgttccatttgtgttttattattttctgtcctatgacagttctatgctaaatgtattttaaaataaaagccaaattgaagattaaa

SEQ ID NO: 341 - DNA, 43850 bp, Homo sapiens
  source 1..43850: mol_type = genomic DNA; note = NW_018654721.1:c64017-20168 SGPP1 [organism=Homo sapiens] [GeneID=81537] [chromosome=14]
gtcacccggcagactccggagggtagagcgctgtgccggttccgctgccgctggccaggagcgcggggacagttcggggctgcgccggaggccggcccgccttcccgggggttccgttatcatgtcgctgaggcagcgcctggcccagctggttggccgtctgcaggacccgcagaaagtggcccgtttccagcggctgtgcggggtggaagcgccgccgcgccgctcagcagaccggagggaggatgagaaagcggaggcgcctctcgccggagaccctcgactgcgagggcggcagccaggggcgcctggaggcccccagcctcccgggagcgaccgcaatcagtgcccggccaagccggacggcggcggcgcccccaacggcgtgcggaacgggctggcggccgagctgggcccggcctcgccgcggcgcgcgggcgctctgcgccgcaactcgctgacgggcgaggagggccagctggcccgcgtgagcaactggccgctctactgcctgttctgcttcggcacggagctgggcaacgaactcttctacatcctgttcttccccttctggatctggaacctggaccctctggtgggccggaggctcgtggtcatctgggtgctggtcatgtacctgggccagtgcaccaaggacatcatccgctggccgaggcccgcctcgccgcccgtggtcaagttggaggtcttctacaactctgagtacagcatgccctccacccatgccatgtccggcaccgccatccccatttctatggtcctcctcacctatggccgctggcaggtagggttccttctcgtcctgttcagcctgggggagttcaaagaactcggagttctctttgctctctgcatttattttaattcgaccgttcccctccaaagcctctctttccacaggttttcacaatactcgcaaacaggccctttctgggttttgaaaaattaagtgattgggggaaactggatacttagccgttgaattctattttaatattaaattccaatttaatgccttagaacccaaaggacacacttttcctagagtaatacattgtcattgggctttggttgagttttttaaacggctttaattcttgtaatgcacagtggaagtgaattttttaaataatcgctatgtaaactaagacccagtttcaccgtaatatatggtgccttcttccctaaaactgtttcagaaagaggtaaagtcattagctttaccgtgagacagtgtttacaaaacgttagtgtaattccaaaacaaacatgctagttccaagcaatgaagtaatcgattttcatcgaagttccctttatggaagttaatggagcacagggtgagttctgtttttaaggggtgtggttgctactttgctgataaagtttgattatcttctggatcactaatctgtagtatctaacagttgttgagctacaactgtaatactatagtgttattgcctcattaactctaaaaatgcatggtttaaaagttattcttaaagatagggctcttgatcaaactagtgggtttataaaaatggcaaatatgacagcagggtcagcctgacaatcaggaaaattttttttttttttaaccctctctgaaaactgccaagggaagagtttttaatggtaatcgtttttattttgcttacttcttttggccttccaatgtttatctgtctttgaactgtaagatttgttaatcctgcagaccagtcccttattttaagaataaagtgcgtaattgtggagattctaaggaaacaaacttcctctattttttccccctttacttcacaaaatcattttacattgagaaatacacattctgtgtaaaactccattatgataagcttacttatcccacattaaatttcagtgtagataaaatttcgtccccatggatacttctgtgtagtgcatctctcttacagtacatggaaaatacgcattgtgcatagtaagaatggcagaattaggaggaaagagtaccatgggaagtttttttctgtttaaccaaaggagctatacggtgatgttcagattgtgaagcagtgctacctgttttgcgtaacagataaatatctcgaagttttcatttaatctaaatatttcagaatttaagattttcaatgagctgtgtttggcctggtgatgttagctgatgatgtttctcttattttcgtgagacttttaggattctgtaacaatagagccttttatgatgccttctcagtgagtagctattttgtatgctattagtattagcagtcaaagtaagagaaaatagctatttttgctctttatttgttctggacacatactaactggaagtctgaaaacagtactgctgaatcgtttatgggatattgatattctaacatttcagggttatttgaattatcagaataagcttagatttagtttttaaacaacctagtatatttaactcaaagtttaagaaatttgcgtatcatagaattttagactttgaagtagaccggatgttagaaatcacttagtttcaaactgtcattttacagatgtgcaaactgaccagttacattaaaattaatcttgtaatgctttaaatttcttattttacattttttcactctaaatttgcatgatttttcggttagttgttctgaaagaaagcctcctgacggagtctcgctctgttgcccaggctggagtgcagtggtgcagtctcggctcactgcaacctctgcctcccaggttcaagcaattctctgcctcagcctcccgagtagctgggattacaggcgcctaccaccacaccagctaattttttaaggatttttagtagagatgtggtttcactgttttggccaagctggtcttgaactcctgacctcaggggatccacccatctcggcctcccaaagtgctgggattacaggcgtgagccactgcgcctggcctaagcctcctttatatgaaagttctgtgtttataaatgtttgactaataatccagtacaaaaaacaagatggctttttaacctttttccttttttttttccctaagagtcggggtctcactatattgcctaggctggtctcgaactcctgggctcaagttatcctccctccttggcctcccaagtgccagcttttccttttttttttttaagacggagtctcgctctgttgcccaggctggagtgctgtggcgcaatctcggctctctgcaatctcctgatctcaatcaggagattgagaccatcctggctaacacagtgaaaccccgtctctactaaaaaatacaaaaaattagccgccccccgctcatcggcctccccaccactggcctcccagagtgctggcattacaggcgtgagccaccgcgcctggcctccttttccttttcctttttttttttttttttttttttttaaagatccttgttatctattgaaaacaaaagtaccttcctttgcttcagctgtttgggtcctctactctgtgaattagtattgtactgcattggaggcttatatagaaagcctttcccctagaaactgggggaagaattaaataatgaaagcctggtgtttttctaataagttttggttggcagtcttgcctatctgctgtgcctcagctgcttatttgggacaggtatggttacttatatatgcctggcgtgctgaaacatctcttgaaactgagttctataccattcctttgtcttggctttactacttcactactacctactacttaatgtttctgccctcattgaaatttgctcaagattcaccacccagagcattttaaattaatcctttctgtttcattattcctcacttacacttaaaatgacagtatatggccaggtgtagtggttcatccctgtacacctagcactttgggaggctgaggcggaaggatcccttgagcccaggagttggagaccagcctgggcaatatagcgagaccctgtctctgcaaaaaaaaatcaaaaatcagctgggcatggtggcgcatgcctgtagttctagctactagggaggctgaggtgggagcatcacttgagcctgggaggttgaggctgcagtgaggtgtgattgcaccactgcacttcagcctagatgacagggcaagaccctatctcaaaaaaaaaagacagcgtacaaactcggggttgtttaaaaatgcagatttctacatttcccagggtaagtttcccagagattctgacccattagatgagtgaggagttagttgtatttcttcaagattgctgtctcagcttctttgaaattccagtctttgaattttttttttttttgagacgaaatctctctttgtcacccaggctggagtgtggtggtgtgatcttgtctcactgcaaactctgcctccccggttcaagcgattctcctgcctcagcctcctcagtagctgggactacaggcgcacaccaccacccccggctaatgtttgtatttttagtagagacggggtttcaccatgttggccaggatggtctcgatctcttgacctcgtgatccactcccctcagcctcccaaagtgctgggattacagacgtgagtcactgcaccctgcctgaatttttttaaggtacgttataagacaaaggagagattggaatagtatagctccaagtaattacttaaagagttttgtatataaattttatggtgatggaggatagaaaatgttatgaccttttcccaaggattaaataacttgagatccattgcctaggataatggttattgctctcatattattcattggaattttttgtagcctgaattggaaaaaaaattaagaaataaggagcatctgatataaagacaataaatagtcctttgaagaataagataaacaatatgacgttccttttccatttatgtttgcatgttcttttcaaaaataaaatttcttaatttttaaagctctgtttgacttgaattaatttaatttttaaataatatggaatgtaatcagttttaactgtatactttatttaattagaaggttttagattaattttttttttttttttttgagacagggtcttactctgtcgctcagactggagtacagtggcacgattccggctcactgcagcctcgacctcccaggcttaagtgatcctcccacctcagcctcccaagtagctgggaccacaggcacacactaccaccagctaattttgtttgtttgtttgtttgttatagagacggggttttgccatgttgcttaggctggtcttgaactcctgagctcaagtgatcctcccacctcggcctcccaaagtgctggtattacaggcgtcagccaccttgccctgctaaaaattagctgtagcacttactttatagacaactcattgccaactagtctttcattttgtgtgcttttactactttttattataataattatattttataataataatgttatagcattgttaatatttttattttttattttttattttttgagatggagtctcactctgttgcccaggctggagtgcagtggtgcgatattggctcactgcaacctctgcctcctgggttcaagtagttctcctacttcagcctcctgagtagctgggattacaggcacgccccaccacgcccggctaattttttttttttttttttttcaatagagacagggtttcaccatgttggtcaggctagcctctaactcctgaccttgtgatctgcccaccttggactcctaaagtgttgggattacaggcatgagccactgcgcccagctgttaatatatatttttaagcacttactatgaatcagacattgtttgaaatgtcttttatctcatttactcttctataataccccaatgttcctattactagcatgggtttacagatgaggaaactgaggtacagggaggttatattatgtaacttaagcaaagtaacctagccagtaagtgtcaggggctcagactgactcagcagcttatatagaaaattcattttaaatcacactttgtgtgtgatttttaaggtatgcttgcagtaatattatttttgaaatatatgattgtattcttaaaatatgagaatagcttttatataccttgagaagataatttgtgtttgtgtatgtacatacatatgcaacatccacaaatatttgtgttttaaacatgtatgaagatgttgactgaaatcaaatgctgatttgtcacctaatataaataaaaaatttgataaacatagtaagagctttggaaaagaaagacacataagaatattctgtcaaaatgttgtttactgtaaataatagaagaagatatctgtgaggtcatgaaaagataaatggaagaaaggcaaaaagtaagagttacaaaagtaggtcacagtaaagaccagaggaggctgcaagatccaagaaaaattgatcactatggtaattctggaaagaaacacagtttattaaaaaattgaattggcttgcctcttttttatggagcacgatacttgtgtttgaaattcacgttttcctgagtttataagtccttattactaattccttttttttttttctggatacgaagtcttgttcttgtcaccaggctggagtgcagtggcatgatcgtggctcactacaacctccgcctcctgtgttcaagtgattcttctacctcagcctcctgggtagctgggatgacaggtgtgtgccaccacacccggctaattttgtattttttttgagatggcgtcttgctctgttgcccagcctggagtgcagtggcacgatcttggctcacccaccaccatgcctgtctctactaaaaatacagaaattaggctgggtgctgtggctcacgcctgtaatcccagcacttttgaaggccgagacgaacggatcgcctgaggtcaggagttcaagaccagcctgaccaatatggtgaaaccccgtgtctattaaaaatacaaaaattagctgggtgtggtggcaggtgcctgtagtcccaactacttgggaggctgagacaggagaattgctttaacctgggaggcagaggttgcttgaaccctgctgacagaacaagactctgtctcaaaaaaagaaacatgaaaagaagagtacatttctttctctgtcccacagcttctagggtctttttttctgaaggattcagtgttagacatctcttgtttagcttcccagaggtagtctctacttttgcagacatacatttatatagttgtttgtttgttttgagacggagttttgctcttgttgcccaggctggagtgcagtgcaatggtgcgaccttggctcaccgcaacctccggctcccaggttcaagtgattctcctgcctcagcctcctaactagctgggattacaggcgtccaccatcacgcccggctaatttttttaatttttagtagaaatggggtttcagcatgttggccaggctggtcttgaactcttgacctcaggtgatccacccgcctcgacctcccaaagtgctgggattacaggcatgagccaccgcacccggcctatatagtttattattcatacacaaggtaatatactgtactgttctggatcttgcttttatcacttagtaatatattgcaaagaccttccttcccctccctccgtctctttcttccttccttccatccatccatccttcttttcctttttctctttccttcccatccttccttcctttttttctatttcttctttttttcttaccatttttgtttttacataggtttcaccatgttgccaaggttggtctcaatctcctgggctcaaatgatcctcctgcctcagcttaccaaagtgctgggattacaggcatgagccaccatgcccagcatgtttttttttttttttttgtgagatgcaggctccctctgtcgcccggctggagtgcagtggtgccatctttgctcactgcaacctccccctcctgggttcaagcaattctcctgccccagcctcccgagtagctgggattaccggcacctaccaccatgtccagctaattttttttttttttttgtattttcagtagagatggggtttcaccgtattggacaggctggtctcgaattcttgacctttggtgatccgcccgcctctgcctcccaaagttctgggattacaggcatgagccaccgtgcctggccttctttttttttttaagtccaacaattaatgaatactaattatgtgtctatgatttttaaaaatgccttacataaattaattctatatatatatagagagagagagggagagaggcaaacagaaggagagagaaaatgctatctaatttttttcacatttgcatgctgttccaatatattaatatgacataatttaataagttgactatttctatacatttatttatttattttcccagcgctcccctcaagaaatattccaatacctttagttttccaattgtttgctagtgtaatgacacagtgactgtttactggaacacattactatgtcaaagaatataggcatttaaattttaacagataacgtaaaattgcctgtcataaagattgtactaatttacattcatcctggaaatgtatgagagtatctggtttcctatgctttcagtgttgcagtatgttatcaaatttattgatattcctcaaaataatttttcttaaattaaaaaaaaataatttttatgtggccaggcgtggtggctcacacctgtaatcatagcactttgggaggctgaggtgggcggatcagccgaggtcagacatggagaagccctgtctctactaaaaatacaaaaattagccgggtgtggtgacaagcacctgtaatcccagctactcgggagctgaggcaggagaatcgcttgaacctgggaggcatacgttgcagtgagccaagatcatgccactgcactccagcttggatgacaggagctaaactccatgtcaaaaaaaaaaaaaaaaaaaaaaaaaaaaaatatatatatatatatatatatatatatatatatatatgtatatacatatatatgaatttttactatcctaattttacagatgacaaagtaattttaacattgtatttaatttgaattagtcttatcagtaaagttgaagaactttccataggtttattgaccacttatgtttccttttctgtgagctgtctattcaaagcatttcttttattttttttcacttagattattggtattttacttactgatctttacagatttttaatttttttattgctatgggtacctagtaggcatatatttatagggcacatgttgatttttaaaaactgtatctttttttagtggttgcttcaccttaaaataatattacattagttcaagtatagcatcagaaccttgcaacagtatatttccacttatccctgccctctctttgtcatgcatttatatccatatatgtcctaaggctcacaattcatcgttattatttttgtataatgttccaatgtatgatatagaatgtcccaatatggttttggaactggtataatttttctcctacctaaagagcctcttttcacattttttctactatagatctgctggtgataacatttccttagctcttttatttgaaaaatatattgaattaattttggaaaaatattttcatgaggtacagaatccaaaaataaagatacagaattcagaattctaggttgatagttttgttttttctcttggcacttcttttttttttttttgagatggagtcttgcgctgttccccaggatggcatacagtggcccaatcttggctcactgcaacctccacctcctgggttcaagcagttctcctgcctcagcctcccaagtagctgggactgcaggcgagcaccaacatgcctggctaatttttttgtaattttagtagagatagggtttcactgtgttggccaggcaggtctcaaactcctaacctcaagtaatctgcctgcctcagcctcctaaagtgttgggattacagttgtaaaccactgtgcccggctacttttggcacttttagtactatgttgtaccattgccttctggcttgcatagtttttgacaaaatatctgctgaaattcttatttgtgatccccagtacttaatatgtattttttattctggctggttttaaaattttctctttttctctagtgttgagcaatttaaaaatgatgtgccttaacatgctttttctttgtatttcttctgctttgaggtcattgagcttgaatccatgggtttgtagttttcgttatatttggaagatcttcagcattatttttagaatttttttcctctcccttccccacttccattcggttctttggaaattccaatttcagtacgggtgtggtggctcatgcctgtaatcccagcactttgggaggccgaggctggcggatcacgaggtcaggagattgagaccattctggctaacatggtgaaaccccagctctactaaaaatgcaaaaaaattagccgggcatgatggtgggtgcctgtagtcccagctactcgggaggttgaggcaggagaatggcgtgaacctgggtggtggagcttgcagtgagccgataacggatatcatgccacagcactccagcgtgagcgacagagtgagactccgtctcaaaaaaaaaaaaaaagagaaattccaatttcatgtgttttaaactgttcattcacaggtccctgaagctctattcttttttttttttttaagcatttttgctttccctgcttccttttttacagtttctgttgctatggctttaagttcacttacctgttcttttgcaatctctaattttctggtaattttatcaagtaggatagggtataatttcagattctgtgtagtttatatctagaaattgcatttgggtcttttaaaaaatcttcaatttctcagctcattatatttctgtattcttgagtaagttcagaagatttttaaaaattacagttgggtcctgggcacggtggttcatgcctgtaatcccagcactttgggaggccaaggcaggtggatcagctgaggtcaggagtttgagaccagcctggccaacatgcagaaacctcctctctactaaaaatacaaaaattagctggcatgttggtgggcgcctgtaatcccagctacttgggaggctgaggcaggagaattgcttgaacccaggaggcagaggttgctgtaagctgagattgtgccactgcactccagcctgggtgacagcgtgagactctatctcaaaaaaaaaaaaagtattattgggtacagagactcactgtcacccaggctggggtgcaattgtgagatcttaaacccaagagcctcgaactcttgggtttaagggaacctcctgcctcagcatccagagtagctaggactgcaggtgtgtgccaccatgcctggctaattttttaaattttttaattttatatttttaatttttttgtttgtttttttgagactgagtcttgctctgttgcccaggctagagtgcagaggtgtgatattggctcactgcaacctccaccccccggattcaagcgattctcctgcctcagcctcccaagtacctgggattacaggcgctcgccaccacacccaggtaatttttgtatttttagtagagatggggtttcaccatgttggccaggctggtcttgaactcctgggctcatactatcctctcacccccgtttcccaaagtgctgggattacagtaccttgcccagccaatttataagatgttttatagcaatcttaaggtatttatcttctaattccatcatctttgtcatctttgtgtgtttctattatttctcctgattatagatcatattttcctaattccttgcttggtaatttttacagttttggattttgttgtatttctttacatagtcttggagtttgttctggtgtgcagttaaattacttgtcagtttaaatccttctaggtttgataggatggtccagaataatcgtaggttaaggctaatttagcttcactacttacatgataaccttctaaccattctacccaattccctcttcactgcttgatgggaaagcaattgcaagcttatatgagctttgggaattgtttggcctgctcctctccacagtggttttttctacagtctggtggatttctccccatgcatgcacagattagtactcagccagcaacttcatgagttccctctacatatctccagggctcagtctctgagatttgtctctccaatactctgtcctgcaaattacagcctctttggcttctgaggatactagtctttctccccttaactcagggaaactgctggactcagttttgattcttcctcctgtgctacagcctggaaactgcctctagcagcaggataatgcaatcacagggctcatttgtttcccttttctcatggatctgagtttcacaagagtgaaactccggctcaaaaaaaagggggttttattcgaacaacatacaaacacacaacagaatgcttcataagtcactttaaacaataaaatagacaataataacatacatatttttataagcatactcaggtatactaatgacagttgcacaggtacaacagttatgagcagatgaactgtattcataaggtcattggctgggtgcggtggattatgcctgtaatcccagcactttgggaagctgaggtgggtggatcacctgaggtcaggagttcgagaccagcctggccaacgtggtgaaaccctgtctctactaaaaatacaaacaattagctgggcgtggtggcaggcgcctgtaatcccaactacttggtaggctgaggcggagaatcacttgaactcgggaggcagcggttgcagtgagccaaaatcacagcatgagcaacaagagcaacactccatctcaaaaaaaaaaaaaaaaaaggtcggctgggagcagtggctcatgcctgtaatcccagcactttaggaggctgaggcaggaggatctcttcagctcaggataccagcctgggcaccatggtgaaattccatcactataaaaaatatagaaagttagccaggcgtggtggtgtgtgcctgtggtcccagctactctggaggctaaggtggggaaaaatcacctgaggctgcagtgagctgtaaccacatcactatactccagcttgggcaactcagtgagaccctgtctcaaaaaaaaaaaaataaataaaaatagaaggaggtcaaggctgggcatggtggcacatgcctgtaatcccagcactttggaaagccaaagcaggaggatcacttgaggccaggagttcgagaccagcctgggcaacaaatcaagaccctttctctacacaaaatttaaacattagccaggtgtggtggtatgtacttgtagtcccagatacttgggaagctgaggtgggaggatcacttgagcccaggagttggaggctgcagcgaactataatcatgccactgtgtcttagcctgggagatagaacgagactccattagtaaaaaatgaaaattaaaaaaaataaagagttaaaaaagtgaagtacaaacatttatcactatggctggtaattgtgtgcactccactttattaactgtggtcatctgaaataccatgatagacaatctgagccttttgatgagatccatcaaaaaccacatgggccagctaccacatgtgcagtcacccaaagagtcaagatctcaagaaattttatctttcacaaatgcagatgtacatcacttcgtttattaagtttctacatttttaccttgtgaaccagggaagttgatggtgtaactcccagtccaaggctgaaagcctcaggatctgggtggttgctggtgtaagtatgtgctggaatcccaaggctggtgagcctggagttctaacatccaaggcagcagaagaaaagtctgtcccatctcccaaagaatccagttaaccttctggatatgttctgtctgggcctcctgcagattagatggtgcatgccaacattgagggcagatctttcccatctagtccactctgactcatacactaatctcctctggaaacatgctcacagacacacccaaaatgatgctttaccagatttctaggtatttcttaatccagtcaagctgacacctaaaattaagtccacaaattcaaaccttgtcaacttcacacccatatgtatgaactgtatataatttccatgtaaagacaatagcaagaaaatacttcacctaacatgatatggctatcccacatacaaccaaaaatgtgctaaatttcttccctagattttggctttcaaattccaggattttaatattttgggtttttaattttcaggattttagatattagagattttagactttagagattttgatcttttgggatttcaacattcaggattgtatcttttgggattatgactgacaccagttctgacatagaccgtttaggccacagagcctaaatagttgctatcaggctctttacaaaaagctttgccagtccctgacttagtgtcaatggcagtagagagaaatgggtgaatttgatagatattaagaggtagaattgacaaaacatggtgactaattggatatatcagtaagaaggaaaaaaagtattgttctgaggtttcctgcttggcaagctgagaagtagtagtttggtttatagaaatagcaaataatgaaagtgggtcagatttggggaaagtggcaacggcatggagatgacttcagttttaggtatttcgagtttgaagtgtctataagtcatctggagctgtccaggagatggttctatacatgaagatcaggaccagtttcttgtcatcagcatataggtgcaaaatgagtacacacagaagaagagagggtctgctgggcacagtggtgcaggtctgtaatcccagaactttgggaggctgagaatggtggattgcttgagcccaggagctcgaaaccagcttgggcaacatggtgaaatgccattttttttttttttttttttttgagacagagttttgctcttgttgcccaggctggagtacaatggcacgatctcggctcactgcaacctccacctcacagactcaagcaattctcctgcctcagcctcccaagtagctgggattatagtcccagctactcaggaggatcacttgagtccaggtggttgaggctgcagtgaactgtaacggtgccattgtactccagcctgggcaacagagcaagaccctccctcaaaaaaacaaacaaaaaataagtaaaaaatacaaaaaaattaaaaatgttctgttttcatacgcacatgtctgcctcactcatagttttatttttataaattcaagcacacagtagagactctctttctgactttatttgcagctacttttagaaaaaagaatctgactggctcagcacagccaatggttttgcttccctagtgccaagtgttcattcctgatccaagtagctgtggtcaagggagcaggatcacaggggatgagcatgtctccagggccacactgctgggtccaagtgggggaagttttcagaagagaggggtgtagattggacagtatcataaaatgaatgtagtacagagggaagccagaagtgaaagtaagagagagggtgtttctagaaaagaaaagtagttaacattgttattctgctaagagaacaagcaagataagtactgaaatttatagaagacttagaaaataaattaaaaaaagaaaaagctaatgttaattttttatttccttacaatttgaaaatagttgggaccatattatatgtggagtttattctttttatttaatattatatgtgattattaattttatgtatcagtttatttgagtaaaggtactcagattttttttttttttttttgagatggagtcttgctctgttgcccaggctggagtgcagtggtgcgatcttggctcgctgcaacctccgcctcccaggttcaagcgattctcctgcctcagcctccccagtagctgggattacaggtgcctaccaccacgcctagctaagttttatatttttagtagagatgtggttttgccatgttggccaggctggtctggaactcctgacctcaagtgatctgcccaccttggccttcctgggattacaggccttgaccaccatggccagcaaaagtactcagcttttgatcaaaaatgatcaaaacatctagatgtttttctgaaagtagtttttagacaagtttaacatttaaatcagtggactttgagtaaagcagattatcctccataatgtgagtaggtcttatccaattaaatgaaggccttaagagaagactgacctcccccaaagaagagtgaattctgccaacagaatggtttcagacttgagctacacattaactcttccctgggtcttcagcctgtcggcctgccctgcagattttggacttgccagcccctacaactgcatgaccaatccttaaaataaacttttctttgtatatgtagatatacatatcctattggttctgtttctctggagaaccctgagtaatacattatgtaaagaattttcccaccaatataaatccctagaaaacaatcttaatggccaggtgcagtggctcacgcctgtaatcccagcactttgggagaccgaggtgggcggatcacctgaggtcaggagttcaagaccaacctggccaacatgtggaaatcccgtctctactaaaattacaaaaaattagctgggcgtggtggtggacgcctgtaatcccagctacttgggaggctgaggcaggagaatcgcttgaacccgggaggcagaggttgcagtgagccaagatcgcgccattgcactccagcctgggcagcaagagtgaaactctgtctcaaaaaaaaaaaaaaagaaagaaaacaatcttaatgaatgaaattttaaaaatattcctatgaaatagtttttatactgtagggttatgattattataggtcttagtatccccatttatagatgaggaaactgagatgtaaagagattatgcggctagccctatcccatggtcctacaactgaagaagtagcttttggggtgtctgcctagtttataactctctaaaagctcccttacctatagggaagctatattttctttacatgatctcgtcccttaggatttgagaacaggtacagagtctgggctggttttctcaatgaggaagtaaattcagaagcctttgtctgtcatgtggactgaaaggcagagaagctggtctgtagaaaaagaaaaatgaagcggaaatatagaaagaaaagatgatcctgtgactgttctgtttatagttgtggtttcttctccaagcttagcctcattccaccttagggttctgtgagacgctgtctatccttttaatgcatctcctttttttcttcttaaaataatctaaattggtttctgttatttacatgtttggagttccaatataatgcatgaagtaaatagtgataggtctatgtagctctataaactcatatttttaactacttcattataaccaataaatttggtttataattattgtatgttatcaataattttatgacaaacatttaaaaatatgaatccttacccacatttctatgtccttagtatagaattctagcattgctgggtcaatatatatgaacatttagagctcttctgtgtattgacaaaatgctttccagaaaggttgtatcagttttcattacactagtaatgtatgagaacaaggcatgtctatctttaatgtgccattattgtcatccgtttacatgtacactattcattcctagaattgaacagaaattctttcctgtgcctgccttccatatttaagttactctgaaaaatttaaattgtattaaagacagtttttgtaattgttttaattgcaagtgattttattgacttaatttactaccttcaatgaatgtaaatggaacatgccaaaatatgcaaaataattcttattatgtataatagtgagaaagtatatcacaaagaaaaaagccgtttggtagaataattgagggaaacgtttagataaattttcttgtgatcaaggatgtgcagtgaaaagattagatagtggtatgaaattaaaaacatctaggatgtcatgtgatctgttttgggtttggtacatttttacatttttatgtatttgaaaataatgtgaaggacttgtaatttttactttctactctataagacctaaagatttaatttcagtaaaaacattcttattagaggaaatacataaatgccacagatacagctcaacattctctatgaaaatgaaaacagaagccaggaaacccctgccaaatttaaaattgttacccatttgtgtaatgataaaaatataaagtaagaagcaatgataaattggaaaaggaattagaataggtcactagagtataatactgaatgttacttagcatccataggtctgttctttaactgtaaagagagagggatagaattaatggttttttttttttttttgagacagagactccctcttgttgcccaggctggagtgcaatggcatagtttcagctcactgcaacctctgccgcctgggttcaagcgattctcctgcctcagcctcccgagtagctgggattacaggcccccaccaccacacccggctaattttgtgtttctagtagagacggagtttcactatgttggccaagctcgtcacgaactcctgacctcaggtgatccacccaccttggcctcccaaagtactgggattataggtgtgacccaccacgcccagccagaattagtatctttaagctctcttctacctctaattagatgaaatttttatttagccttcattctaagaaaaacttaaaatatatttgagtgatattctacttgatcctaaggataaaagaaattaaacaacacactttgaacaactttatatatgaagggcagcatagtgtagtagttaagagctcagactcaggaatcagacttcctgtgcttgaatcacagatccataacctgatagctggttgacttagggcaaaaatttgaccctgctgtgccgcagtttcatctataaaatgaggtgaattagaatagctacgccatatggttgttctgatgattacatgggttaatatttgtaaaagctcttagaatagcacctggtatgtagtaaattgtatgtcaaataaaaattactaacctctcagtaaataataaattcatatttatttctcctaatgtctgcctagaattgaattttggcttaaaaaagtctagccaaattaacggtcagaaataaaggattgctggctgggcacagtggctcatgcctgtaatcccagcactttgagaggccgaggctagcagatcatctgaggttaggagttcgagacaagcctggccaatatggcaaaaccccatctctactaaaaatacaaaaaaaaaaaaaatagctgggcatggtggtgggcacctgtaatcccagctacttgggaggctgaggcaggagaatcatttgaacccaggaggcggaggttgcagtaaaccgagatggggcattgcactccagcctgggagacaagagggaaactccatctcaaaaaaaaaaaaaaaaaaaaaaggattgctgctatagccagtgagtaccaagaaaaaaagaaagattgggttaggtaggaatagaaaagaagtggagagagtggaggacgataccacaaatatgtatcagaaacaagagaaaggtcagttagattgctgtgactgaggaatgggggaagagatagtccccctagttctgactttttataaaatagaaactaagctcttacagaattgctaaatttactaatgtgggaaagacagaatttgagtttgccattgtaatgcgttttgcattttgaaaattattgtacttaatgagcctaccacactcactttttcctgagtgccgaggcagctatacaactattgtcaccacagactagatttgttctcaaccctggaggtttgaatagggatttaaaaaaaaaatctgcacagaatccacacaagacactggagaagttttctggagcctcgaagcagatgagggtggattatccaagacataaaaaaatacttaataagggcttggtgcagtggctcatgcctgtaatcccagcactttgggaggccgagataggtggatcacatgaggttggcagttcaagaccagcctgaccagcaggagaattgcttgaacccgggaggcggaggttgcggtgagccgagatcgcgccattgcactccagcctgggcaacaagagagaaactccatctcaaaaaaaaaaaaaaaaatcagtagataatgaagaagtactaatgacttggaaactgcctggacgtctatatttattggtttctggagaggcaatcaggaatttcttcctcatgatctggaatgctggggcctgcctgtagctctgacgtgttacaagctataacatgtagccctactctttcttcacagattctttccttaataggaactggaacacagatcctgtttttttaacgtaagattatatcgactagtatggtagcaaatagcacttcccttactgtggtttttgatataaaatatatttttaattataatgtgtatatggtgagttcagttgctaaactgattctttgtaacttaagagttcaaaagagaaacagtaataacactgacattagatgcaaataggtcaaaaccgtagattgagaatgttttaaattatatttttctcatttaatgtgtacattaaatgattatatatgggtcagtttttttttttttttttttttgggacagagtctcactctgtctcccaggctggagtgcagtggcatgatctcactcattgcaacctctgcctccatgttcaagtgattctcccacctcagcctcccgagtagctaggactacaggcgcatgctaccaggcccagctaatttttgtatttttagtagagacaaggtttcgccacattagccaggctggtctcaaactcctgacctgaggtgatccacccatctcatcctcccaaagtgctgggattctgtttcttaagtttactgaaaaggattttcagattgcaatttattatggtggatttcacagttgctcttagaactaagggttaacacagcccatgtttgaggccaggaactgaatgatactatggcgtttgacacatgttttcatgaatataatatggtaaggctggtggctgaaggcttatgtttactttgttcaacaagtattaattgactgcgcactatgtgccagacacatattatagtaatacaggcaggagagaattgctggtggcttacagcaggtaataatggtagaggtagaagtggtcacattctggatatgtttatttttggtttatttttttttaacttggggtaaaacttacataaaattaataattttgaagtgaataattcagctctagtacattcacaatgtcgtacaaccgttgtttctatctagttccaaaacacttttatcaccccaaaagggaaccctcttcccattaagcatttggctccccgtttctctctccccctgacttctggcaaccatccatgttgtggctgtataggtttacctattttggatatttcatataaatgaaattgtataatatgtgaccttgggtgtctggcttcattcacttaacataatgttttttaagttcatccatgttgtagcatgcatcagtacttcattccttttgtgttgactactattccattgtttgtatataccacaaataatttacccattcatctgttgatgaacacttgggctatgcccgccttttggttattgtgaatagtactggtatgaacatatgtataaatgtatttgagtactggttttcatttctttgggggatatagttaaaattggaaatgtgtgggtcgtatggtaattctgtgtttaactttttgaggaactgctaaactgcttttcatagcagctgcttcattttacatcccaacagcaatgtataaagcttccaatttccccacatactcaccaatacttgttactttcctgtcttttttctttctgttaattattatagctatcctagtggagtatgaagttgtacctcactgtgattttgattttcatttttcattttcatttcccattttttgagacagggtttcactttgtcacccaggctagaacgcaatggcatgatcttggctcgtgggaacctttacctcccaggctcaagtgatccacctacctcagcctcccaagtacctgggaccacaagtgcatgtcaccatgcctggctaatttttgtatttttgttagagatggggtttcgccttgttgcccaggctcatctcaaactcctgggctcaagcaatctgcccacctcggccccccaaagtgctgggattacaagtgtgagccaccatgccaggcgagcatattttcatgtgctttttggccatttgtatatcttctttggagaaatgtctattcaggtcctttgcccatttttcaattgtgttgtctttttgtttttgagttgtaagagttctttacaaattctgcatactagatccttattaaatatatcatttgcaaatactttctcccatttagtaaactgtcttttcactttcttgataatttcctttgatgtacatgagtgttttgttttgtttttttgtttttttttaaagacagagtctcgccctgtcacccacgcaggagtgcaatggcacgatctcggctcactgcaacccccacctcccgggttcaagcgagtctcccacctcagcctcccaagtagctgggactacaggcacacatcaccatgcctgactaattttttgtatttttcatagagacagggtctcaccatgttggccaggctggtctcaaattcctgacctcaagtgatcttcctgcctaggcttcccaaagtgctgagattacaggcctgagccgccacacccggccaatttgtaaattttgatgaaattccagtttacctatgtttttcttttgttacacatgcttttggtgtcatagttaagaatctgttgcctaatccagagtcataaagatttatccctgtgttttcttttaaaaatttttttaaagattttctttctttattgagacagggtcttactgtgttgtccaggctggtcttgaacacctgggctcaagcgatccttctgccttggcctcccaaagtgctagaattacaggtgtgagtcactacacccggcccctatgatttcttctaaaagtttttagctgctatatttaagttgttgacccattttgagtgtatatatggtatgagataggagtccaacttcatcattttgcatgtaggtattcagacgtcctagcactatttgttaaagagactattctttacctatttaatggtcttggcattcttattgaaaatcagttaaccatacgtatatgggtttagtttggggcccacgattctatttcactggtctatatgtctgaccttatgtcagtaccacactgttttgaatactgtagtaaattttgaaattggaaaatatgagtccttccacattgttcttcttttttagtattgttttggctcttcaggaccttttgcaattccatataaatttgaggatcagcttttcagtatctgcaaaaatgcaattagaactttgacagaagggctgggcatggtggcttaggcctgtaattccagtgctttgggaggctaaaatgggaggatcacttgagcccaggagttggagaccagcctgggcaacatagcgagacccccatctctataaaacattaaaaaattagcagggtatggtggtgcacacctgtagtcccagctacatgggaggctgcattgggaggatcacatgagtccaggagttggaggctatggtgaactatgattgaaccactgctagattgcactccagcctgggtgataaagcgagaccccactccccacctgccgccaaaaaaaaaaaaaaaaaaaaaaacttaaatagggattacattgactatagatcattttagataatagtgccattttaacatattaagttttaatgtattaagtcttctaatccataaacatgggatatcttttcattaattaggtcttttttttttttttttttttttgagatggagtctctcttgctccgttgccaggctggagtgccggggtgcaatctcagctcactgcaacctctgcctcccgggttcaagcaattctcttgcttcagcctcccaagtagctgggactacaggcacgcgccaccacgcccagctaatttttgtatttttagtggagacagggtttcaccatgttggccaggatggttttgatctcttgaccttgtgatccgcccacctcagcttcccaaagtgctgggattataggcatgaaccactgtgcctggccttaattaggtctttaatttctttcagtaatgttttatagttttcaatggacaaacctttcacttccttagttaagtttattcctaggtatgggtattttattctttaggatgctactgaaagtggaattatttttcttactttcattttagggttttttttttattgctggtatgtagaaacacagctgatttgtgagtgttgatcttacaccctgcaactttgctgaattcatttattaattctaatatgttttcttcatggattatttgggattttctatctttaggatcacttcgtctgtgaatgggggtatagtagccccgctcatcagcagaggatatgttccacgacccccattggtgcctgaaactgtggatagtagtcaacgctatatatactgtttttttcctgtacatatgtatctatgataaagtttaatttataaattaggcacagtaaaaaaaaatatcactttatctgttatttcctttagccattaagatctgtagtcttttttgtctgcttactgatgaaattcttttttactttgacacttagaagttcagaattctgttattcaatggggagtaaatatgaaagtcatcatgtagtcagaactggatcaagtgttccccaaaatgttttctttttaatttttttttagacagagtctcacttcttcacccaggctgtagtgcagtggcgcaatctcggctcactgcaacctctgcctcccaggttcaagcgattctcatgcctcagcctcccaagtagcttggactacaggtgcgtgccactacacctggctaatttttgtatttttagtagagacaaggtttcatcctgttggccaggctggtctcaaactcatgatctcaagtgatcagcctgcctcgaccttccaaagtgctgctgggattacaggcatgagccaccatgcttggccccaaaatattttttttccataaaaaaatctagagaacatatcataaaggtggagagtaatgaccaaaaaaagtcggtcaataaaaatgacttattttgttttctttagtcacctcatcccagtgaaatctgaaggtgccatggagcagagaaaaggaaagcctcatagcttctttagcctctgcatctggcttgataacattccatctctcctttttaaacaccttggacatcgtaaaattgaataaatgtgggttaagtcatacttggtttcattgctcctatttaaaatctctacccttccccgtcctaccttcacctctagcttctgagactctataggtgattttttcttcagtttgttgtgtataaagaactcttatcagtaattttgtacatttctacttccttatagggtccaagttagagaaggaagtgcagaaagatttttttaaagttgactttttttttttttttacttcttttggttcttttttttttttttttgctgtcaacagctttttaaaaattagactttaaaggtttttaaagactttaaaggtcaagtccctgctgtagagacagacaccactgttatctcttacctagattataccaacagccttctaactggtcttcctgtttttgccttactctcttaaaatttaatctctacatagcagctttactcaaaaccctgcagtggctccccatttgattcacaatagaagccagttttcttatggtggcctcccaggctctacttgatctggccccccattacctccctaacctcttctacttgctctctctgctatggccacagctagcctccttgccagtcatacttggtgatcagaaactttgctcactgattcgcctgcctagtatatgctattcccacagataatctgcttggcaagtatactcacctcacctccattccgtcttgcctcaaatctcaacttctcaataaagcctacactatcttctatttaatactgtaacctgccccatttacactctgaaactcatgaccctatttttatatctgttttaattaagttagacttgttgatactgtggcaatgacttaatcccaaaattgcaatgacttaacacataacaaaatcttgtatcttggccaggagtggtggctcatgcctctcatctcagtactgtgggaggccaaggcgggtgaattgcttgagcccgggaatttaagaccagtcatgggcaacatggcgagaccctgtctctgcaaaatattttttaaaaaatcagctggatgtggtggcacacctctagtcccagctactctggaggctgaggtaggagggtcgcttgagtctgagaggtggaggttgcagtgagccgagatcatgccactgcactccagcctgggcaacagagcgagaccctatctcaaaaaaaaaaaaatcttgtgttacaaatccattatgcgttagcaaacagctttgtccactttgaccctcaaggacctaggctgatggaagcttgcccgtctcgtgatgcatctcaacatgtagtttcccagggtcacatctataggaaagagagagttcaaaggaagattgaaagtggcataagtcacttttttccccagctcactggccaaaattagttgcatgaccctaatgtaagtgaatccaaaatgtaggaggagcacaaggaatattaatgagcattactatttcttcaacacatgttctctttttattttctccatgttacctatcaggttttattatatgatttatatattttatataacttatacatatttacatatcatatcatttgcatgcttttgtgtttactgtttaatgcctcctccagcaagaataggaacttatactcccagaaaagaatataattattctcccaaggaatatttagaatataaaattagtaaaacttgattatttgttgaatacaacggctaaggaaagaattaaggataattcatgtttctcatttggattacttggtttttggtgtttccaaatgaaatagggaatatcagaggaggaacaagtgtgggtgatatgatgatgagtttggtttgaggtatagtgggtttactgccatagggacctcaaggtggaaatatgtgcagagttggatatatggttcttaaacccggggaaatgggtaggtcttcagcatgcctagtctagaagtagttaaaaaaataagaaagggggccaggtgcattggctcactgcacctgtaatcttagcactttgcgaggccaaggtgtgtggatcgcttgaactcaggagtttgagatacccatctgtagtcctagctgctcgggaggctgaggcaggaggattgcttgagcctgggaggttgagactgcagtgagccatgattatgctgccgcacatcagccttggtgacagagtaagaccctgtctcaaaaaaaaggaaaaggtaagactgtcagtaactactaaggacagaatccttctgtatactaatgtttaaagaacaaaaagaggaagatacgctcttgtgtgggaaatgcagcaaaaaataaatggtgaaaggtgaaccaggagagtatgaagctatgactatcgagggtatttagagtttcaaggagaaagtgagggaccatgttaaatgtagtagatatgtaaaaaaaacaacaacaaccaaaaaaaaaaacaactctgcctgtagttccagctactcaggaggctaaggcaggaggatcacttgggcccaggagttcaaggtgttagtatgctattatcacacctgggaatagcctcagtacttcagcctgagcaacatagtgagaccctgtctttctaaaaaaacagaacaaaacaaaccaccaaaaaccaacaatttcgtactaaatattttctactcttcttacaagcttacttaagtcccttgctcctttatttcaacccaacttccctaaccacattggcttcaatttcattgagaaatttgaagtcatcaggcataaacagccccaaatgtgccctcccttcttccctttacaaacttaccaccatgcccatccatcctttcctctttccctccaatctcaggacattcacagccaacttttccactagtgccattgataccaagaattgtctgcactttctgtttatgctttttcccttttatgatttgtgctcctagtattccacggaaatttttctcagtaaggggaccatttgaaattttagtcaatggggtggaagtgaaaaactaagtacaaagtgttgaatactgaatgcaaggtaggggaatagcaatataaattggagatagcagtcactgatgaagtgagagggagataatgccaatcctcctccccagacaactgaagacatttacatggaccagattcaggtactattccagaggccctttcattttggtggccatattaaaagtatgtctcttacctgtcctcctcctcctataccatgccagtgattgaatcttcattgtagaagcagaagtgagccagttcccacaataaagaatttagacacatgagatttcattcatttgttcatttgtggaaaagtatttcttgaatgtctgccatgtgccatactcagggttaggtgctggaaatacaatggggagtaaaaacaaatttcttgttttagtggactttatagaatagtgatttgatttgtcttttatttgtttgtttatatctaacttaaatttgtttaactaattttactttttttcccctttagtaccctcttatatatggactgattcttattccctgctggtgttctctagtttgcctaagtagaatttacatgggaatgcactctattctggtaaggaaaatgttgtcttcttaatactttattttttatgacattgacaggaaattttataatttttaatcatttgcaaacttacctgaagcctaaatgagaaaatattgtaagtcgtctaactttgttttgcgaaaatatcaacatgatggtttatgaaatattaatgtagtagtcacatatttcatagaaacagtttccagcaatcacaatagccaggtattataatcaagataacatttcttcctccttccagtctcccttttattttcctttgcagtcttttctgtgtctctcttatcactgagtcaaaaccagcaatgtggctacagaaaccaaggagagctcctaagtattgttgaagaactagtgactagaaactatgtgaacttaaactttccaggggccatttgtgtttacatattaaactctacttttcttttctttcccatcagtatgttaggactcacagtggacattgtgttttgagaatgcaattcggttcccaaagcagcagcacagggaccctgtactatttgcagccacacccattcactttccctcctcgctatccctattgacacccccttagctctggcctgcaacatatcttgaccagattactgtgatagcatcttaattagtagccaacttccagtttgacactgctccactagcattcagctgtttcgtagactttccaaaacacaaatacgatgctatactgaattattaggtttcctccaatgcaaagggtttcttacctccataactttacaaatgctgtaacatttacttggaatgcccctttcactttctttaccttaactatcccattcattcttcaagactcactatagatattcttaacccctcaaagccttattaccttccccatcttctctttctcaagacttgtgaggtgacccttccccacttatcctaaattgcaattgcttttttccttatctgtcaagtatactagactccaagttccttgagaacagcaactgtgtgttttaactctacctttagtatccaacatggtgtctcatgaggcatctatgaatgaattatgtattatcatggagataaaggatcacaaaaaaaggtggaagaattcatggaattctagtttctaatgggtcatgtcagtttttttcttgtccttaacatgttaccatttttagaattttttttctcatattatttcattctcttatttcttagttatagaaatgttggtttctatctcaaatttcttgcttccagcacctgctccttcacagataaatttccagaagtcccaaacactattttattttgttgggaggcagtgtgtgctgtaattttggggttggtcattgtttctaggtttttttaaattttaattttagattcaaggggtacataagcagatttgtttgcaaaggtatattgtgtgatgccaagatttggacgtctattgatcctgtgacccagatggtgaacatagtacccaacaggaagttttgcagccctttcctccccccgctctccctctctccttttgaagtccctaccaaacacttttttttctttttgagacagagtcttgctctgttgtccaagctggagggcagtggcacaatctcggctcactgcagcttctgcctcccaggttcaagcaattcttgtgcctcaacctcctgagtagctgggattacagacatgtaccatcacacccggctaatttttgtatttttagtagagacagggtttcaccatgttggccaggctggtctcagactcctgacctcaggtaatccacctgccttggcctcccaaagtgctgggattacagatgtgagccactgcgcccagccctaaacactattttaataaacaaattatttgtgtttgactttttataattatttgtatttaatatgaattgtgaatttacatacacttctttctgactaatctctcctaattttgtaatcagattaagtatcatatttttatgcaaaatcaaatacttgttacaagaaaatgttttctatcttctgtgtctttttagagttattctgttccacccctaaaagttagcatcactacttctgaaaaaactaccaaatggttatgcatctttagtgataaaaagtgaattcctggtatttcttggagaaaaagatattagataatatcccttgactcattatcatcatacaaggaagaaaaagaatctatgtgatcacattgaatatataatctcaaagatactggttttgtttgcttgcttgtttgtttttgagatggagtcttgctctgtcacccaggctgaagtgcagaggcgtgatctcagctcactgcaacttctgcctcccaggttcaagggattcttccaaatagctgagattacaggtgcatgccaccatgccctgataatttttgtatttttagtagaaacagggtttcatcatgttggccaggctggtctcgaactcctgacctcaagtgatccacccacctcggcctcccaaagtcctgggattacaggtgtgagccaccatgcctggctgatactgttcttttttaaaaatgaaatgtttagttgggttagtcaaatatccaggatggacaacatctgttcttttttgtttgtttgcctttttagagacaaggtcttgctctgtcacccaggctggagtgtgatggtgcaaacatagctcactgcaatctcaaactcctgggcccaagtgatcctcccaccttaccctcccgggtgtctaggactacaaacatgtactataatgcccagctaatttttaaattttttgtagagatagggtctagctatgctgcccaggctgatatcaaactcctggttcaagtgatcgttccacctcaacctctcaaggtgctgggattacagatgtgagccactatgtccagcctaacactaagagttttaacaatggttattgttaggttaaaaactgtttgttattgtttatctataatttttactttttgtgtagtgagcatgtattaaatgtgtattttaatgaaagaagatagatacttcaaaagtcatccctaatcatagcttttataatcaaaaacaatgcattataacaatacattttgttgtcagaaactgttgtcattgtcatatttaaactggatccagggcacctgaaatatattatagttaaaataaaaacaaaaggctgggcgtggtggctcacgcctgtaatcccagcactttgggaggcagaggcgggcggatcatgaggtcagaagatcgagaccatcctggctaacacggtgaaaccccgtctctactaaaaatacaaaaaattagccaggcgtggtggcgggcgcctgtagtcccagctactggggaggctgaggcaggagaatggtgtgaacccgggaggcggagcttgcagtgagcagagatcgcgccactgcactccagcctgggcgacagagcgagactccctctcaaaaaaaataaaataaaataaaataaataaaaacaaaaaagccattatgagatgggagacctgaatttcagtctcagcaaatcactagcctctctaggtttgatcagtataaatgaaaaaaattttcaaatttaatacctaataaatcttcattaaatgtatggtatttaatatcatctaccataaattgacgataacctggagtattccatttagatgtgtaattaacaaattttggggtataagagttatttataataataaatagctaaaattatttgctaaatttccttttagaaaatttgctactttgagctctttgttacctttaacattaatgttctttattgcatactttgtgctctaacacttaaaaccacttagttatacattttaatgttatccattatattgatatcaaaatgatagccaacatggttatgtcgtaaatttgaatgtttctttttctgattctattggataggagttcaatataccctatctagggaaatataaacaatttaaaactcaaacagaaaaggaagcagatttgtctagtttcgtagcaatctaagttttgttttgtttttttttcctggtcagacaaggtgtggaacaatctaagtttaatactcgtggagctatacacaaaaagtagaggacaacaaataatggattttttatgtcaattgatacatgagaagttattattttaaagaattcttaatgttaaagagatcaaacataacaatttaaagacatttaatgaattttttcttttttttttttcttttcttttctgagacagggtctccttctgttacccaggctggagtgcagtggcgtaatctctgctcactgcaacctttgcctcctggactcaagcgatcttcccacttcagcctcccaagtagttgggaccaccatgccctgctgatttttctattttttctttttggaagagacagggtttggccatgttgcccaggctgctttcgaactcctgagctcaagcgatccactcgccctgacctctcaatgtgttgggattacaggcatgagccactgtgcctggccagttttttcactttttaaggtactataaaagaaacattttacaggattgaacatatgcttatatctattatgaaaaaatacataatttaaaaaaatacctggctgggcacagcagcccacgcctataatcccaacaatttgcaaggccaaggtgggaggagttcaagaccaacctgggcaatgtagggagacttcgtctctataaaaaattaaaaaataagttggtcatggtggcttgtacctgtaatcccagctactcacgaggtcaaggtgggaggattgcttgagccaggaagattgaggctgcaataagctgtgattttgccactgtactccagcctgggcaacagagcaagatcctatctaaaaataaaaataaaaataattaataaaaagctaacttcagagctgttaacccttcatttcacttaaccttagagtaaatatgtatggctttatataaatagcttatcagttgtcatttgtctgaaacatctgacttgatataaattctatgtgaaaagtacaaagtttagaatatatacactttagcatataacatgaaattctaaatcactcatgaaatttaagataaaaagtaaagcaacagcttttatttttgtagccaaaatcctatgggtatttaccaagacttgtgcctttaattacaaggtagggaagtaagggtaagatagcaaacaaagggaatgtaacctcataaggtgaagttattttggcaatttgggctctgaaatatgaagaattggccaggtgcagtggcttacgcctgtaatcccaacacttcgggaggccgaggcgggtggatcacttgagcccaggatatctggatcaacctgggcaacatggcaaaaccctgtctttataaaaaaaaatacaagaagttagccaggtgtggtggtgtgtgcctgtggtcccagctacttgggaggtgggaggattgcttgagcccaggaagtcgaggctgtggtgagccatgatctcccctccagcctaggccatggccatacagtgagatcctctctcaaaaaaagaaatatgaagaatagaggtttgacagtcacatcatttgagatctccttatccaaatgcatggtcagagtttgagtcacttgtggaatctttgagtaactgaaataaaatccagttgatcagaattctttggtaatttttagtatgtatcagtgagttttctcggaagacatcctgttcaaaaaaaaagtgttgaggctggatgtggtggataatgcctataattccaacactttgggaagctgaggtgggtgaatcacttgagcccaggagttcaagaccagcctgagcaacatagggaaagcctgtctctacaaaaaaatacaaaatattagccaggcctggtggcttgcgcctgtagtcccagctacttgggaagctgaggtgggaggatcaattgagcccagggggttgaggcttcagtgagctatgaccacgccactacactacaggctgaatgacacggcaagacctgtctccaaaaaaaaaaaaggaagttgaacatttagtttctcttcactcccaatatttaatttctgattctcaaaatgttaatttttataacaactgtgtcaagtaccttcaatgtaagaggttaaataagcagctgtgtgaccttactccagttttcattatttaaaaactggttgattaaggtaaccataaatttccatcaaatttgcacacttttgaaagggaaaaaggtgcttttaatacctgtcctggggacaagagcaaaatgggacttttcgaggcaagctgtttcatattggttgttatggttaaatgtgacaataattgtaaagtattgaagcagtgtttttagtacggaaagttattattctccaaaaatgtcttaggcctggttcaataaattatatatcatctgcttctcttatagagctcttgtcaggcaggattatgtagtcaatgtgatgagtctaaagaataccttaactctttttctttcttcctttcttctttttttttctttctctttttgttttttatttttatttttaaagaattaccttaactgtcttaatttaactaaccaaacatttatttcctgcttacttatttttcatgcactgaaaatatatgtataaataaggtaaagtctttgcctttgagtagtcattgtctaaatatgcagtatgtaataaaacagtgtaatgcaattgttttcaaccagggtgtacatcagaatcactggggagatttttaaaaaatactgatgccctacccccacttcagttcaatcataatctctgaatattgtcccaggcatcagtatttttatcaagttctccacttgattttaatctacagcaagggttatgaacttttggtttcctggagaaacagacaagcaaagaatggaaaacagtcatagcaggtatgtggaggatgcagtggaatcaaagaagagaaaatttcttattacagggtaggagaagaaagtttatggaggaggtagatgcctgaggagaatctcaaagaatatataatagtttgcctgaaatataggtaggaaagataattctaagacaagaagaaatagtctataaattcattttgggatctggcattaaatgaaacttaatgatagacaaaactcagttatgaaatgctttatatgtccttctaagagttggaatgcacacatgatatttattgccttagttgacactttcctaaacattttgttaattgatcacctctcagccttttggctaagatcgagcgtaaacattttgttaattgattgtgtaatatctttccttgacctgttataaaaggaatcacttatttaaataaagagaatacaattataattttaagcaactttatttacttactattgtacaataggagactatcagccaaactatgttttatatctaaataaaatttttaaaatgtttttcatggctgggcatggtggcttacacctgtaaccccagcactttgggaggccaaggtggacagattacctgaggtcaggagttcgagaccagcctgcccaacatggtgaaaccctgtctgtactaaaaatacaaaaattagctgagtgtggttggtggcgcacacctgtaaccccagctacttgggaggctgagacaggagaattgcttgaagccaggaggtagaggctgcagtgagcttagatggtgccactgtactccatcccggggaacagagtgacactcagtctcatataaataaataaataaaatattttcttatatctatcatgtagtacatcatttaaagagaggaaagatattcatttacaagtaatttggtagattctgctagacaaaacaaattcatgtgaaggatttgtttattcattcattcatccatccaaaaaatatttgaggttgaacaaaacatagtctatttccctaccattttatagttgaatgttcaactgtattctttttcataattatctgtatcttcttctccagctattcttatattccaaagtgttccgatttggagttatatctcttttagaacaatggcttcaagcactgcaactgcggaccctgtcatttcatgacacaatttttattgcatagaaaagaaatagcccagccggtcacagtggctcacagctgtaatcccaacactgtgggaggctgaggcaggtggattgcttgagctcagaagttggaaaccagccttggcaacatgacaaaaccttgtctacaaaaaatacaaaacttagcctagctgggcatggtgatgcacgcttgtagtcccagttactcaggaggctgaagtggggaggacaacttgaggtggaggttgcagtgagctgagattgtgccaccaaagtccagcctgggcgacaaacaaaacaaaacaaaaaacagagaagcattcaagttcaaccgtaatcaattaactaatccaaaacccaaaaacagcttaaatgaccataagtgggaaaaccaataaattgtataatgatgcagcagaatattacatgattgtgaaagtgaatgaccgataactacatataatataatgaatgaatcttaatgttaagtgtaaaaagcagttcaaaagagactgctgtaacattttagcaaagctcagaaagaagcaaaactagataatttttttttttttttttgagacagagtcttgctctgtcaccaaggctagagtgcagtggcgtaatttcagctcactgcaacctccacctccggggttctaagcgattctcctgcctcagcttccagagcagctgggattacaggcatgtgccaccacacccggctaattttgtatttttaatagagatagggtttcaccatgttggccaggccggtctcgaactcctgacctcaggtgatcctcccaccttggcctcccaaagtgctgggattacaggcatgagccaccacccccgggccaaactagataatattttgcttgaagatatgtggtaaaacgatttgaaaaaataggtatttatggccaggcccggtggctgatacctgtaatcctagctctttgggaggccaaggtaggtggatcacttgagcccaggagttcaagaccagtctgggcaacctggtgaaacctggtatctacaaacaaaacaaaacaaacaaacaaaaaatcccaggtatttatgaagccaaaattcatgcttgcaaattgcctccagggaggaatgcagagtgataggttgagaaacagcacaacagtagatttgacaattcttgtaatattatagttcttttgttgggaagtgatttcatagatatgaattttatagtttcatatatactgtacatgtattttgctatgtatcaaatcctatataataaaaaattttaagacagaaacatcaagcaactagtctgttgcttaactgtattgaatattgttaagaaatgacctggccagatgcagtggctcacgcctgtaatcccagcactttgggagactgaggcgggaggatcacgaggtcaggagatagagaccatcctggctaacacggtgaaaccccgtctctactaaaaatacaaaaaattagtcgggcatggtggcgggcgcctgtagtcccagctactcgggaggccgaggcaggagaatggcgtgaacctgggaggcggaggttgcagagagctgagatcacgccactgcattccagcctgggcaacagagcgagactccatctcaaaaaaaaaaaaaagaaaaaaaaaagaaatgacggttgtttttgaagacctctagtatccatgaaaaaagtggtttcagtgtagtggtgagtttagagaaaaatcagaggtgaggaagtggagacagtgaatataaacattgataagtttttcagtaatagtagatcatagggttttgttttgttgtaaggtagaaatacggaacatttttgtatgttgtcaggaatgattcagaaagttatttaatagctttgtttcctcaagtaaaccatcttctatcaagtctacacaattgctcctacctaaaactaggaaccgtctctgattcctctctttcttcttgctgtttctcacattcaatccatcatcaagttacagttgtcaattcttttaaaattttttttttttttttttttttttttttgagacagagtcttgctctgtcacccaggctggagtgcaatggcgccatctcggttcactgcaacctcggcctcccgggttcaggcagttctcctgcctcagcctcctgagtagctgggattacaaacgcgtaccaccatgcccggctaatttttgtatgtatgtatgtacttatttatttatttatttttgagttggagtttcactcttgttgcccaggctggagtgcaatggtgcgatcttgactcaccccaaactctgcctcccgggttcaagcgattctcctgtctcagcctcccaagtagttgggattatcggtgtgtgccaccacacacagctaattttcttttgtatttctagtagagacagggtttcaccatgttggccaggctggtcttgaactcttgacctcaggtgatccacccgcctcggcctctgaaagtgctgggattacaggtgtgagccactgcacctgacctcactttttattcttaagagacgaagtctccctgtgttgcccagcctggtctccaactcctgggctcaagcagtttcgacaaagtgttgggattataggcatgagccactgcacccagctcctatcacttttgaaataaaatctactctcttacctagcctacaaaagcctttgcacttgatattccctctacctggtacacatttcctctgcctctaaatataggctccctttagaatcagatctgtgctcaactgtcaccaccctcagacaggcttccttaatcaatcagtactctaatcgggtccttcatcatactattctgttgtcctgttttagtttcttcataagattcataacaatctgaaattgtaatatttatctgctttcttatgtggttatcaacagtcttgctctgttactcgggctggagtgcaatggcatgatcttggctcactgcaacctccacttcctgggttcaagcgattctcatgcctccatccccaagtagctgggatcacaggctggagccaccatacctggctaatttttgcatttttagtagagacagggattcactatgttacccaggctggtcttgaactcctggcctcaagtgaaccacccacctcagcctcccaaagggatgggattacagacatgagctaccttgcccagccacattcttgtcattttttaaagcaatgtatcctcaacccctaaaataggggttggcactcataaatatttgttcaatgaatgaatgaatgagaaaagaaaattacctaggatgtatatcctgtgtggtcatggagataattacatacataaacatatgaaaatgaaaaccatttctttgaataataagtgtacttttccccagaaatcaaaactacacaattttagcataatttgttgttcagaatttgaatgtaaatttgtggatattatatatgtagttaatttataaaagggtagaattatgaaaatataaatccttttattattaatacagcttttagtgcctcttatatggtcagttaataaagtttactttgagaatttgacaactttaaaaaatttatgtatattcaacatttgaaatgtcaaatataaattattttttaaatgccaaaaatattcagtattatactaaacaacgatacttttatcttttcctaggatattattgctggattcctatataccattttaatcttagctgtcttctatccatttgtggacctgattgacaacttcaaccaaactcacaaatatgctccattcatcatcatcgggcttcatttagctttggggatcttttctttcactcttgacacctggagcacatcccgaggagacacagccgagatactaggaagtggtgctggaattgcatgtggatctcatgttacttataacatgggtctagtattagatccttctctagatacattacctttagctgggccccccattactgtgactctgtttggaaaagccatattgcggatcctcatagggatggtatttgtactaataatcagagatgtaatgaaaaagatcaccattcctttagcctgcaaaatcttcaatataccgtgtgatgatattcgaaaagcaagacagcacatggaagttgaacttccttatcggtatattacctatggaatggttggtttctccatcacattttttgttccttacatatttttctttattggtatctcttgatggagaagtattgtttatgataagaaaggagggtatcagttactgatacccaaaaatatattccaggtaaagccaggtcagaattaggcttttgcaggaatttaacttaaataattatttaagtaaattcataagagtcagtgcattttatcattgcacatccagatactgttttaggtgagctgagctatttcgttactgagaaaatgataagtatccatttagaatgttcatgtaatgtttggagagttttgtattatggattcaacttatatataatatatataaggtacataatatgcaattatatatctgatatatattatatataaaataatatacctaagtgtttttttaaactatgggagtgtattataaaatcaataataatatgcaaacagttgtgcctgtgtatttgaactacatacaggtatgttgttattaacagatatatttaacatttatttactatgggagccatttcctaattgaattgcgtaattactagaccagaatgcatatgctactatacattgatttactgcctgtttttacactgccattacctttcatgttatccatgatgttgaacatgggaggcatttttaatggaccaaatttttagaaaaattagtttttggatttttttttaagttctgtatactgttttgaatgaactttatttgcagctattctggatgtcagtttaataattcaggtactgaattttattgcttgctaattgtgcctttccgttgctaaattaagaaatgctatgtgtactgtgatgtaaaaataagacattaactttatcttaagttacatataatcaagcaaatattttaaaaaatgtatgtcagggtgacaggcataaaagtaaattacccttaactctttagcctttatttagaaagaaatgtggaatgggctaaactttctcaccaatttattagaaagctaaatggataaatacttccctttttgtagatatttttctgtgcattgtaagttataggagcaggacatattttttgtacattgtcttgattgtttatactgcaggtaggtatttccagtgaatggaaacgttgaaatttatagatgggacaatgcacatacttcatatgtaaacaaagcatttttctaaataatttggaaaggattggatttagcaccgttaacttttaatacccatttattggctatttaaggtaaattataaaacctaaaattagtatcagtattttagatcctattattttttcaactttctattattttcacagtggaaaatttgcgtatagtattaaactattcttttttctgtctacctttatattttgaagtgtggttgtacttacgttaatagtaagtgtatttgtagaaagtttttcataaagaagagattaactttccatataaataaataccaggtatgaaattactgattttagtgcaatatctgtatgattatccagaactatcacttcagatgtttctattttgggcaccataactatttgagctcatatttttataattctgattgagaatttaggggcatggtaatttttaccaaaactgaagctggtaattttaagtaaagcaactaaatttaccctttacttattagttaaaaggaaaccaaggcatgtaggaaaatattggtacgttggaaaatgtgaaaagagctttactttcaaaatgtatgtttaatgaattgaattttagggaccgtttcccataatttgggcctatgctatcctgttgatttttatgtctagcttaaaaggtatttgaaaatgttccatttgtgttttattattttctgtcctatgacagttctatgctaaatgtattttaaaataaaagccaaattgaagattaaa

SEQ ID NO: 342 - DNA, 175794 bp, Homo sapiens
  source 1..175794: mol_type = genomic DNA; note = NC_000012.12:c6124670-5948877 VWF [organism=Homo sapiens] [GeneID=7450] [chromosome=12]
agctcacagctattgtggtgggaaagggagggtggttggtggatgtcacagcttgggctttatctcccccagcagtggggactccacagcccctgggctacataacagcaagacagtccggagctgtagcagacctgattgagcctttgcagcagctgagagcatggcctagggtgggcggcaccattgtccagcagctgagtttcccagggaccttggagatagccgcagccctcatttgcaggggaaggtatggcctttggaaggagagctggctcagttgtgggaggaagatgcaggactgactgatccctgctcctggggagctggagttctctgtcgctggactagaagggctttgtttggaggggcaattcaattcagccagggatgatcctaatactccctcctccacttgcctctgagggtcctggggctgcttttcttcatgcagtgggttttactgtttgatagtacttcactcaaatgagttggaatgaagtttgccctcacctctgagaacctgggagcagctgaatgtacctgcgtgttaggactgggaggggacacctgcttggagaccgagacctggcagtatctgacatctcagtgttccttccacagatgtatcacagattggcttgatttcacctttggctggatgggaccttaggtaggaagggagtcacccccagtgaatctcaggcagcagattctgcacttcatttaacaacttttcccgaggagaggggctacagcaggggctctaagtgacttggggtacgctctgccagccaggatgaattgtccctctcttgggggtcacacagtggggaagtctgcctgcatccagggccgctggactcctgtccattttttcagatgaactcagcaaacatttgctgggcatctcctgggtgctaagcatcttgccaggtgctggggttggaggcaagggagacagcctttgctcttgtgaaggcacttgtggtacagagtcaggggccaacaagcaaaccgtcaagttggtggttcctgagcattctctatgtctgggctgctgtggtgggcacacaagtgtaagacggttcctactcgccagtttggatgcagaggcaggaaggaatgaggtgtgtgttagctcccagctgcttcaggaggcagggatgtgaggcccagcgggcctggagggaaggcagcgttttcctcctgtcttgggcctgggactgctgtctgtggaaaggtgcccacaggtcccagctcacagcgattgttacccttgggcctggcactggccaggggttttttcgggggccagaagtccatgttcaaaggggaaaagggggtcacgaggatcaatcttttctcctgctttaaagaaatgtttttgctactgcatgccctgatagtcgccacaccagcagccgcctacctgggcagcaatgaccagctcacgtctcttgcttctttgcagatgattcctgccagatttgccggggtgctgcttgctctggccctcattttgccaggtaggtacaaaagggcctccatttctcattcctgccccagggccatctggagtgacacctttccgggaatcagcaggtgtgtctggagctcacctgtgtgcccagccctaacttaggctgttggttgcctcctgtgaaggttctgcggagttcccacccttgacttgtattccagagaccaggtgcctgcaaatgccatctcctgttggggaattaagaagcataaaggtggcacagaactgtcctatattatgggggcacaggatgaggaggaaggaatccaagacttggatggattattagttttcgataagattgtggaggtcaccttgttgaacctcccatggtacaatgaagagactgagggtcagagaggagaaatgactgctccaaagtctcctagagccaaaatcagaggtcagtcttcctgggttccaggccaacaccctttccactgcactgcatcatactgctgcccttcccttgctaagattctgggtctgcaaatggcgggaggggacttttgaccttgggcgctttccacttagatctctcaggtcagcagcatccagctactgcccacaggtgagtctgggaaaaaaaatacacatttgtcacactctctgcatcttcctactaggtgggtcttttgccggggaacccagaacacttagagatttactgctgtatttccccacctgccgacacacacacacccatagtcagtgaaggagttagcctgtgacgccggaggagttcacacttcagagagtctatgtgtcaggcacacagtctgatctgtttaaaatttaacatgcccaagacatgctagtagatttatgtacaaagatgctcactgcaatctatctataatattaaaacatggaaaaatgctagaaacctaacaatagagggctatactatagacattcagatgcaaaatataatgcagccactaaaaaccgcatattggaagtatatacactagcacgacaaattgtttacaatctattgagaaataaacagaggttataggtagtttgcacaagttggtcaccaatttataaaaaacccacagctgtatatatgctatacaacaaaatggaaagatgaacattgaaatgttaactctaatcatcgctgaatgttgggttacagatggttttaacttctttgtcttttcttttctttttctttttcttttttttttcgagacagagtctcactctgtcgcccagtctagagtgcagtggtatgatgttggctccctgcaacctctgcctcctgggctcaagtgattctcctgcctcagcctcaccagtagctgggattacaggcgcccaccactacacccggctagtttttgtatttttagtagagacagggtttcgccatgttgggcaggctggtcttgaattcctgacctcaggtgatctgcccacctcggcctcccaaagtgctgggattataggcgtgagccactgtgcccggccagcttctttgttttcttctgtatgccccaaatttttaataatggacatgatgacattttaaatcagtaagtaaatgtcattgaaactaatggatttcctgaaaaactgttccttagttattgctgtgagtctggggtcatatctgggagctgaaagcaacagctttagtctcatttaggatggaaaatacctccccacagcccagtttctatcagaggcagtctaatttctacgaggccagagaggtttgagctgatggtcccagttgtgccctgagatcaccagcccaacctgtggcctctccctccagggaccctttgtgcagaaggaactcgcggcaggtcatccacggcccgatgcagccttttcggaagtgacttcgtcaacacctttgatgggagcatgtacagctttgcgggatactgcagttacctcctggcagggggctgccagaaacgctccttctcgattattggtgagttctgggcactgcagggaggacttcagagggagggctggctgagcttagccctggtgtgggggaggattcctgctctcaggacagtgtctgagcggaaaggtcactgctgagaacaaggagaggaacagcctttctgtgacacgtagcccctcttggctttccccgggtctctccccacgggagccgggtgggatggatgaagagagtcttcatctttggtagtccactgtgtccgttgctctggggcccggcgatgccctgggaactccacagcatcaaggcaaatgatgaactagagaaggtgctttggaacgtgtaaaactccttgccagagagaagactcgttgttgttttcttggtggcctgtggatcagaacatcagcttatgctgaggacttcctgtattcctgcagaagggctggtactgtccctgccatgtccctgcatccccacaacagccctgggatgtagctgtagtcatcccagttttaccaatggagaaccaaggctcatgaaggttgcatgatccttccaaggcctgacagacaataaaaggtggagctgaggccgggcacggtggctcatgcctgtaatcccagtactttgggaggccaaggtgggtggatcacctgaggtcaagagtttgagaccagcctggccaacatggtgaaaccccatctctactaaaaatacaaaaattagccgggtgtggtggtgtgtgtctataatcccagctacttgggaggctgaggcaggagaatcgcttgaacctggttgcaataagctgagatacactccagcctgggcaacagagcgagactccatctcaaaaaaaaaaacaacccacaaaaaacaaaaaaactggactaagcaggccaaggacagagcccaaggccaaggcttaatctagaagagggctcagaagtgccccactcaagtttggtcaaggagggagtctttggcaacacctggacacttacctgagatctgggctgtagggctcctggggtcattgctccatcagtcagcggggactgacacagggtcctccatgtgcccagcactgggctaggctctgtctagcacctggctatagctatgagctccccgcattcctgctttctccctgaggccatctttgctacctgccctgactctgctgggaaacttatcacatatgacttctgggcactgccatccttcccactcctccatgagctcctcagggacaaggagcatgtctcactcatctgtgtttcctggtgcttagctcaccgagttctctgttgtgctgaagattatgtatttatttatttatttttgagacggagtcttgctctgttgcccaggctggagtgcagtgagtggtgcgatcttggctcactgcaacctccgcctcctgggttcaagcaattctcctgcctcagcctcccaagtagctgggcttacaggtgccaccatgcttggctaatttttgtatttttagtagagacagggtttcaccatattggccaggctggtctcgaactcctgacctcaggtgatccacccgcctcagcctcccaaagtgctgggattacaggcatgagccaccatgcctggtctgaagatgtttacagagtgtgtgtgaggagccctagggaaggagctttgattggccagagaagacaggggagggtgctgcatgtggtggggacagcatgagaagtggggaggctggaaggggcatgtactcctgacatggagccctggggaggtcagtgtggctggagcagcagttgccaaactccaggctgcatcaggaccacccggagagctgtgacaaacagatcactgggccctgcccctggagttctgactcagtagaaatggaagggggcctgaaaatttcccaactgctgctgctgctcttagggtgggtaaccagactttgagggtgcgggactggaggagagtaggctgggaggctgtaccatcgggtgaagctgcagtgtagggtcttggagtctgatggggactttgagtcgattccgcaggctgtgaggaactagtatagggtcttgtgcagcagggaagtggtgagaggaaactggttctttgccaagatggtcctgaaaaggagagaggtaggaggcggaatggccttggccgtggtaaccagggaggtagtgaaaaggccagaggcgccccagggcatgacaaataagaaagtcatcctcaacactgaccgtgagggtcccaacttgcttcagaggctgcagctggggaggagctggaagagcagctggagagaacccctgaacccctgcccctgggaagctgaaggctcatgccctccctaccttggtgaccccagattttatttaaagtggattttcccattttataaatcacggcagagctgatacagaccactacctgtgatggctctggggttgtcagtgggaatggagggttagaagtgaccggaagaggccgggtgcacgggtgcaatggctcatgcttgcagtcccagcactttgggaggccgaggggggcggatcacctgaggttgggagatcgagaccagcctggccaacatggtgaaaccccgtcactactaaaaatacaaaaattagccaggcgttgtggtgggtgcctgtatcccagctgctcgggaggttgaggcacaagaatcacttgaacttgggaggtggaggttgctgtgagccgagattgcgccattgcactccagcctgggcacagagtgagactctgtctcaaaaaaaaaaaaaaaaaaaaaaaaaaaaaagtgaccagaggaagattttgatggagacactgcagtgcccggggtgggggcgggtggattgctgtctggactccataatctctgttagttcagctctgctctggactccctgccccgagacgggctggtaaacaacacatactaataccttagtcccaggcacagagttcatgttctgggctcagagagccaagtcagcatgttgaaaaagctcccttcccctatttgagcccaactccagacctctccccaagtcagggtagccctaccaggtggggacatgtagcgtgtgctggtgcctctgggctgtctcggtcacctccttcaggaagccctcttgcccattccacccgtccagcactgggctcatcaactcgtgctcactggtcggtttccgtcccacagaactgggtggctctgcccccagcaggaaatggaagcacagacagagccagagttgcagtcggaaaacccgtgttctcctctgctctccctcttcactgagtgttccgagggcagttgtgctgtcttagcctccaattcctcatcttttgaaatggaatctcgctcgtgttgtccaggctggaaggctggattgcagtggtgcgatctcggctcactgcaacctccccctcccaggttcaagcgattctcctgcctcagcctcccgagtagctgggattacaggcgtgcgccaccacaccctgctaattttgtgtttttagtagagacggggtttctccatgttggtcaggctggtctcgaactcccgacctcaggtgatccgcccgcctcggccttggttcctcatctttaaaatggagatactgtgagcatcaagggagacaggttatctgaaaatgtgactgcttagccaagctgagttattgaaagcagccagcttaacatggggtgttcacttggaatcgccatgcagagacaggggctgctgggcccccaggcatttccacgaggtcagggtcacttgagtttcaactccccctcataatccacacaggtttgtgctagaggtctggcctctcgggccaccgttttctgggtttcagtggtcacagaggaatttgaagggccatggaaggcctgtctacctcaaaaccccttggtgggattccccaccaggtcattattcttttcttataagctgtttgcccttgtgaagtgtccattttctgggagattgtttgcctaaacaaggttatggatcaaacacactttaatgtaaattgatttcattttcaccaaaaccgtgctgctaacatcatagagaatgggtggctgctttgcctcttgttggtggtggtggcaggtttggggtgtgtgggagaagaggaagaattagaggggggtgggctggcattggtgcatcagggcagccaggggcactgggtcaggggagggagcccaggacttgggccctgcagtttcagtttccgtgcacatgcctaccttcttttccattgttctgcaatgacatcctgtctccttgaccgtaaatcgcacatccacattcctcccgagtgcctgtggaccttattcatatcctgggaaaagtgtttatgtacgcacacgaagggccacctggtgccaaggcgaggcccctgtccttgattctgtctcctggtgaggcaggctccagggttcgaggccaaggcgacacggctgtttgccagacagcacagaggccagagagagactatgggagtcctggttcctgctcctccgtagagactgctcttcctaagctacggctgcaggatctggctctcatacctgccaagagagagccatcaacaaccaacagcctgctgagtcacttcccccggggagccttagtttccgtggcatggtcagaccagacccctgttctcagtttggagggagggtcacctgcaccagaatcacgggcatagaaggtagagtgtttagtggaaatgcagatgagtgagttccacactaaagcctaagagagcgcccaggtctgacggtagttccagctcctggcctgcttctgaaggtcccaggattcctctcactctaatatgtgggctaggagcttactcctcactcagcgccttaatcactgcgttcagcaggcctggtgggagcctctgggagagcttcgctggcttgtcttgcctctttggggtgacagccagcctctcttttcctaagagttatagaaagtgctaacctggaggtctgtggagtgcaggggtctctcctgggctcaccggcgatttctaatggctcgttttcctaatggctgcacatcatctgatgcccctgagttctgcatggagggaatgagggaaataaaatgcaaggctggtctggagttctccctgcattagtgattagtgcaatcctagaacactccgatgccctgttacgcagctttgtgttgcaaaaaggggatttggacagtcaaaaaagcctgagtgtaggctctgctccatttccacagtggaaaccaggggttctcagtcggggtggttttccccctgaggacattttgcagtgtctggagacattttgggttgtcacaactgtggagtgggtgctgctggcatctagtgggtagagaccaggaggctgctggttctcccaccatgcacagggaagtgtctggcgctgaatgcaatagtaatgcagtggagaaatcctgctgtaaacctaggccttcgtttctccgtctgtaaaatgaagtcagcctagatcattgttttctgaactgagtcatgggccatgggtcctaaaatgagttgagtggttataactagcatttaaaaagacagaaaaggttagaaaacatcagaaaatatcagagtgcatggcacacggcaagggtaaatatgatatgaaacgtgtgtgtgtgtgtcctgagtcataaagttgtgtttttactgtgctttctgagcaaaagagtttaagagccgcttatttagattcttcctgctgccatagtatgtttttctgaattataggcctagatcacactttgaaaaatctcattgccaggctggacacagttactcatgcctataatcccaatgctttgggaggctgaagcgggaggattgcttgagcccaggagttcgatgccagcctgggcaacatagcgagacccccatctgtacaaaaatatacaaaaattagctgggcatggtggcacacacctgtagttccagctatttgggaagttgtgacaataggattgcttgagcccaggagttcgagggtgaagtgagctgtgatcatatcactacatgtcatcctgagcgatagagcaagacctcaaaacaaaagaaaacaaaaccccaaattcccttgccactcccctgctccggctgtggactgactgctcttcaagccccctcagccatccagggccaggaattctccttgccatgcagttcaatcctcactgaagggcacgatgcagccccactcctgcccctagactcctgtttttggtttgtctctgggtggatgggggctggttaccagaacctgaatcatccccttcaggagccccagttcctgcggtaggtgaagctccaagggcagccagccccacgtcccctggctgcctggagctgcctcacacaggctcagccctgggctgccccttggacttcctgatgctggtctctccttgggctgcccagagcaagcccttgacatacttaaaacagcactcgcttgagtcccagctcttcatcactgactagctctgtgatgataggcaagttaccccagggtctgccgcctggccagccccgagccccgcagcctgtgtggacaggttcctctgttatttactctaggagggctggggctctccttctctcccatacacttctcctggttctctcctgtttgatttttctgcttctgctgaattcttggtttattcagccttgcaggccttactttacaaacttatagccatagcgacctccgggctcccctgtggcacccgctcagctctgcctcctgtggaacgagtaccttgcttaagtgattttgcatctttggaagcctctaagagctgtagatcagcagccacagggccatgccaaccccaagctgcctggctgcctctgaagcgttccctacccattctccagccacagtccctgggagacttggtcccacccaccctttctgcatccccaggagaaggagaaacaccaaggaggggctcacgggggttcctttcccatttccaggagggagatgcctttggctcggaggtgacatattggttgagttacccagtgaagccgaggcagaactccctgtgagatgggatgaaaggaggattcactgatggggagacaggctcagtggtaatagggacacagacccctgagcccagacctcgtgggctcatttgtctgccatctggcaggtggaggcttctgctctggcaggtctccagtgaggagtgtgaagtgggtccctgccctgtcacatgggctcactctgggctgtgtgtagtgttcagagctccagccccagaaaaggccgagggagggatttggtcttgggcccagtgcaaatgcctagggccctggaagggagagggtgcaaactggaggttgttacctggttgtcccatttgtttggtttttcgacattttcttatggaaattttgaaacatacagaaaagttgaaagacttcaagatccatatactcctcactcagattctaccattactggtaaatacattactgaaaaaaagaaaaagttactttgcagggcacggtggctcacgcctgtaatcctagcactttgggaggcccaggcaggcagatcatgaggtcaggagatcgagaccatcctggctatggtgaaaccccatctgtactaaaaatacaacaaattagctgggcatggtggcgggcacctgtagtcccagctactcgggaggctgaggcaggagaatggcgtgaacccgggaggcggagcttgcagtgagccgagatcgcgccactgcactccagcctgggcgacagagcgagactctgtctcaaaaaaaaaaaaaaaaaagtttctctacgcaatcacttttccagttgtttctttttctttggccaatttcttgctgtcagtaagtttgttcagcttctaaaggtttgcttgctgtaaaaactgttctaggtgggaatgcagagcaagggagacacctcagctcaaacaggacaagtcccctttcatttggcaggcatctccattttctcccagttgtgttgatctggagctccgcagaatgtggtttatggactgtgagtggtctgtgtgtctttcctggtggctgctgctgctggcatatcattaaaactattcctagaatagacttattatttacgtgggagagccctcactgaatttccaccagaaacaagtctattctgtagctcattcgggttggtttggagtgtttgtgtgttccagggtgcatgcttatgtgtgtgcatggtgtgtgtgcgtgtggtgtgtgtgtgtgtgtgtgtgtgtgtctgtgtgtctgtgtgtgtggttgtcctcctgcagcctcagttcagcccagagccctgctggggactcttcctctcctggctaggagtgaggagacctctgccccagctcctctggccatgacagcaacaccttgagtcaacagacctgccaggtcttctgggcttcgttccacggacatcttagcctcttcttgccaagaagaagcccacactcccctatcccttctaggagaagagagatttgctcatttttaagaccaactttacccctgagtcctatgccccattccttcaggacctcaaggcattgtgccccacacgtcagctctttgttttctctggctgcccctatctttcctatttccattaatttctcagtctccaaggcttgagaccagactctctattttcccttctgggtcttttgattcttatgaccaattagttatctttgaatatcaaagacccaccacgagtagcagttcttagaaactaggtgaggtttgctaagctttggtcacgctgtgaaaaatgtcttgcctgtgtttcctctttcatgctggccaccgtcccatcacccttgtcaccctgttcagccctcacaaccacaccattctcagagcctattttatcatgtgtctggatcttcagacatttccattgtcaaccatttagtgtgtccttattaattccatgtgctgtgtaaggcgtttgacccacacgatctgtaaactcctggataatcaaattcagcaaacttaggtggagctcatgaatctccattttaaacaaacagcccagggattctgacttgggctgtcctaagataccattttatttatttatttatttttattttttattttttttgagacagagtcttgctctgtcacccaggctggagtgcagtggcgcgatctccgctcactgcaagctccgcctcctgggttcacgccgttcttctgcctcagcctcccaaagaactgggaccacagacgccagccacctcgcctggctaattttttttttcttcatatttttagtagagacggggtttcaccgtgttagccaggatggtctcgatctcctgacctcgtgatccacccgcctcagcctcccaaagtgctgggattacaggcgtgagccaccgcactcgaccgataccattttaaatagcactgctaggccagagcggggtggctcatgcctgtaattactcgcaccaaggagctcaagaccagcctgggcgacacggtgagatcttgtctctacaaaaagaaaaaaaaaattagctggatgtggtggtacatacttgtgatcccagttaccctggaggctgaggtgggaggataacctgggcccaggaggcagaaactgcagcgagccatgttcacatcactgcaccccaacctgggcaacagagcacaaccctgtctcaataagtgaatgaatgaatgaataaataacactctcctagagcacctgttaccagtaactcacagtgttgcctttttgtttgctgccttacaatatactcaattgtcgcatgtttgtcttctatttatacgcaggttgtaaactcccagaagcaaaagatcatgcttttagatttttcttttgtgatgtttgagagcctacctgagggcaatgtatccagaagtcactcaataattatttttagatgaatggaaaaatgggtgagaaaatgagatttttagggagatttttgttgctcgcttgtaaagactttttggggcgttttctgctgagaaaaggttacgtagataatgattcttaatcaatgtattcattttttgagaggagtaataatcactactattgacttttttctctttcaggggacttccagaatggcaagagagtgagcctctccgtgtatcttggggaattttttgacatccatttgtttgtcaatggtaccgtgacacagggggaccaaaggtaagccaacaatgtctgagttagaaaggaccctagggatcccctgacacaaccccctcatttttagatgaggaagctggggcccagagaatggaagcaaatgttccaaggaagtgagtagcagggctgggtgagagccagctctcccgattgctgatctaggtcctcagccactttgcaccatgttctgaaccctacaacatggggttggggttagaaggtgggagagacatccagaaaatgcacaagaagcccacttctgaacttagcctttgccctccagagtctccatgccctatgcctccaaagggctgtatctagaaactgaggctgggtactacaagctgtccggtgaggcctatggctttgtggccaggatcgatggcagcggcaactttcaagtcctgctgtcagacagatacttcaacaagacctgcgggctgtgtggcaactttaacatctttgctgaagatgactttatgacccaagaaggtaagatgttctgggataccatttccctaaagtgtggccatgctttttatttccttgctcataaaccttcactaacatgccttccctggcattcaagcctcactgtgacctcacctcaatttatgttgccaaccttatctctttgcattccattccaatgcctagacctctagtgaaaccaggtcttagagctcctcaaagctgacttcgttcaactttgaattctctgtagcaacttgcacgtggcagatggttggtcaatgctgggtagtttgagtcgatcctcctcagcccactacagtggagtggataaaatctatggagtggtcggtcctccacaccatccaaaaaggccagtttatgtgtgtgtgcatgtgtgtgttcacgagcaatagaaagtaatatggataatgtgaaaacactaggctgggcgcagtggcttacccctgtaatcccagcattttgggaggccgaggcaggcggatcatgaggtcaggagattgagaccatcctggctaacatggtgaaaccatgtctctactaaaaatacagaaaattagccaggcgtggtggcgggtgcctgtagttccagctacttgggaggctgagacaggagaatggcgtgaacccgggagggagaacttgcagtgagcagtgatcgtgccgcttcactccagcctgggcgacagagcgagactccgtctcaaaaaaaaaagaaaacactaaagatgaatatttcaatcttctttaatttcaattacataaacattcaattagtgatgttcccttgccaaagctaaacacttacatatgttatctttcttccttatgacccaaccactttctgattagagagtaaacatgcagagaaacaattgactcttcctttcattggaatgtaccatattggaaaatagcatgatagtttattttttggttttctccagcactgattttattgtctgatatgtacatttagggctataaatttccctctaaatatcactttagttgcactctatatatgtgtgtgtgtttgtgtaaatatgtatatatactgtatatgtgtgtatatatgtaattatatatgtgtgtgtatatatatgtatatatatacacgtgtgtgtgtgtgtctgtgtgtctctgtgtgtgtgtatttagagataaggtcttgctaagttgcccaaactgatcttgaactcttgggctcaaggaatcctcttgcctcagccttcctagtggaattataggtgtgtgttactgtgcccagctgtaccaattttgatatgtaacatatttcatgttttaaattttctaacttccattttgagctctttctgaacctatatacatttacaaattcaaaagtttgaatttttttttttttttttttgagacggagtctcgctctgtcacccaggctggagtgcagtggcgcgatctcggctcactgcaagctctgcctcctgggttcacgccattctcctgcctcagccttccgagtagctgggactacaggcacccgccaccatgcctggctaattttttgtatttttagtagagacagggtttcactgtgttagccagggtggtctccaactcctgacctcgtgatctgcccccctcggcctcccaaagtgctgggcttacaggtgtgagccactgtacctggcctgaagtttttaaagttacctatttgtaactaaattgatttctaaatttggttaaaaaattgtggcctagttaaaaaattgtagacttgtttgcagcctttttttttttttttacaagtgttctatgtatgcccaaaaataatgtattctctgattggtgcaggactctacctatacttcttgaattaagctttttaattgtgttttccagatcttctgtatgtgtactacttcttgtctgcttattaatgacccattactaaaagagctaaatttttctataatggtggtgaatttgtcactttcttcatgtaattctgtcaaattttgctttgtgtgtgtgtgtgtgtgtgtgtgtgtgtgtgtatatatttctttctttctttctttctttttttttttttttaaagacagagtcttgctctgtcacccaggccggattgcagtggtgagatctcagctcactacagcctccacctcccagattcaagcgattcttctacctcagcctcctgagtagctgggactacatccaggtgtcaccacgcctggctaatttttgtatttttagtagagatgaggtttcagcatgttggccaggctagtcttgaactcctgacctcaagtgatctctccgcctctgcctcccaaagtgctgggattacaggcgtgagtcaccgtgcctggcctgctttgtatatcttgagcctttgttattagtgtttagaaatactgaatctttcggctgggtgcggtggctcaagcctgtcatcccagcactttgggaggccgaagtgggcggatcatgaggtcaggagatggagactatcctggctaccacggtgaaaccccgtctctactaaaaatacaaaaaatgagccaggtgtggtggcaggtgcctgtagtcccagctactcgggaagctgaggcaggagaatggcatgaaccttggaggcggagcttgcagtgagctgaaatcgcaccactgcactccagcctgggcgacagagtgagactccgtctcaaaaaatatatatatatatatattgaatctttctagggaattgttcctttaatgtaatgactctcatttttaccagtgctttttgccttcaatctgtctgatattagtatagctattccacctttcttttggttagtgtttgtttgatgtatctttttccattctttcaacctttctatgtgattttgtttcagatgtgtgtcatggaagcaccacatggctctattttattattgttctttcaaaagtcagatttattgaggttaatttacagacagtaaaattcaccctttcacatacagttctctgagttttcgcaaaagcgtagagtcatgtaaccaccacaatcaaactatagaacagttttgtcaccctcaaaatcaccatgctcctttgtagtcaaatcttcccccaactcctagctcctggtggccactgatcttttatctgtttctgtagtcttgatatttccaaaattcatatgactgtaatcataccctatttgcagtatttagtcttgtaagtctggcttctttcatttaacatggtccgtgagaggttaatccatattggtgcatgtatcagtagtttgttcctatttattgctaaggagtagttaccacaatttgtttacccattcaccagttgaaggatgctttgttgtttccaattatggaaaattatgaacaaagccagtgtaaacatttgtgtatagatttctacaccccgccgcattttttattgtgctatgatacatgtaacataaaatttactatcttttttttttttttttttttttttgagtcggagtttcactcttgttgcccaggctgcagtgcaatggtgtgatctcagctcactccaacctccgcctcccgggctgaagcaattctccagtctcagcttccctagtagctgggattacaggtgtccgctactatgtccagctaatttttgtatttttagtagagacggggtttcaccatgttggccaggctgctcttgaactcctgacctcaggtgatccgcctccgcttagcctcccaaagtgctgggattacaggcgtgagccaccgcgcctggccaaaatttattatcttaaccatttttatgtatatagttcagtggtatcaggtacattcatgtagttgtacaaccatcaccaccatccatctccagaactcttttcatcttgcagaactgaaactttatattcattacacaataacttcccattcttccctctgggctcctggaaaccatcattttactttctgtctatgattttgactactctaagtatctcatataagtggaatcatacagcatttgtctttttgtggctggcttatttcactttgcataatgtcctcaaggttcattcatgttgtggtgtatgtcagaattttcttcctttttaaggatgaataatattccattgtatcagaggaatttgaggaaaagaaaaaaaatttcattgtgcatacagaccgtacgtactttgcttatccatttatccatcagtagacacttagattgcttccacgttttgcctatagtgaataaagctgctatgagtataggtgtacaaataactctttaaaaccctgctttcaattcttctttattttttttgagatggagtttccctctgtcgccaggctgaagtgcagtggcctgatctcggcttactgcaacctccacctcccgggttcaagtgattctcctgcctcagcctcctgagtagctgggactacaggcgcatgccaccacgcacagctaatttttttttttttgtatttttagtagagatggggtttcaccatgttggccaggagggtctccatctcttgacctcttgatctgcccaccttggcctcccagagtgctgggattacaggcatgaaccaccgcgtccggctcaattcttttgagtatattcccagaggcagaattcctggatgatttctaatggcaattctattttcttcatatatttcatgatttatttttcaggtatgtgaaattttaaaatattccttttacaatatctatttctctttacttaaaaggagaaaaatttgatatgcaatttcttcttaaacattttttaaattttttctttttaaaaatttgtataaggccgggcgtggtggcccacgcctgtaatcctgtaatcccagcacttcaggaggccgaggtggatggatcatttgaggtcagaagttcaagaccagcctggccaacatgtgaaaccccatctctactaaaaatataaaaattagctgggggtggtagcacatgcctgtaatcctagctactagggaggctgaggcaggagagttgcttgaacccaggggacggaggttgcaatgagccgagatcgccccactgcactctagcctgggtgacaaagcgagactctgtctcaaaaaaaaaattgtataaatttatggggtacaagcgcaattttgttacatgcacagattgtgtagtggtcaagtcaggacttttagggtacaatatactttgtacccattaagtaatttctcatcatctgccccactcccactctctctcacctttctgagtctccaatatctatcattctactctttctgtctgtgtgtacacatcttttagtaaccactttttggtgagaacatgtcatatttgactttatgtggtttgtttcacttaacataatgacctccaatcccacccatgttgctgcaaaagatgcgatttcattcttatggccaaatagtcttccattgtgtatatgtaccacattttcttcatctaatcatctgttgatgggcatttaggttcataccatgtctttgctattgtgaataatgcacaataaatatactagtgcaggtatatttttgatatattgatttcttttcctttgggtagatatccagtagtgggattgctggattgaatggtagtcctatatattttttttttttccgagacagagtctcactctgttgcccaggctggagtgcagtggcctgatctcagctcactgcaacctccagttcccgggttcaagcaattctcctgcctcagactcctgagtagctgggactacaggcgcatgtcaccacgtccggctcatttttttttcttttgtatttttttagtagaggcggggtttcaccatgttggccaggctggtctcaaactcctgacctcgtgatacgcccgcctcagcctcccaaagtgctgggattacaggtgtgagccaccgcgcctggcagtcctattttttttttttttaaagttctttgaaaaatctgcatactgttttccatagaggttgtactcatttacattcccaccaacagtgtgtaagagttcccctttttcctcatccttgccaacatctgttattttctgtctttttaataataaccgttgtgactagggtaagatgatatctcattgtggttttaatttgcatttctctcatgacaagttatgttgaccatttttttcacattcctgtcagatatttgtatgtcttcctttgaaaaatgtctactcatgtcctttgcccacttcttgctgatattatttgttatttttcattgttgttgagttgtttgagttccttgtgtattctggatactagtctcttgctggatgaaaaagtttgcaaatattttcttccattctgcaagctgtctcttcactctgttgatgatttcttttgctgtgcagaagatttttagtttaatgaagtctcatttatctatttttgtttttgttgcctgtgtttttgaagtcttagtcagaaattccttgcctaggccaatgtccagtacagttttcccaaggtttttttctaggatttttatagtttcagaccttacattcaagtctttaatacatcttgagttgatttttttttgtatatggtgagagataggggtccagtttcattcttctgcatatggcaatccagttttcccagcaacatttgttgaagagggtgtcctttccctagtatatattcttgtcagctttgtcaaatatcaactggctctatctctgggtgtctattctattccattgatctgtgtgtgtgtgtgtgtgtgtgtgtgtgtgtgtgtgtgtatacatatatgtgtatatacacatatgtgtgtatatatatacgtgtgtgtatacacatatatgtatatacacacatatgtgtatatacacatatatgtgtatgtatatacacacgtgtgtatacacacacgtgtgtatacacacacgtgtatacacacacgtgtatacacacacacacatatatatgtatatatacacacatatatatatatattttttgagacggagtctcgctctgttgcccaggctggagtgcagtggcgtggattggctcactgcaagctccgcctcctgggttcatgccattctcctgcctcagcctccctagtagctgggactacaggtgcccaccaccacacccggctaattttttgtatttttagtagagatggggtttcaccgtgttagccagggatggtctcaatctcctgaccttgtgatccacccaccttggcctcccaaagtgctgggattacaggcatgagccaccacgcctggccgatctatgtgtatatttttataccagtaccatactgtttgattactatattcttgtaatatattttgaagtcacatattgtgatgcctccagctttgttctttttgttcaggattgctttggctattcggtctgtttttcagttccatatgaattttaagattgcattttctaattctgtgaaaaatgacattggtactttgataaggattacattgaatctgtagattgctttgggcagtatggtcattttaacaatatgaattctgatccattagcatggcaattctatttttaatttttttttttttttgagacggagtctcgctcagtcacccaggctgggtgcagtggcacaatctcggctcactgcaaggtccacctcccaggttcatgccattctcctgcctcagcctcctgagtagctgggactacaggcgcctgccaccacgcctggctaatttttgtatttttagtagagacggggtttcaccgtgttggccaggatggtctggatctcttgacctcgtgatccgcctgcctcggcctcccacagtgctgggattacaggtgtgagccaacgtgctctgcctgtttttgtttttttgagacagtcttactgtgtagcccagtctggagtgcagcagagcaatctcggctcactgcaacctccacctcccaggttcaagctattctcctgcctcagcctctggagtagctgggattacaggcacacatcaccatgcgcagctaatttttgtatgtttattagagacagggtttcaccatgttgaccaagctggtctcaaactcctgacctcaagtggtccgcccacctcggcctcccgaagtgctgggattacaggtgtgagccaccttgcccagctgactgtaatggttttgaacatttttaatgcagctgctgttcaataaatatttgttgattgaataaaagaatcagcccttccctttctgagcacatgcagaatctgtgccttcttctggtttttaactaacacctagttttaagagagaaaattccgccctcccccataaatgtcatgttctgtctgtcatttggacatgacccaaaagcttaattttctaaaaagccaaagtgctgggattacaggcatgagccaccacgcctggccctgatgcttcctatctttcatcagatttagaacattttcagtcatttttttctcctttgggaactgtgagaaatatgttggattactttatttttattattattatttttttctttttgagatggagtctcactctgtcgcctaggctggagtgcagcggcgtgtctcggctcacagcaacctccgcctgccgggttcaagcaattgtcctgcctcagcctcctgaataactgggactacaggcgcccgccaccatgcctggctaattttttgtatttttaatagagacggggtttcaccatatcggccaggctggtctcaatctcctgacgtcgtgatctgccctcctcggcctcccaaaatgctgagattacaggcgtgagccaccgcgcctggcctggatatttttatttcatcccttttttaatctttaccttacttccattttttttttttaagctctttatccctctgtgttgcttttttaggtcgtttgcttggctcaagtgttgtgctcatgctggttggtgagaattgattgtgtgtatctcttcccagctccacattcactgatatcacattggtagcttgaaactggccatggtaggagtatttacacgatggaaaccagcaaatgctacaaatcagagctttgcttttttcctggagaaggggattatcagctcatctctacttagatctatcttctaatccactaattctctctcaactgtgtctaatcggcaggtgatgtctaaccaccatcaatagaggtttctgttcatttcattaactatatttgtaattttagaaggtaaacctggctctttttctactctattatttttcttattatcttgttcttttatgaaatttccatttcttctttacaacaataattttaaatatgtttgttttataacctttatatagaaattttattatctgaagtttttgaagctctactcttgctatttctgtgtctttctttattattattattatgctttaagttttagggtacatgtgcacaatgtgcaggttagttacatatgtatacatgtgccatgctggtgtgctgcacccattaactcgtcatttagcattaggtatatctcctaatgctatccctccccactctcccaaccccacaacagtccccagagtgtgatgttccccttcctgtgtccatgtgttctcattgctcaattcccatctatgagtgagaacatgcggtgtttggttttttgtccttgcaatagtttactgagaatgatgatttccaatttcatccatgtccctacaaaggacatgaactcatccttttttatggctgcatagtattccatggtgtatatgtgccacattttcttaatccagtctatcattgttggacatttgggttggttccaagtctttgctattgtgaatagtgccgcaataaacacacgtgtgcatgtgtctttatagcagcatgatttgtagtactttgggtatatacccagtaatgggatggctgggtcaaatggtatttctagttctagatccctgaggaatcaccacactgacttccacaatggttgaactagtttacagtcccaccaacagtgtaaaagtgttcctatttctccacatcctctccagcacctgttgtttcctgactttttaatgattgccattctaactggtgtgagatggtatctcatgtggttttgatttgcatttctctgatggccagtgatgatgagcattttttcatgtgttttttggctgcataaatgtcttcttttgagaagtgtctgctcatgtccttcacccactttttgacggggttgtttgtttttttcttgtaaatttgtttgagttcattgtagattctggatattagccctttgtcagatgagtaggttgtgaaaattttctcccattttgtaggttgcctgttcactctgatggtagtttcttttgctgtgcagaagctctttagtttaattagatcccatttgtcaattttggctttcgttgccattgcttttggtgttttagacatgaagttcttgcccatgcctatgtcctgaatggtaatgcctaggttttcttctagggtttttatggttttaggtctaacgtttaagtctttaatccatcttgaattaatttttgtataaggtgtaaggaagggatccagtttcagctttctacatatggctagccagttttcccagcaccatttattaaatagggaatcccttccccattgcttatttttctcaggtttgtcaaagatcagatagttgtagattatttctgtgtcttttgactcttgcttagagtggactgtttcatcatgtttcataattttcgattgtgaactcatctttgaagggttttgtgttaatatttcaatatggagttactaaatcttataagaagtataaataggaatctcaaatccatatgagggctttcccacaagtacagatattgagggagacgtttttcctcacttatccagaacttagactaggttaacaaacttttgcttccttggtttttttttttttttttttttttgagatagagtcttgctctgtcccccaggctggagtgcagtggcgcgatcggggctcactgcaacctcctctgcccagttcaagtggttcttctgcctcagcctcctgagtagctgggattacaggcatccacccccacgcctggctaatttttgtagttttagtagaaacagggtttcaccatgttggacaggctgatcttgaactcttgacctcaagtgatccacctgcctcggcctcccaaagtgcaagaattatagatgtgagccactgtggccagcccattgtttcttagagtagattttttttcttgtgaactttctcatggagggtgttgtcatcctttaagggtcccagcttcacaatgggggtctcaggatctccttcctacatcatggagatccaaagctgttaaacccacaccccttcgttggcaagattgccacccttgccccgacttcaacactcaccaggtctgtttttcctttttctctccttatcctttccccctctttctttttgtcttttgaaatttctttttttttgagatggtgtctctgttgcccatgctggagtgcagtggtgccatcttggctcactgcaaggtccgcctcccaggttcacaccattctcctgcctcagcctcccgagtagctgggactacaggtgcctgccaccacacctggctaatttttgtttatttttagtagagatggggtttcaccatgttagccaggatggtctcgatctcccgacctcgtgatccgcccgcctcggcctcccaaagtgctgggattacaagcatgaaccactgcgccaggcttgtcttttgaaatttcttatacttttttgtgagattagtcatgaattcaatagggcatttgttcattgtagtggcacgtgtttcagtgttttctaatctgtcatgttgctagaaatggaagtcccagccctaaaatatctttcatattcccaggctttaaggtttaaaaactgaaaatgaagtctatactgtgttggtgtttgttggtaaaaattcaggactctggtaatatttcagaaaccatcctcaaaggactgggggtttagttgtctttggttgttaaagactcaacaatgtttgtccccaaacagttaactttccttcctgacttctaggaatctgctcagcttggcttttacttaggctttcagagagttttctctaagcaagaatatttgtaattccatctcttggacagtgtatgtctcgtttcagatctagcctgtaaagtttcacttcatagatggtcagggctaaaaacgaccctagaagtcatctagtctaactccttatttgcacataaggaattgggatcagcccagatcacacagggtcacagaggggctttgcccaggcaacaacatgaagcctcctctatgtcccttccttaatgtggtttattagaaagtgtcaaaacctgtgtgatatggagtgactgagtacccagagagtacctgtcacaatgtctggcacacagtcaacatgccacaaatttaagttctcttgcctttggcttctcccatgtatcagtttcctgtggctaccaacacattaccacaaactcggtggcttgaaacaactgaaatttattctttcatggttctggaggtcagaagtttgcaatcaaggtgttgggagggccaaaactccctccagaagctctcgggaagcatctgttcctggcctcttctaccatctgcagtcatacctgactcatggctacatcattccagtctctgcctctgtcttcacattgctttctcctgtgtgtgtgtctttgcccgtctccctctgcccatgtctttttttgttttgttttgttttgttttgtcttttgttttgggatggagtcatgctctgtcaccaggctggagtgcagtggtgcattctcggctcactgtagtcttcgccttccaggttcaagcaattctcctgcctcagcctcccgagtaactgggattacaggcacgtgccaccatgcctggctaatttttttgtatttttagtagagacggggtttcaccatcttggccaggatggtcttgatctcctgacctcgtgatccaccctccttggcctcccaaagtgctggattacaggtgtcagccaccgtgcccggcctctacccatctcttataaggatacaggtgattgcatttaggcttacccaagtaatccaagagaaactcttcctctcaagatccctaactcaagcacatcttttgccatatgagataatatttacatgctccagggattaggaagtgaatatatctttggtgtgggggggatctttttctgcctatcaaacccccacataccaactgactatattccaaggtctcatttatattttccttccctggggacagtttatttactatttgcaaatgcattacttgaccttgagacctacttctctcttccaggcctggctatgcagaaaactgctcatcccaatactgcaaaggtagtagtctcatactgcctttgtaatacagattacgcaattactttgcactaggccatgtaggtccacgaggccctcacagtctattgtgagtagctgacagtagcatgagcactataagtactaaagcacagatgctgtgagagcctggagtatgcagtgacttggggactgggcttaggttccatgtcatattcttaccttcattctgcaaaaatattttgagcattcgtaatccactgtataagaatttagagataagagacacagcccatacccttaagtaaggagctcacagttgaatgggagatgaatatgagcaaaaagaatacaaaccaaaggtgatgagtgttttggtagagggatgcccaggtgccatggggcacagggaaggtgacacccatacaggctggggtgcgaaatgggagtagagctgttcagaaaggaccattcactcaccaggaccacacctggaggcagtggttcttgagctgcatcttgaagaaggaatggagatagttaaggcaataagggggaggagaacattccacatggagggagaaaggcacatgaaggcatggagaagtgacagggaaagggcatttcctcatcatctttcacctcatctccctcatcgtaattgtaaccgtccatccatccatccatccatccatccatccatccatccatccatccatctatccatccatccttcttcagtctccaagcgtctgctgagctctgatgcccatgccctgtggtgttaggttgagcactgtatgcatgcttattgtttaatttaatacaagtttgattcaggtaaaaacagacctagagcctggtgtggtggcccacacctgcattcccagctactggggaggctgatgggggaggattgcttgagcccaggtgttctgggctgcagagcactatgcatcaatatgggggcctcctggggagtgggggacaactgggttgcctgaggaggggtgaaccagccaagccagagatgggtcaagtcaaaactcctgtgctgctcagtagtgggattgcacttgtgaatagccgctgcactccagcctgggaaacatagccagaccctgtctctttataaaaaattaaaacaaaacacacaaaaccaccagcagacctagaattttcacccagaagttctgggacaggcataactgaagcattactttcctgaaactttcctccacagggaccttgacctcggacccttatgactttgccaactcatgggctctgagcagtggagaacagtggtgtgaacgggcatctcctcccagcagctcatgcaacatctcctctggggaaatgcagaaggtgggtgtggactggcctgggtgcacctggatggtgtgtgatttctggatctaaaagacagaaggactcagtctcatatccttccatctgggggaggaatggacttacgcagggccatttcctccaaaactaactgtggctagagtctaattctaatacatctcgagcctgaagctctaaaaatgagtctgggctaatgacttggtgtagtgtctcagtccatttgtgctgctataacaaatgcctgagactgggtaattttaaggaacataaattatcttttatagttctggaggctaggcagcccaaaatcaaggtaccagcattcagtgtcttgcaaggaccttcttgctgtgacctgaagccgggtcctgtggctcattcctgtaatcccagcactttgggaggccaaggtgggtggatcacgagatcaggagatcgaaaccatctgggcgcctgtagtcccagctactcgggagactgaggcaggagaatgacgtgaacccaggaggcggagcttagcactccagcctgggcgacagagtgagactctgtctcaaaaaaaaaaaaaaaaaaaaaattagctgggcatggtggcatgtgcctataatcccagctactcaggaggctgaggcaggagaattgcttgaacctgggaggtggaggtttcagtgaactgagatcgtgccactgcactccatcctgggtgacagagccagactctgtctcaattaaaaaaaaagaaaaaaagtacactgaagtgctctcatctgcctcttttatcagagcactaatccattcacgaaggcagagccctcaggacttcatcacttcctaaaaggcgccaccttttaatagcgtcactttggggtttaggttccaacacatggattttggaggacgtagacagttgaaccatagcaataagtaactatgcttttctgttttagactccagtgccctcttttgtccccaaatatctccatcatcacctgctaggtgtctgaaattttaccgatagaaaaaagccacttctttcttaagtggctgttgtaaactagaaataggagggaaagcctcctcttataccagctcagctggaaggaaaactactttatagttgcagacactgaagggagtctgagtgagaggctgtgcctgaagtgacatagcttggatgtcaggatggcttcctgaagctgctgtaacaaattatctcatactcaatggcttaaaacagtaggcatttattttctcccagttctggaggctggaggtccaaatttagtttccctgggctgagatcaaggtgttggctggctttgctccttccagaggctctaggtccttgcttccgtcatttttgggtggcagcggcattccctgtctttgggctcatgacttcaatttctgcctctgtggtcacatggccttctcctctcctgtgtgtgctaatgcctgccaaccctgacaaggctgggaggactgccccaccccttccacagagccctgttgccacttacaaggtagccttgtagcagctctgtctgcatcagagttgccattcatgatctcactcaccaggacctcacactggagagaaggggaggtggggaggggtggccagaccacactctgccttcacctgccacaggtaaagatggtctttgtgcctctctgtgtgtgggtgtttggggcaagaatgctttatgtggggcaagacctcactcaatgggtaattccctccccactgtggaacaggctgacttgggctgaggaggtaggtgcagctgtgaagctggactcctgtggggaacaggggttgttgcccttttgggattgtgctcagagactcatcatctgaggagcaaggttccttggtggtgctgtgagtcagcctccctgggcgggacgtttgtatgcaggaggtttactggggagctctcgagcagccttggttaggaagtgagagaagcagagttgggcagtgggagaagttgaactgcttgtgatagcactgatagagcttcagcggggcctcagctgatccttcaaggagctctggaaggtggagtggcccctgttggtcactggatgtgggctgccctgggtaaggaggtggaactcccttgggctgagggccattcctgaggaatgactcagtggtgagcccttggcagccaacactggacagctggtggatgagtcctcgggctctgaatgggcacctacgctgtgccccgacacctacgctgtgccccgacaccctctacaaagctgctctgcttgacagcaccaccttcctgcccttatccagagagcaaccacactgtcaaaaatgtcaactgaagaatcacaaggttcataaacttagagaggagagcttttcttattcagagttgtggcctgcaggctggccatcctgcaggctgggaagtgtagcctctggtagaaactgaaagcaggcacttcaagggagaaaggggtggaatagaaacttattccaaaagggttggctcagtgtacatatttaacaggttatgggaggagctatgaatattcataatgggaggaggcatttgcatatacagtaagcaaacatacatgttacatatgtcccacattcattttgggatggagacttaacatttaaatgcattaaaattagcctctataggtcaaaaggtgaaatggaggacacagaggcatcttgtgcacagcctctgtaaatcagccagaaccattccgtggttggtggtctcttaccaggaaggaatgctggtcagcacacacacacacacacacacacacacacacacacacacacacacacacacacactctcactcactcactaactagctgggcatggtggcatgcacgcacgcacacacactagctgggcatggtggcacacgcgcgtgcacacacacacacacagacaaacacatactagctgggcatggtggtgcaccagtaatcccagctaatgggagggctgaggtgggaagatggcttgaacctgggaggcagaagctgcagtgagttgagattgcatcactacactccagcctgggtgaaaatgtgagaccctgtctcaaaagaaaaaaaaaaacccgcaaaaagggaagggagtccctgctgggccagttctgtttaactcttaggaaagaaagtctaatggtggttagcgagggagagggtataaggaggggtgttcaacctcccatcctatcatggccaggaactcagttttaatatttctctggggtccctttggccaagggggagtccgtttagtcggtaggggggcttaggattttatttttttctgaaaacctacaaacatgcacaaagagggtggcccctgcctatacccaggaccatggtcatgatggacgcgacaggccacagttgcctttgtctgggcatgggccactctgcagagcgtgagtgcatgctgcagtcacccgagtgcgcagcccatcagcagagcagtagggcaggtgctctgtgattttgttcatcccatgagaaaacaagccataggaggttaagtagctgccccaagtcgccagctagcaaggtgcagagccaggactcatgccctgcctggctccctccctttcctgttcgggtcacattggttcaggctactcaagttatttctaccagtgggcccttgtgtttctcttggggagttgggctttgcaggttcttaaggtttctttaagttctaaaaccctttattagcctggtgcggtggctcatacctgtagacccagctgctcaggaggctgagtcaggaggatcacttgagcccaggaggtagaggctgcagtgagctacaattgcaccactgcactccagcctgggcaacagagtgagaccctgtctataaaacaaaaccaaaaccaaaactctttcattatgtgtttctgtggattgggctatagagacagtatataataggtcttaataaatattggatgggtggatgaatggaaattggtggtgtaatttatctagggattgtgacctccacaataatccagactcctttacttgtagaaatctgatttatctaagtaagtacataagtagagaaacccagccctctcctattccagaaacaaaataaaacacacccacatctccctcctcccacccaccccccatcacggtaacacgaggaagcttcgttttagctggttattaattcagtgagtcttcatcttcatggaacaatttgacctctgaccaaggagaatgtcagacccagaaaaatattctgagttgatgctaaatccagctgcctaaattgtgaacagacaatctccaccttataaacaagtacattccaaaagactttttcccttggactttggtggtgctaggtcctctggttagtccatcaaagtctgcatcacctggatcctagcccagtaccggcactaacaaaggcggactgagttctagcacgtgaggggagggtgctgtcttgtggaagggaggagtttcctcttctttgcagtcaaagttctaaatgcctgaaccatacccttgatagccccttgagtgtctctcaccctgggcctcggcgtgagcgtggtgctaagggtgtgggtttgagtcagctcacttactggctttgtgaatctgggcaagacaagtgcctttgcagagcctcagtttccacatttgtaaagcagaaatagtacctgctgggtcactgaaaaggtaagagagggataatatgtatagagtttagcccagtggggctcaactgttaagagccatgatgatgatgaggaggaggaggaggacgagaaggaggaggaggaggaggaggaggagttgttgttagctggctccccatattctcccactgtcccgtgttttccgctggagtgcccctgccttgagaatgggagccggcagaagcaggacaagcacacgccgggctttaagcacaagtttcaacacgcattctttttctccttccccctcgcaactataacccattccttttgggtagccgagcacagcttgaggttagaaggaaaacaaggtgcccagatatctccacacctccaagtgggtaagtgacaggaaccagccttccttctagagcggtttgtgaacccagatggatttcaaattgagtgcactcgaggtattgtgtaagagaggacagattttcggccgggcacggtggctcacgcctgtaatcccagcactttgggaggctgaggtgggtggatcacgaggtcaggagattgagaccatcctggctaacatggtgaaaccccgtctctactaaaaatacaaaaaattagccaggtgtggtggcaggtgcctgtagtcccagctactcgggaggctgaggcaggagaatggcatgaacctgggaggcagagcttgcagtgagccgagattgcactactgcactccagcctgggtgacacagcgagactccatctcaaacaaaaaaaaagaaaaaagaggacagattttcataatttctttctttttttcccaaacatacagttgtgctgttggcaggtgggtcaccctcggctgcccttcagtgttctccaggcagatgaaggggaggtggtgggtgcttcagtgggtgaggtggggtcagggtggctgtggaggtacctctaatactgaaacatggcttcaaagatttattatttttggtctcattttattttgcaaacatagcccagtgcagagtaagtacttgacaaatgttccctaccctcggaatacaaaggaatgatctcatttatccatactgagtgggaggtaaagacaggattctcaagtggagaacctgatcctgaggtcgggttgaggagggagactgggaggtttgtctcctggagacaaaggggagggagaatgcaagagaagccttgtttgcctcccggggcacctttctgaggctccagctgtaccctagctactcgctttgtctcctgggtgcattaaagtccttactaaccagtgtcctgggaacagctgaaaaaactgggtaccaggttcttcgtgttgggctgaggccacaaacacgtgagacctcccagaggcacaagctcctcccagctcagaactcccggtttcaggttgtttacctgagaagagaagactgctttgtcctcagccaatcagatagtgtttgcccacaaccgaggttttttcactggctcggaagcacaatgactcgtctcccaagaggtgattaatatggccttttgaattgttcacagcctgtgtagtcccgcagggcccccaggttcagaagtccggtctggtaaatgccgcatcatttatgagtgtctgctgttgtggctccaagggccgttcggggtggcagagtgttttgtgtgggagttcacactgaccttgaaactttccttgacagcctccagaatctacttccccaaccctctggtgctttctgtctttctagggcatagcaaggagtcagctcattctgagagccaggtcatattacttgttagttatacctagggaatgaatgtttccttgttatgccaacaaaacccaatgcctgtctccactgggactgataatggccttgtttgattgcatgcaaatttgcagttttttcagcttttcaaactgaaggcaagatggttggagtttggagccccaagctatgaacattcagataattgatgttcatctgcaggtaactatcacaaagtgtacctttgagaaagaaagacccttagatcactttaaaaaaattcgatcagactggggaaggccagcaaggactgaaccttacaaagggatcttggctttgtcctgtagtcctgtctgcaacaggaagcccaaggctccggggggctgggcttgggctgcatccagctcatagcatgcttttgctaattagaaaaaggcacccctttctctctctctctctcgctttttttttttttttagacagagtctcgctctgtcgcccaggctggagtgcagtagtgcgatcttggctcactgcaagctccgcctcccgggttcacgccattctcccgcctcagcctcccgagtagctgggactacatgcgcctgtcaccacgcccagttaattctttatattttttagtagagacgggttttcaccgtgttagccaggatggtctcgatctcctgatctcatgatctgcccgcctcggcctccgaaagtgttgggattacaggcgtgagccaccgcgcccggccaaaggcacccctttctcaagaaacttcaccaccacctgccgggaaacggccaagataaacataataactgaacatataatgtacatgtatatacctctacaatgtctaccatatgaacagtagtcacttggtgtgttgccactgtgtggactgtgtggcttgcatcatgacatgtgatggtgttggcctggcttcctcagggaggcacagtctctgtgaccatcatctcctcgctcaggatcacctcctcaaggcgatcagtctctattgagaaactgagtgcaccagttaccactctacctaccgtagagtggtgaatcattcagcagcagcagcaacctccgacagctgtctgaagtggaagaaatttcttttcatcaatgttaggaatcttaggctcataagaactcagagttggttgagaatctagcagatatctacttcaaccccctacctgccgcatgaatgctctccacaaactgtgtctgggtagacaggttatgctgtgaccttgactgtaagagttaaatcttggccaggcgcgggggctcagcctgtaatcccggcactttgggaggccgaggcgggcggatcacgaggtcaggaggtcgagaccatcctggctaacacagtgaagccccgtctctactaacaatacaaaaaaaaaaaaattagccgggcgtggtggcgggcgcctgtagtcccagctactcgggaggctgaagcaggagaatggcgtgaacccgggaggcgaagcttgcagtgagccgagatcgcaccactgcactccagcctgggcgacagggtgagactctgtctcaaaaaaaaaaaaaaaaaaaaaagagttaagtctttgagacacccttgctgggcgcttcccagccatcttgcagacctcagccctaggcagccctcctttactccctggtaaattccttctttcattgtatgcccgttcgaagctaaagccctgtccttccgtgtccctgaatactggagaagcaggtgctttgggtctggtttctcctggtctggctcaggagctcacatcaattgcagtcctgtcagtcactgaatagcctcagatttcctgttttccactggtctctgaatttggtgtttattaggtgaacacaagccttattttctttggccattcatgtcttcacattctctcgcgtcctccattatcttgtagaactctttccgcctcctctgaaacagcatgcagttcacctgtgattcctcttcctcccagaaaatcacctgtcctgcttgagctaacattttaaacagtcatgttgactttgaataatcacagcatgcctcctcagtagcccaaagaggcacagaaaatacccattccgttagagacaaagcagttcactcttcatgttctcattaaatattgctcaagccttttatttgcaaaggacctaccagccctttctgctatttctgctcatggtgactctgaaagggaaattcacaggcatggagggaggcaatgtaagcccagcggacttgggtctcactgtctaggcccacttctgccttccctccttcttctccttgcctcttccattcacttaattggcagttttggtctggaatggacttttcttggagactgggaagaattttgttacatttgtttgcttggtagcatagttgtgattcatagagtacagttgtcaggggagagcctggcccagagaaggtcagtagatctcaaggaaggacccttggaatgcaggatcccagagaagttagttgtcagatgatggccctggttttagagttggggtgcccacccactatgccccagtgacaccaagctcagagctggggtttgcaataagtacacacgtgtctttccccgttttgatgagaactgctctctcaagtctctctttcttgagtcattgataggctaaggaatgaggacttatttcaagtgctttagtgaggtccaagaatccagggggcagtccctggtttggcccaattctctgcatgtcctcgtgtaagttactttcctactctgcctctcagtcttccctctctgaggtaaacagagctccacggaaccccccatggataggcaccctttctttacagcagactggctcacctgagtgcaggatgggagaagggcagggagccaatggttgtggtgaaacagtggtgaccttggccactgttcccttgggggtctagcctcatggcagaggtcagtggctaccatggggttttgcagatttcccttgaacttggcctttaaaaatttttttttaaaattttactttaagttctgggatacatgtgctgaacgtgcaggtttgttacataggcatacatgtgccatggtagtttgctgcacctatcaacccatcatttaggttttaagccccacatgcattaggtgtttgtcctaatgctcgctctctccttgcccccgccccccgcgccccccctccccgcccacaggccgtggtgtgtgatgttcccctccctgtgtccatgtgttctcattggaacttggctttttatgttgctcatttgacaagcccttgaggagagttggataaggacctagcacccaagcattcaattcaaaggcctccctaacataatgttcccaaaatcctttaacgaactatttctcaggtgggttcctttcccttttccttttccctggtgagcaacagaatggacaagaatctgatggtgcccataagtgcatattcactgagatgtttcatatggcttgcgtgatacaacgtagactaagggacaagacacgtaagagaaattaaaccatgaaagactgtctggggttagtaaatgacaaatcgccaagtgaatggtaagtgatagcgcagcttaggggaattagctcctgtcacagagctgatgcttttttcttgctgggagcaggatgggtgagtgattcagaaagggctgctttccatccccagagcttggtaggccctagactgggaaccagggaatggtgccccgtccttgtccatccagccagcatgccctaatccctagaagctgctcagatgcctccaggagccccaaggagaaggtgaggagggtcccttagagaggtccatggccaagtctcctacttctcatgagcactggaccccagctatcttagagagaggaatgtcaagctctgcagaaaccatccatttggtggaaatctatcaacaggtttcaccaggtccttgtgagtcagaatcttggaatgcgggtgggaatcttgggccggccagaagttataaatagaatcagctaccctcccccacccatcattacagctgaccaatgagaaagtattccctgctgcagggtgaattcttgaacccactactttggagcagctcagactccaggcgcctccatacctaccaggggctgctgcagggcacccatcccagagctagaaagatcagggcttgtggaacaatattgcactctatgtattagactttcctttctttgttcactcagtcctaggaatgtccccctcccttctcctttgtcagctgcttgggagcaaacacaatagctaagcttcagatctctggctctgctttctctcctcctgctgcctgccactgagatgtgcttgctttccctcctcctcccctgcacccgcctgatgtctccagggaagatgcctggtcttctttaatgaactggaaatgtgattaagatgggccacaattgggcctgcacaccaacccaggcatggtgaggtcatggctggatgggctggggcagctgctctcccgcagctcctggcacggccgacaggagttgaaagaagacaggagtagctgatgcagggccttggagccagggagatgctggaagtgtgcaaattagctggcccttgttttgcatccctgccagaatggtttagcagagaactgaggagccagtaccgattgcaggcaaatgagaatagttataagcatttgatttcctggtgtcatctcatttgatttcattttgcagaaaccatctagggtaggtccaagtactgctgtctgtgtcagttaggagtaggttcagctgtgagtgacaggacttatacaatctaagtttatttatctctcatgtaaagaagtttggggtaggatgtccagggccatgcaagatctcatggtgttgggatccagggtccctctgtcttatttctctgttgtccccagtgggggcttctaccttgtgcaccaaaacgccggctcaagcttcaggcatcacaactacattcccgcagtagaaagagaagggactaaggaagaagcagtcccttattttgaggacacttggtggaggttgcacaagacccctctgcttatagcctactgggtattgcttagtcatatggctgcccccagctgcaagggaggctgagaaatggaatcttattcctagcagctctgtgccccgtgggggtgggaaattgaaaactgaggattctgtgactaagaaggggagaatagctcctggacaactttcaacctcttccacttttcccctctttcacaggtagggaaatgaggatgcagagaggcaagataattttccttttcttttttgttttttgcgacggagtctcgctctcttgcccaggctggagtgccgtggtgcaatcttggctcactgcaacctctgcctcccaggctcaagtgatcctcccacctcagcctctctagtagctgagactacaggcacgtgccaccacgcctggctaattttggatatttttgtagagataaggttttgccatattgctggtctcaaactcctggactcaagtgatctgcccactttggcctccaaaagtgctgggatcaggccggttgcggtggctcacgcctgtaatcccagtactttgggaggccgaggtgggtggatcatgaggtcagaagtttgagactacccttccaacatggcaaaaccccatctctactaaaaatacaagagtgctgggattacaggtgtgagccactgcacttggccaagatcattttcttaaagtcacacgctttgaaagtgatgggttgcgagaggcagaggttgcattgagctgagatcacgccattgcactccagcctgggcaacaagagcgagacttcatctaaaaaaagaaagtgatgggttgagattctagcccaaccatgcttctaaaacctgagctacagccactgtatgaccctgtcttctaatctgattgctaggaaacaggagtgggagggcaggatggaaaactgtaatttgtggtttggaatggactcaggcactcagggtttgcaccccatcactagtgttaaaagaaaaacctgagacaaattaaatttaacagggtttacttgagcaaagaatgatgcatgaaccaggcagcccccgaatcagaacaggctcagagagactctggcctgcctcatggtcaaagaagatttatggacagaaaaagacaagtgacttacagaaactggaagtgaggtagagaaacagttggattggctacagcgcaacatttgccttattagaacgtagtttgaacagtgggctgccccaagaggaggttacagtgtgtttacatctccagttaggttacagttcattatgtagggagaaacctttaggcctaacttaaaatatgtaaggaggcagctttcggctaaacttaaaatttaacgattgtatagcagttctccaactgtttaatcgcagggcccctgtatactcttaaaaaataatgaaggactttaaagagattttgtttatgtgggtcataactcttgatacttaccatattagatattaaaacaaatttaaaacattttttgattcattttaaaataacaagctcatcatatttaatgtaaagaacatatttttaggccaggcgcggtggctcacgcctgcaatcccagcactttgggaggcctaggcgggcagatcatgaggtcaggagttcgagaccagcctgaccaacatggtggaacccagtctctactaaaaatacaaaaattagccgggcgtggtggtgtgcacctgtaatatcagctactcaggaggctgaggcaagagaattgcttgaaccctagaggcagaggttgcagtgagccgagattgtgccactgcactccagcctgggcgacagagcgagactgcgtttcaaaaaaaaaaacaccatatttttaaataaaaagaacgataaattccaagccaaaaaataatttaggggaaaaatgacactgttttacagttttgcaaatctccttgctgtctggcttcagatacatcatctggactctcatatctgcgtctgcatttaaatctgttgggatatctcatgtctcatagcctcggaaaactgcactgcactctggtgaaagagtgagagaaaaaattgcaaatagcatcttagtattattataaaaacagttttgacctcgtgcactgctgaaaggatcttgggagtcctaggcgatccctggacctcaccttaagaaccactgacttaggccaggtgccgtggctcactcctgtaatcccagagctttgggaggcaaaggcgggtggatcacgaggtcaggagatcgaggccatcctggccaacatggtgaaactccgtctgtactaaaaatacaaaaattagctgggcatggttgcgcgtacctgtaatcccagctacttgggaggctgaggcaggagaatcccttgaaccaggaagtcggaggttgcagtgagctgagatcgtgccactatactccagcctggtgacagagcgagactctgtctcaaaacaaaacaaaacaaaacaaaaaacaccactggcctagtaaattctttacccactccatgcttcagtttctaaatctgaaaggctgtctgtatcagcctttgtctgaggagagctgtgttctttggaggtgtcttcaggcctctgaagggcccatttgtggcatgggtgatgagatggtctctgaaagtactttaggtgggctaggagagaggtcagctgtggagaaggaggtgaggtttgcctcagcctttcctgaacgcaggaggatgggcggagaatctgtggagggccttctgggcagggagctctatgagccaatagccccccgtgactgagtggatggtaagagccagagatgcctggcctaggcatcccgcctggctcctgctgcccaccccacccactggtgtgcatgattgtgccaattcccacaggaaaagagggcacacggagccgtttctaagccatggagggcataacctagggggagtgagagaaaggggtctatgagaacttcgcgcaggcaggaacacacgcggaagggtctgagggcgtgggaacaggcggaaagtagacacctactcaaggagagcttggttgggtttggattatgatggggccgtaactacctgctaagagaagctgaggccacagacttggaacagcctctcagcgggcagctgtgcctttcctggggaatctgtcggcaagactgggctggagtcttagtgctcggctcagccgtggtgactctgtttcttctcctgcctgagcttatgccattggcttcacctgacatggcctccctcctgccctgcagcctaagtcctatgttgcatccagggccctgtgcagactgccttctgttaggcagccttccctgatgtctcagctgcaggtttcttgctgctgccattggctgcaccattgggaagacacctctaggtgagaaccaagtcttcaggctgttaggcaaacatccccatggaaacacccggttcaggtagattgaatgccagttaagagctggagggcatgaaaggcatgacttactcctgtctgcgttcatcactgttaggtttgattcagcatatccttattccctgccatgagtgccctgggaatacagctcctgtctttgaaaagcttgcagagaaatggaggagacggccacagaaatggaccatttcagtacaagaatagaggcccccagagggctgtgagaacacctaactcggcagagtggggagaaggacctgtcagagaagccttcctggaaaaggaggctcttgatctgaagtgtggggtgggagttagtgggggccaaagaagggggaaatgcaggagggcagatgggatgggtagagggcagatttccctgctgggctttatgagggggatctgtttgctttctattgcattccttgagcctggcacagtgtgtgaggtggggagcagggagggtgaggctggagagccaggctggggtcagatcatgaaggctgagcttcctggctttgctgtgtcctaatgagctagagctttgccctgtcagccagggtgggacatacatagttagacttgcattttatatgggcttggacaccctgctggagacccagaggccacactgctaatgcttgttgagtgaatgttttggtcactacctgcatcccagtgtctctgccacgagcctgagagtacaagacgccaactcctctttggacctatttttttttttttttcgagacagagtctcactctgtcgcccaggctagagtgcagtggtgcgatctcagctcactgcaagcgttgcctcccggcttcatgccattctcctgcctcagcctcccgaatagctgggactacaggtgcccgccaccatgcccggctaattttttttttgtatttttagtagagatggggtttcaccgtgttagccaggatggtcttgatctcctgacctcttgatccgcccgccttggcctccaaaagtgctgggattacaggtgtgagccaccgcgcctggcccttggacctgtttctgtgtcctgtctcaggacctggtctggtctggcagggctacctgtggcagaacagggaagctgggagcagcagagatagccacctaaacatgccatgtggtatggctgcaggtgagtgcggatccagctgcaagtcctgcctggctctcagctgtgcccactcaggtggaccaagttcaggccaagcctgaccagaggaagactgaaggacaaaatgggaggacagactttatcttttgtttctgctaagaaagaaaccctaggcagatttcagaagtttgtacagtggaggccaaaggaattgttctaagaagggaggtggctgtttctgcagaaatccactcccatcctgcaggcaaatcatcagaaacacccttcttgctaaggctttctataagccatttaatgcctccagggacctcccaggaaatgtgctggagtactgttcccattatccctctgagtgggaaaagagtgatttggaaatgctggagatgggccatgctgggctctgtctggtcacggctctgagaggggagggtgcctggattcctgggtctcttctttcccttggctggtactgtgtcctgctggtgagaatccctggttccttgtccctgtgcctgcaggaatcagtcctgtggtgcagggactgctccgagccactctgctacagcccaggtgatggcagcagtcatagcaatgaccaggaaaaccccagggagtgcatttttgaggttttctctagtttcaaattgtgggtggggaaaaggctagacaatagcctgagcacatgaccctctctgggacaccctcatctgcactctgagttcagtgacgtaattctctgaatgacatttttgatggggtaggcagcatggcagaatggagggaaagacacaggcctcagtctccttccctgagccccaacttggcagtgaggatgggaagttctgcctattgcaaagaagagaggttccctccctgctactagaaactcactttgttctggagaagtgtgaacttcccaaatgaaagatgaatacaagcagcccctctgttccctaaggagcacgcaagatactaggaagtgataatgctcggcaaccattcatctcagtatagcccagggtgatggagataaggggaaaaggagaaaggtgtccttctgtcctgctggggacctgctcactattctagagggtaagcctagtggccggagggatctctctggaggccaggagatgatgaagatgatgatgatgatgataggggtcatcatttattaaggtaagtcttccgcgtgcatattccattcagtcttcactagtcttgtcccagaggaactgttactattctcccctgttttgcagaggaggggttgagtaaacagcttagctcacacgctagcatggggaagacgctgggctgaatctggggctgtggaagtcatgatgaggccaaggcaggcctgcccacctctgtcagtctccctcgtcattgctttcagaagcctcaggttccccttgtgtaaaatgctcagggtgaccaatggaaggctgcatgtaaccacctgagacctaagtggtcccgggacccacaacagtggcctgcattcatggctggcctacgtggtgctggcattgtggcatcttcacgtggccccaacaggccgtctgggactggtcatttccacaggtcattctcactctgggacactcttctctgaccaggtgagctgatttgcctaagtccccaccgccagtaagtggcagagctgggctttaaggcctaggcttgtcatagccatgccgtgggtgcccgcccggcagaaggggattgggcaaggcagggccgtggaggggctgctgttggccccgagacgcagagcagctgatggctgtccccatgagcctacctgctgcacttctgcagttgagcagcccatgccggtgggtgctttcctaaggtgcagagagaacccggcttgttttttgagacagggtctcgctctgtcacccaggctgaagtgcagtggcacaatctcagctcactttaacctccacccctgccccgccgttcaagcaattctcttgccccagcctcccgagtagctgggattacaagcatgcgccaccacgccccactaagttttatattttcagtagagatggggtctcaccatattggccaggctggtttcaaattcctgatctcaagtgatccgcccgacttggcctcccaaagtgctgggattacaagtgtgggcatcttttccaggcctgcctgcttggctttgatggtgaagtgggtggaggcctagcaagcggcagggccctagcaccaggcattggggctagaacactgatttccttaggaccaacgtccctgtgctgccggactggatttcgagaacggtgagcagatggggtcaggtttctattcctgtgggctttctgtggcgccgcaaaacaggaggcccacaggcctggcccctggccccgactgtagatttatacaggcttgctctggagacccttggtacaattcaagctgattgaatttccctctcctcaaaacgggtcgtttctttcctcttttttgctgtcccctttcccaaataccaactggctccagtttacccttcaggacccagtccttccattgagatattcttgcacttttttctttttagctgaagatcataagttttttcatgaacttgcagctttgtcagtcagagagtattgcattatgcatccaagaagttatgcaagaaagaaatcatggggatcatatatatccatgactctgtgttgtgccaaagctaagaaagacatcatggattctaagacacaccattgttctgtgtatcgctcagaaacaaaagcctaccaattcaaatatgatagccatcctaagacgcaatccaacttcagagatgttacactgtgggaaaaaggtgtatttagagtcattaacatacagaatggagagatgtttctaggtaaaacgtagggtcgttgatactcgtgagtgagcagaagtaggaaatgatgacaattccaaagctgcctgtgttatcaggttgagggcatcagcaaagtggtagaaccaagaatactcgtgcttgctgcagtgtgtctgggacattccacagaatcagcgcatgctgttgctgatgggaactggtcccgtctggccccagcaatcacctggggagtgtttaaaaaaaaaaaaatcttgctgatccccatcccaaactactgcattcagatctcctagggtgagacccagaaatctctataaagccccttgtcccatccccctcattcatagtgaagaagatcaaggtcagggaggggagctgaacaggtcagtgcagaaccgatgctgacagcattcctggactctgcagccacccaggccaactccagggcgcatgctctttgtgcttctctccatcctctgtccgttcctaggacactgcccaccatggcaatccagggccttggactctgcatttccaggactcagtctaggatgtaaccttagccttggtctacttcacattgcacgggtccagcatcttttccttggtcgatgggctggtgcattgaacacatgcatgtgcttggtgccagcctgtcccaggtgctgagggagctgccttggtttccctagcagggctaagtctcagtgccacactcagggagacactaacggagcataccgctgaggcggcccctcttcctgcagggcctgtgggagcagtgccagcttctgaagagcacctcggtgtttgcccgctgccaccctctggtggaccccgagccttttgtggccctgtgtgagaagactttgtgtgagtgtgctggggggctggagtgcgcctgccctgccctcctggagtacgcccggacctgtgcccaggagggaatggtgctgtacggctggaccgaccacagcgcgtgcagtaagtcggccccctgccccgtcctgccctgccggggatgaacggtctgtcctgggtggtgtcccttagggtgcttcggggctgtgtcacgtatgtgcggctttaccacacccagccagccagtgactacaaagccacgtgtcccggacccatttcctgaatggctcctgccctctgtcaaacgggcttcccaaagccccgtgtcctgcccctgcctccgtcccgcccccacgcctcccctggcgccccctgacttccctcaggaaatccgacccctgcactcacacagtgttctctgcttcccaccaagatcttggcagttgcggttttggtttttgtcttcaccgcctgcccgcccgaattgatgaggagcaggacgctgacctggctgtccgtgtgtggtgatctttgagagagcagaaagcattcattaagttcttctcttttattaaatctctctcctccaggctaatgaccgctatccctcctgccttactcgtgctgtgtgtttcatcttccagtctcaatgggtgcctagttatggtcactgtccccaaattatcaggattaagtggggacttctgaggtcaccttgcaagaagtctcctctttccccagcccttccagtgattaaaagccatgcagacggataagcagtctgtgatggttccacagatgagctgagccggccacatctttacactgcacacgtgtgtctcagtgtgtggcaaatagctgctgaattcaaactttctgcctgtggtgggggtgtgaggaaggaggatgctagcagctggtttcttctctgtaaagccgagtggctgtttttttttttttttttttttttaggtctgtgaatgtagggtaggggagataacctgatgtatcttggagaagggttaaggggcaatagtttggtgtcagaaagcccagaaaagagtgcttatgtgtttcggtctttcagtcagcctgaatgtcgctcagctacagggtagagagaggaaggaggagagcctgtccttgcagtgaggagctggttccattgggaagaacagagagtgcttaggtgatatctgtgaaggcagccttgtggcagagtggaaataaatatggaatgagtgtcaccatgcaggcaaatgtgccctgtgctgggtggggcatttgattggggccaatttcatggggaaaaggaggagggatgggatggagggcaccatggctccttgctttgtcgtaggactccacttgttttgagcctagaggagtttggtgtcactctgaaagggttttaggtgaaggggaggaaagaatgccaagttatacatggagagcaggcgaccaaggggaagggtgggggtcctgggtgcccccgatgggtcttggtaagggcctcacaagatggaagatgttcatctaagggaggggtggcctcaggggggcacgtggctcactgggggtgagaaggacctggaagcctgaagacagaggggagcagtcagagtgggcacgagaggctcaggctgtggcatggctggtgagatgatgcaccggtgggacctgccctgggtagacccctttgatgttccttttcaggcccagtgtgccctgctggtatggagtataggcagtgtgtgtccccttgcgccaggacctgccagagcctgcacatcaatgaaatgtgtcaggagcgatgcgtggatggctgcagctgccctggtaatgaacttcccactttatttacagatcagagaccttgccagcacccttggctttgggaagtgagatgaaggccacttgtgtttgctccccgttgctgaaatcagaagccttttattaagtttttaaatgtctttgtccagcgtgatcaggattgagctggtctttatttttaatgtacgttgtcctgttgtactgtatccatgaacgcacttgtgttgagggaaattggagggtggcctgggccccaacagtaactttgtttggggaactcgtggcccatctgagctgagctgttttctcaattaggtgtgtcagggaaccgatctgggaaaaagatctcctgggtttgtcatgtgagctcagctgaaaaagggctctgcactagaaagtcttttcaggggaggcttggtgggctttggggaaaacccctgtttaattactgagagcaaggctgggtgcggtggctcatgcctgtaatcccagcacttttggaagccgagatgggcggatcacttgagttcaggagtttgagaccagcctggccaacctggtgaaatcccgtctccactaaaaatacaaaaattagctgggggtggtggtgcacacctataatcccagctacttgggaaactgaggcaggagaatcacttgaacccaggcggcggaagttgcagtgaaccgagatcgcaccactgcactccatcctgggtgacagaacgagactcggtctcaaaaaaaaaaaaaagttattgagagtgagtcctgtgtgtttcaactcatgacttctctactggaagaacttgaacaaaactcttgactcccttcatctgtggaatggtaatgagtagtcttctccctctcacgttgcattaatgtgtaagggaagcagcacacacattcttgagcttcctggaagaagccctaagcccagacttgtgcctcccctactggatgacctggaacaaaattcttttgctcatgtcttcatctgtagtaatggagatgaggaatttcccttccttatattgcattatgtgaaagataaacaccacagaacaagttctttgagcttcctggaagaaacccaaccattgtccctggggattctatagttgtgggatgagtgacgcaatgacaatgttgaggcctttgtcttgatgcccttgaccccagagggacagctcctggatgaaggcctctgcgtggagagcaccgagtgtccctgcgtgcattccggaaagcgctaccctcccggcacctccctctctcgagactgcaacacctggtaatgggggctgcgcagcgtgctctgggagacctgcctgggggactggggagggaagctgggtcagcaggggtggtggcaggtggaaaagaacctggaccgtgccaagaaagaagagactgagttggaggctactggtgggggctagggacaggtgtggcaggcaatgatggggagcaaagagtatattacagataaataagccttgaagatggggaggtcaggaagggcaggatccttcacgtgcagacatcatctctagctgtccctccaaactatgctttcataaatgatcctttccccctggaggagggctgtatcactaagcagtacgtaggtccttctctccttgaaatctctcatctgctaggtggtaggaagttgcagtggccagtggaaactcacaccagtctgccctcccttggtccctgcagtaggccaggcccagcctggcttctgtcatctcaagaagcacccctggatgtcacctctggctggctttgccagtctcctgcacagcagggacaactcgtttggtccccaggcctcctccctttgctatcttagcagccttctgtgtgcactgagcccccaggttctcagtcggccaccgcccaccacacttctgggctgggagctacccatttccatatcgctctcttgctctctgccactcactgtgtgtggggtaggaatttgacttcttggtatctgagtagattttcagggggatcaggtagtttttttttctttcttctttttctctgttggggtttcttcccctgggtaatatctctaagattcctttgtggccaaagctctgtcctgtacaattttaaccctatgaagattctgctagcaccagctcttttcttttcccacatcccttcgtttggggactgtgataactaccatgagctctaaatccatttgcatacccttgtgtttgcagaaccaccaatgacctgtgctttttccctccaacagcatttgccgaaacagccagtggatctgcagcaatgaagaatgtccaggtaggcgacctgccgctcattctcttcctccttccctgaatcggggaggcgtctcctcctctcttaccagacagggagggccacaactcaaggcagcgagaagttgccctctctgcacaggttggctgcaaccacgtgaccccagctctggtttcaggtaccagctatgctaacccattcacaggccagaggtgggagccctgcaacagctgaaagcggagaatgcacctgcgttcagatgttattgtctgtccttattacctgtttgctgaaaggattaaggttgatgagctgtaaggcctgtatggtcatgattgactaaacaaagaggatacacattctttggaaaattaagaggtagaagggcctggtaattctttaggcttgaagggacagttctaatggaactttccagaatgcctaatatgaagaccatggcgtggtccaagagctcggaaaaccaggtcaccaaatgattcctcccatcctgtccctgccctggaaaatctgcttaggaaaaattattgagcaatctctgccatttgctttctcctctgtttggccccaactctattctatttactgcaaaccttgcccattcaaagctcccttctgccccaccttccaatgacctcagaccttgccctctgtgctcactcacgtggtgttttctatgtgctggccactgtgctaaacactttccggttacaacctgtgaggcaggtgcaatttattctcattttaggaaagcagaaacagacctagagaggttaaatgacttgcccaaagtcacacagctgctacgaggcagagccagggcttgaactcacaactgcctgacttcttactttttcccttccctttcttctccttcccagtactaacctttggtggcctgaagtgggttgagcttggatacctgggactgtatttagggtctgtgagttaaagactttaggatgactcaggacctcatccagtgtcctctacactgggaaaattctggaactagatgtgggctagatcagttagtcttgcaaagagatggtcacccagccaggttatcttttgtgtaacccttaaagaaggcacgaaggagaaaagattgctcttgaaagggatatctgtgctccactgaacgtaattacaccatgtccaagactaaaggagctctttggaagacatatgagttgctgcaattaacctgtgaaaacacttttaacatttaaataataagcactcattgtatgagatctgtgagccacagtggatggaattaggaattcagtttattgtgtgtgtttttttagacgtttgtaaccaccagattaggaagttttaacaagtacttactatagggtgaatcttccgtccatcatccttccaactgtccattcatccaagtactatttgaacaccaactatgtacatgatggactgttttctggggcagacaatacagtcctctggtcttcaattcaaaatctagaagatgactttgctgaggatgtaagacattctcttgatgtcttgatgaaaagataaacagtgtcaattctgtctactaagtggtttgatattttgccaacaaaaccactacgctcttctctgcattctcaaagccctggctctgaccatctttttctagtttgggagttttgttgatcatcgcctcccggtccatttgcacccacgcacacaagcatatttccacaccctgccatgactcagcaggcagtggggctgtctgatgctcccagtgtgatgactgcagatagagcttctgatgggaagaataggcggtatggttctggaggggatatgcttggctctgcttgtaaagtgaggagcaggccggagcttctctgcagcccctggaggaggattagaatgacatcagccatgtgagaaatggtaggagccaacccgggaggcagttttaggtggcatcaagggctctgggctctgcagctggacagacctgcccgtattcagatccctgttcagtttctttgggaacttggatgagttgaacttctctatgcttcagtttcctcatctgtaaactggggataataatgagcacttcataggagcaatcaatgagatggtttccatggagcacttggaaatgtatcttatgccaggcatggtggctcacgcctgtaatcccagctttttgggaggctcagtgggcagagcgcttgagcccaggggttggagaccagcctgggcaacatggtgaaaccccatggctacaaaaaatacaaacattagccaggcatagtggtgtgtgcctgtagtcccaggtacttgggaggctgagatggggggatcgcttgagcctgggagattaaggctgcagtgagctgtgatggcatcactgcactccagcctgctgggtgacagagatcctatcacacacacatacacacacacacacacacacacacacacacacgcaaaaaaaaaaaaaaaaggaagaaaaagaaaaaaaaatgcatcttgggccaggcgcggcagctcatgcctgtaatcccagcactttgggaggccaaggcaggtggatcatttgaggtcaggagtttgagaccaacctggccaatggtgaaaccctgtctatactaaaaacaaaaacaaaaacaaaaaacccacagaaattagctgggcatggtggcacatgcctgtaatctcagctactcgggaagctgaggcaggagaattgtgagagccccggagatagagtcttcagtgagccgagatggcgccactgcactccacgccgggcaacagagcgagactgtctcaggaaaaaaaaaaagaaatgcatcttgcacatttggtagagattatgttgcaggctttggtgacaatttgcatctggtggaagtctgagttgctttgctaaaggcctgtgggttgggcatttctgcagggaaggctttgggaggtagagggttgtggggctggggaaacaaatggtctggagcagggcagccgcgtccagggctcactactgcaaaccaaagggtttgtttagaagaggtaatgtgcttccattaggtgagaggttccgttttgttttttttcatgaggcaggatctttattcacatagaaatggatctgctttaacttctggatttttttttttttttttttttgagacagagtttcactcagtcgcccaggctggggtgcagtggcgtgatctcagctcactgcaacctctgcctcctgggttcaagcaattctcctgcctcagcctcccgagtagctgggattacaggcacctgccaccacacccggctaattttttgtatttttagtagagacggggtttcaccatgttggccaggctggtctcgaactcctgaccttgggtgctccgcctgtctcagcctcccaaagtgctgggattataggcatgagccatgacggcccggcctggatgctcttttttttttaaatgcagttttaggaatcacctgcctttcattcattccccaaacttccagtgcccatctccatctagtggtgggcccgctgttcgtcaggagctgcctgttgctgactgatggggaatatcctagtgtcccatcctgggtggaggatgggtgagcgtgttcgcatggcccatagttctggctgacgttctagctcccgtggctaacggctacctggcagctcacccacccattttcctgtgtttgtggctctgttgctcagttgtaccgaggagataagctcatataatatttagacttctgatttgcgagaaacttgggaacacaagtcagtgaaggtcagagaaggaaatcagatgagacgattagatgctggccctgaaagttttcctttcgaatatttgcacatttctcgttgacccttcttttcctgggtattgttaaagaagacagaagtccattttcttgcttagataagagtgctctgagaaaacacagaaaggcagggggaagaattcccacccatttttactgccctggggtcaagacatttgacacaaatgaccatattactgtgtttgtagaatgatgataatttctgaaaaatggtcagttcaaaaaggctttcctgagacctcactggacttgaaattacagcacatccagaatgggctgggacgatcctggcccctatcttgtggcctgctctgtcctccacgaacagtcactcctcactcccgctcttctagagggggcagcggagaaggtgggccatgctgatgggagtgatctggggcctttccactttctcctaatttcctctgggctggatgtgccctcctgacccatgctgtcctggaagggatccactgtcctggggaccaggcagagggatgtgtacatccctgaggcacctcatccttaatcctgccttcatacacatctcaaaggcaggcccacacctgggtccagtactgcacagtctagcctggcccctggctgggcctgtcagggcacatgcgagcatgaagtgccagacagtgagggcctgtggagcttgtccttgacaagctagaatctctctgtgccttttggggaccccttggctgtgtgacagggctagcattagcccctggagctgggcccacataggatggtctgtaggaccctcttacatttgtctttccaacgttggtctagcatctgttccccaaagggggaacttcaggtggaggctgaggtagcgctgtagacagccaagcttccgctgtttggagggtctcaggggaagccctgtgcactctatgtgtcctcatctttgctttgatccttagagaaaggaactcacacatgcaccgtagagtgactgggtgggaaaagtcttcctccttcaccaaatggcaatggtgtctctctctatatatatttctttttctgtagagtagatagcaaagatgagagcaggtggaggaaatatatagggcaggttgggaagggatccagatgcccttttcagctttgatgggtccatgtttggccctgaagatgggattgcctcaagccaggcaggttgatggagaatcactggagacattggcagaggcctccccctgccaggacaccttccaggatgtgtgatctcagtttggaggtgcattgggccacaagtatggggcctaggctggggcgtgggggagatggtgtgggaattagggtggggacaagctgagggctttgggttgcagggtgatgaaggggagtcctagtccccacccacagatgtgtcagcctgggctgggaagctggcgctgccgaggtcagcactgcctgggtggtggtgagatcatgggcagatggcctcctggttccccattggccctggctggagtcacagcgtgggcttgcccctctgaggacgcagaaagcaatggccttagagttgcccctctgctggtgaggaggatggagtccccattttcactgctgagctccaagactgtcctgcctcaccctcccacctcatcctgcctctgggctgcctactctgccccctggcctccagggactctccaggggtgacactgtttcccagagcctctccacactcaggttcagagaaccctgtgctattgggcagcctccccctggccaggcattccgctggcaccagtctgaggctggtgtggccctgatgccagcaggtagcgtgggacatggcagtgagctgtgagggaggaggggaggctgcagggagcctggaagcaggagcgtgggttcctgcgtggttccaccactgactgagtgtggctctgtcaccttccttagttgccccatctgtaaaatgaggccttgacctgaatgacccagctctgacatcttgcagttttaggagcaggaaccgaattttctcgtagaacttgtttttagactggtttgggcaaaggacgtccatgcagttttggggaagggcaccctgcttgcatatgcattccaccttggccaccccaggggaagtgccctcacctcccattcttctcccttcctctgtgtctctccaggggagtgccttgtcacaggtcaatcacacttcaagagctttgacaacagatacttcaccttcagtgggatctgccagtacctgctggcccgggattgccaggaccactccttctccattgtcattgagactgtccaggtgagctttgccagcccggctgctggtcgggtggtagcccaaggtgctgcatagctgctaggctgaatgggcagtccctggaaggcgtggggcattgctttctgtgcatgagggaggtctcttccagacttcagttagctcctcattcatccagaaacccagcccatcccctctctccctagatgctggcggaaggcatcctgccctgacaataatgcctcctcagggctggctcagctccccacccagtggacgcatcctgcttgggtctagcctgttgcccccataactaaccctctgatgtttggagctggggatggctggggtgggggcaaagagggctggtcttctcttctgaactctgtggtacatgtgtggcttcctttctgtagggatggaagcaaagatgaggacgaagagaatgcacagggctttccttgaggatcaaagtctttgattctctttggaacagtaggtccaaggaacacgatgaagcagaggcccatggttctttataagagactgggccaggctgggagaaggcgtgtgcaaggatgcacttagcaagccttcttgctgcacaactctagggggccccattcacatggagtattctgggagaatggagttgtaggttatgagaaggccagaggctctcgggttgaggcctttctctgattaagagggtcctgggctggggagctggataggcagggggtgcagcaaagtcaccctgtgttccctcttggcagtgtgctgatgaccgcgacgctgtgtgcacccgctccgtcaccgtccggctgcctggcctgcacaacagccttgtgaaactgaagcatggggcaggagttgccatggatggccaggacgtccagctccccctcctgaaaggtatgcttcgtcctgctccatcaggcctggggctggcacagcccatcccttagcaccctccttctcaaccctggccactgtccttaaggacctgcatgcctcttccatgggaatgtgatggagagttatttttggagggcagggtggggtgcttggcatgcatccctccaagaaaggaaggcttcctggaggaggaagactagagaaggaagcctatagatgaagaggttgctctagacctgggacagagtgtagatgggaaaagggaaccgagaggatttttatttggcttgaaccaaaggggcgagttgagtcttgggcaggtggttctggtttgctctggggtgggacaggggcagaggctgatgctgagagatcgggggtggctggtgatgtcacaccagaggatgccacttggggcgaggccaggtgaccctctggcctgtctagaggtagcaaaaaacctacctgtccagtatcttcacctgggttgcactgtgccggtcaaagcaaacctgcttttgcatggtaaagctcccaaacttcacactcaaagtggctctcagactcttccttcttctccacaactgctggccactttgtcgcccattatcctagcattgcacacagcggatgaacttgggctagtgggtacccagcacgtccatgggtgttatgctgtgtgtctccttataagatatgtttgttcccccagggcaaggggtgtgctcctatctgtcgccaccttcccacagaagcaacaattgctgtattcagtgtcgtacacagcatcgctcagacatgaggtggtgtgcagtggcagagtgtcccaggcacattcagatgtcgtggtgtcaatgctaaagagatccccctctgctccagggcacctgcctacagcccaggatgcaggagcctctgcctccctcctgtggcagtagggggaatggcaggtcatagcggggggtgcagaggcttcttcctgggggaccctatttgcgctctgtccaccttgatcacccttcctcctgacacccccttaaacctcatggccaccccatctgcccctaagtcattgctcttcagtgctaccatccttttgagacaccccatttcctcccaaatacatctgcctgccaccaccctgtcctctccccacctctgcctgagtcctgtcctgctgggttccaggtgacctccgcatccagcatacagtgacggcctccgtgcgcctcagctacggggaggacctgcagatggactgggatggccgcgggaggctgctggtgaaggtaggtgccctcacggggtactggctccctgcggcccgacccttacaaagtaccccttgtgctctgggtagaatggctttgtgtggtgggagaagaattcctttctcctcatggcctacacccccagagcgagaaacaggcctctcttgtttatgaggctggtgtttgttttctggatgccccttcttggccctggggattcttcctgctgggctctgctatcccaagggcctctagactggggtgggctcttgtggggctggggaaggagcaggtttgctgtccaatctcccggctgaaacaaggcccgggagcaggggtgtctccctgggtgcccactgtgggcagtaagggaagagccagattggcactctcagctaagagaaagcctgcccgggaaaggttgctcaggaaaccaccagattcttcccctggacactgggactctgcatgtgtgggccacttcctcttgttcttggtggtcctggaatcacactggatagcaatccatacttttcactgtttctctggaaatgaccctggcaggtggacagtgcaaatattactgccattttataaatgaggcaaccagggcacaggaagtggagggatggtgcagcactccagaacttccagggctaggatagactcctctgatcagaggactgatcccactctgacccccaccaaccgtgtcatggcagagcgaggattagttctctgcctcatgcctttcccatcagaacaaaaagtggttctcgctttttggtcttgaatgcctttacactcttaaaaattattgaggacctcaagatcttgtaggaggattatatttattggtatttatcagattgaaaattaaattagagacatttaaaatatgtatttattaactcattcaaaaattataataataaacccactacacattaatataaacatcactgttttggggaaaagtaactgtttgccagaacaaaaataagcaacaagaataataccactgctgcacatttctgcaaatttctttaatggctggcttaataggagacagctgggttctcatatctactgctgcattcaatcttttgcaatattgcatgtcatgtggcctctggaaaattccactctatacttgtaagagaatgaggagggaaaaggcaaatagcgtcttcatagtattatgaaagtagttttggtctcgcagaccccttgaaagtctcagggacccctatgggtctcaagaccacactttgagaaccactgcgctagattatgcctgggatccctggagagcctcctcctgcctcctggggtcctgtattccacagggtccttgctataatcctgggtggcaggggcagggtggcaggtttcacccaggagatcctggcgtcctccatcctcgtgtggctatgttctttctcctgtcttagagctcctgagggaatttcaaactaactcctttttttttttttttttccttttatgaaaataaacctgcaaccacagaccataaagcaggaaggtctgggagatcctcttgtcaacctcccttttccagtaggaaataaagagccattatttctggagcaggagtaacttgccctaggcctcatggtcgtttagttaccgggcaaggaccagaactcgggtctcctggttcctgaccagtcttgcctcctgcaccccggtcttcaagggggtgcttcacgttagccagttcactttctttttgtttgttttgttttttgagagagggtctcactctgttgcccaggctggagggcagtggcacgatcttggctcaccacaacctccgccttccaggctgaagcgattctcctgcctcaacctcccgagtagctgagattacaggtgcccaccatcatgcccagctaatttttgtatttttaatagagatggggtttcaccatgttggccaggctggtcttgaactcctgacctcaaatgatccaccctcctcagcctcccaaagtgctgggattacgggcatgagccaccacgcccggccagccagtccactttctcagcatcttcccacctcacagagagggtgctctccacccatgcactttctccccttgatcagcagggccgtaacttctcatcctgggcagctgcccttcctcccctcaggtttctttggtctttgtctctcccctgaggagaagagaagccaacttctttctgtgggaggggatgtagggttatctttggggtgggtttgtgtcagtttagctaacaagaagacgtttccttggccaaggttcaggacagggtcagatgaccccatggcctatagaactgtctttttatatatatttttcttttttctttttctttacacagattcctggggctcatggaaagggactatcttgtgggttttattatgaagcaggaaagggggtgtttgagttggggcaggaggtggggagcctcagaatactgacaccagggcttttggggatggaagtgtggaggcgagagctggagggaggccagctggggcagaggcggtgcaagaggaggtgcagctaggggccccccggtctccttcccctgggtgtgttatgtacgctttgtccccgtggggctggcggtccaggcagcaaggctccagccagcagaaatcacatcctctgtgtgctgcttccctgccctgctggctgccctgcagggcccagctctgccttaggcatagcagtgtggaaaagatccttgcacaggcttcatttagtcagaactgtcactgaccagaggtttatttcaaatagtgagtgtcgctaagtgacactaagagagtctctaagtgtcgcccccactctcctaaccctggccgagctgacctccgagacaagccaaggggatgggagaagacctggttttagagtgggacatgggagtgatggctggcttggtgggggtgaatgaaaacgcctttggggagcatcaaactctgagaaaggagagagaaaagatgctgagaggcgggaagggagtggaggtgcaccaccagttatgccgccttgcccagggtgccctgactgcgggcattgcattccagcacatcaggaggagaacctagtcattcacttacttattcattcatttgttcaacgattcattcattcaacaaacacttactgagtgtctgctggcactgctgtggactgaatgtctgtgtcctccccaaatttatatgttgaaatcctaacccccaaggtgatggtgttacgaggtggggcctttgggagatgatgaagaatgagatttgtgcccttttaaaagacctcagagagcttgctagccccttccaccatgtgaggacacagctagaaggcaccatctatgaaccggaaagcagggtcctcaccagacaccaaatctgctgatgccttcatcttggacttcccagattccagaactgtgggcaatcaatatcagttgtctataagccacgcagtctgtggtattttgttatagcagcctggaagggctaagacaggcaccattctggatgctgagattacagcagtgagacaaaacagacaaaaatccttgcctcatttagcttaagttctaatggagagagacagacaataaacaaagcaaacaagtaaattatattatagatcggaaagtgatagatcctgggggaaataaagcagagaaaggggcaggatgtgccaggattggggggatttaaattttaaataaggaggtgggagaaggcctaatgtgacaacatttggtatttgtcaagcaaacaaggaaacattactctgtcccctttcttaacagtgtttacttgggttcgatttctatgggcctgggaccttctactggattgttaaccctgcattttgttaggttggagctggaagctgaaaaggggctctaagagctgaccctagcccctgagggattcagaacgcagggaggtcatcccaccttggtaatgacatgcggagagggagtcaggactcctgggtcccagcccccgctccaccttcaaatcggggtcctctccgtagaaaccagcagatgcccccagctgtgtgggggaagggcgggctccactctgctggttgttcccgaatgtgcactttgggctcagaactttgttcagttctgagaatggacagtaaaccacatgctcatggcctggagtttgaactgtgccgctgctttgctgctgtcaccctggcaggctgcctcagagcctctgcagactcctactcctatccatcatcaccctcagagtcttctgtggctcgtggccctttctcttcagtgatgcccagggcctgagtggcaggcagcaggttgtggggaggtgtttcttgtcattaaccgtgagctcccggagggcttggaccacacctggcagcctgctgggcccacaccgagtgaccaacgcgaagtctttctatatagaggggccttgagtttgcacgtaactctgggtgggggggtcaggcccactggtgtggatggcacagagggcagagtgcttcgggctgggctcaacctgcctactcaccctagctccgccactacctccctgaccttaggcaagtcactttgcctctttgggcctcccttctccatccttagatgatctgataatttctaaaatctcttgtggcagtacagggctctgatgatttgggaacagggatggagctggtaaatttacactgcagttcactttcccccgcccccccttttgcagcctagggcttagctgccttttattacattcatatttatgtttcacccggggaacttttttttttttattaaaaccatctcattagctaaacaactatgccgctgctttcgcggcagcggctccagagtggcctggtctctcctgcagctgtcccccgtctatgccgggaagacctgcggcctgtgtgggaattacaatggcaaccagggcgacgacttccttaccccctctgggctggcggagccccgggtggaggacttcgggaacgcctggaagctgcacggggactgccaggacctgcagaagcagcacagcgatccctgcgccctcaacccgcgcatgagtatgtgaacccgggggcaaggcagggacctcgcagaatctcgaggtctccacattagtgcagtgcgttccggaggcagtgctcccaccgcggagggcgggggcggggagcgaggaaaggggtcgggctttgtttttaccgtcagcacttgatcatctgaactgggccatttgctcttcaaagtccctttattgggcgcccgccacaggccaacccccgggaaagaaaaaaaaaaaaaaagtctaccgaggcgggaggatcgcttgagggcaggagttcgagaccagtctgggcaacgtagggagcccccatttctattaaaataataataataataataataataataataataataataataataaatttgccgggcgtggtggggcgcgcctgtaatcccaactacttgggagctacgtgggacggttgcatgaacccaggaaggcaaggccgcagtgagccaagatcgcatttctgcactccagcccgggcgacagagcaagaccgtgtctctccaaaaaaaaaaaaaaaaaattccatagtccccgtccttcgaccttcccagtctactgcagcagcagcttacaaactcagcgttagatgattgtaagataaatggacttgggggtgggggtggcatttgcagatttctctgcgtgaccttgcagccctctattagcagcactgggctatttccaggggagtgttgaccgggagggcgtggcccccactcctccccaccacatcccaggctcgctcctctcgccccacagccaggttctccgaggaggcgtgcgcggtcctgacgtcccccacattcgaggcctgccatcgtgccgtcagcccgctgccctacctgcggaactgccgctacgacgtgtgctcctgctcggacggccgcgagtgcctgtgcggcgccctggccagctatgccgcggcctgcgcggggagaggcgtgcgcgtcgcgtggcgcgagccaggccgctgtggtgcgtgccctccctgcccgcagccctccgggccgccccccaaatccgtccacgtgtgcttttcgaagccctttctctgcgttgtttcctgtggaaagagggcgtagggcattgtgacaaacacgggtggggaggacggttcatttgcacccacttttcccttccacctcccagcaggacaggcggtggggaccggctgatgattcgggcctgttccaggaagacaggttggctcctcctacctggaggcctagaacgtgggggtccctgcaaagcttgggtttcccgtggccgctgccacctagtgttcgttcagcacagaaggtcaggctgtggagcgaatgggtcccagatcccactgggtctccgcctcccttaagagtccgatgaaggcaagggaaattcacatacaaaccctttgcttgtaactccaggcaaaccaccgatggacaaaacctctggcgttgtataaagttacctaaaggtgaattacatcactgtccccagttggctttagattctcactctgcactgttggattcctggcaccagaggtggtatctattgtgctcacttttttgtttttgttattgctctggggacatttgctgcatgcccagtgtggtcgggcaacagtgatgatgtggaactccaaacttactgttagagtcacagatggaaatggccgccctactagatacctatcctactaagtgaaaggatgagtagattcagggcagggaaaaccaaggaaggctttctggaggacgtgtacttggctagggttttaaaaagctgctttcttggcagagaagacttgtttccaatggtagaatcatagtaggcatagaagtgacgagtatattctgttaagaataaggcatagtggatattctgttttttagggtaaagtagatgtgtttagaaattaaaatgtaggtgtagtcccagctacttgggaggttgaggcaagaggattgcttgagtctaggaatttaaggctgcagtgagttatgatcgcaccactgcactctgacctggccaacagagaaagaccctgtgtgtgtgtgtgtgtgtgtgtgtgtgtgtgtgtgtatacatatatatatatataaagtagatggtcctgttggaagaggagttatgagaaacagtgaaaggaattagcatctatatttcaggagcagtgtaggcatggggaccctagaagtgctactattttgggtccaatgagccaactcatgttttgagttgtagaaatgtcatatgaaagaggagcagagacaacagtaaggacgaaagggacgagcacataatgcagccgttgtgccctccccattcctccagctctgggatgtcttggggagccacaggctaggggctgggacaactgggtctgggtccttactggcaactttcccgtgaggtaccagttatgggaccttgaacccttcacgtaacccctttgcacttcagtttcttccttagcatttgctatttagaaattggggaaagtaatgaggagtgaatgagatgctgcttgtgaatattctttgcttgtccaccagtgttagaaatgatgcattatcagtatgtggcagcatccgcaggatttcttaatttaggacattctcctggaatgctaagggcccactgaaatattctttaatctgtcatgaacagccattcttaacctccactgaacagaacaggggaaatgggctgatgcttcagtagtggggataagattcagttaaagaatgtcttgactcctgaggcattacgatagggtagaaagggtggtaggaaggagctttccctggagactgttaaggacaagaggggtctgtctctgtgggtttatgtgacaagagactgggctgaccagatggccttgggctgtccctttgtacccaaggcagttgggtaagtctcctgggttcttgccccaatcttttcttgacttggagaagagctcaggctcagctgtcccctctacccacttccactttctcttccagagaaatgaacagagctccctaaaccagtgaatctattcgtaagaagaggtcacatcaattggagacactcagggagcacagacttaccatgtagctactttgtgggatggtgtgaggagattgatgagaagcacacacattttttttcctcttgcaaattggttgtgctccctttgggaagacaggaccacaggctttctgaaggcaaggaccagggctggccatctctgcctccctgggcctagcatagcccctggcatgcagtggatacacaagaagtgtctgctaaactgagatgtgcattgtttctttggggaagaaggctaaaggagaaatttaataaggctccaagccagccctagagatagcctatcagaacaaagaaagttctcaagtctagctgctttttaatgggtaaaatgtgcccttgtcattgtaggctcaggtggttgaaagacatctccatctttattgtctaacacatcctgtcttaacctacactccctcagtattcatccaataatccaacctttccattcttgcagagaaaaatcaatgtctaataggattaaagaggccctcccttcccagctaccttcaaacaccaagttcagggtggttgtaggagcgggaggctgcagggtctctccagaggctccccactccattgttcaggctcacggccaaggcttacttttataacatctgtgaaatgccctgccagtaggtttctgctggagcaatggatttgaacagagaggggaaggattgtgatggtctcagaagaagcatgcccagggtgaggttctcatttcttgggcagcagctggtctgcacagggaaggcattttgaaagggcagaatgctccccacaccttccctgtcctctaccctgcccataaggaattttgtcaccagaatgccagagcttctgaggcctaggcctttctctggaacactccttccttcttgggaccgctgagctggggctgtttccttagcaataagaataataattattatcagtgaacattattagcagtgaacattctccacatgccagacattcttctaaatgtgttagctcattcaaccttcacaaagactgggtggatactgttattccatccagtgaggatactgcccaagatcacacagccagctagtggtggacctgggcgtgaacccaggtatttgggatacagagcccgttcccttagctgcgttgccactttgctacacttccttctggcttgtgtctcttgcagtatttttctgtgggaggctagggagggtgagggctgtgggcagatgggtgcagcccatttcgctgtggtaggcatgagtgtccctcctctttgggaccagcatgtcctcaaagggactgttttctttctagagagtaagggttatgagcatgagctttagggctgcagagagctgagttcaaatccttcctctgcttcttcctgtgaggtatacccctaacaagtcactcagcctaagtttcttgaaagggggtgatgagagctaactcggcatgaggcatagagcccacgtaagagcaaggcattcagtaggtgctccataaatggtactcattgttgtcacggggtatgcccttgcccgtcattcccagtactttttaatattcacagcttcaaaacctgccaggatttctactacatcctaggctttgagaattcagagatgactaatgcacattccctgtggttgaggaaaggagaaaatgtgtgcccccataattataatacatatctgcatgctgaaaaatacacatttgctcatagtgggaaaggaagttgatgaccatacagatataattgggggtcacttggggaaaactgggtaaagggtacatgggatctttctgcattacttcttgtaattgcaagcaagtctacaattatctcaataaaaattttaattaaataattgggggtcacagctacaaggggtggcaagtcctagaaccacagtccttgctgtccaacattcccgctgaggccttacttctcctctctcttctagagctgaactgcccgaaaggccaggtgtacctgcagtgcgggaccccctgcaacctgacctgccgctctctctcttacccggatgaggaatgcaatgaggcctgcctggagggctgcttctgccccccagggctctacatggatgagaggggggactgcgtgcccaaggcccagtgcccctgttactatgacggtgagatcttccagccagaagacatcttctcagaccatcacaccatgtggtaagtgcaggcagcagtgtcagggacctctaaaacagcagagctggggaggaaaacgggacccccaagtcctttacttcatggatgggtaaactggggcccaaggaaggaagtgacttgtccagaactgtacagcaagtcagaagcggagctgggatttggtccaggtcttctgacttccttactacacagggaactgggattcctggctggcagtaggagttcttgagttttattgccaactgttatgtgttggcccccatttctgggctttaggtctcagttttccttttctggaacaggaaaagggagatctgcctgtcaccctcctttccagcctgctttcagtattctcaagctgaagcatttgagcaggaagaacatggaccactgcagcgctgcctccatggggcattgctaccctgacctgcttcatgcacttccccaaaatagctccaaatcatgcttgcttcctgcagctctttgcctaggccttctgtgacagtcggtttcaacagggttgccatgagcgtggaagaaatttacaacaggacatttgttgagcaaacacttacctgtcacctgttctgtcttagttctggctaagaattggtggtctaaagatgagccaggctggggcagtggctcacatctgtaatccccagcactttgggaggtggaagtgggaggaatgcttgagcctgggagtttgagagcagcctgggcaacatagtgaggccctgtccctaaatacaaagaaaaaaaaatagttggccatggtggtgcatacctgtagacccagccacttgaaatactgaggtgggaagattgcttgagcccaggaagccaaggctgcagtgaactgtgatcgcgccactgcattctagcccgggcgacagagggaaatccagtcaccagacacagtacctgatagtctactagggaagaccagttagaaacatcctgattggccaggcacagtggctcacgcctgtaatcccaacacttagggaggccgaggtgggcggatcacgaggtcagtagatcgagaccatcctggctaacacggtgaaaatacaaaaaattagctgggtgtggtagcgggtgcctgtagtcccagctatttgggaggctgaggcaggagaattgcttgaacccaggaggcggaggttgcagtgagctgagatcttgccactgcactccagcctgggtgacagagcgagactctatctcaaaaaaaaaaaaaaaaaaaaaaagaaaaaaagaagtcctgattatggaaaatttcagacagacattaaagtagagagaatagtataaggagccccaacgtatccattcccagcttcaatgattatcagcactttaccattcttattttgtctattgactcctctgctgtgtggctggaatagttttttaaaaaagctgtaaatattacatcatttcacctgcaaacacttcagtatgtatttcaataaataaacgattaaaaaagtaaaggtaccattattaacctgaacatgaacaataattccttaataacgtctaacattcaatccatgttcacttcttttttttttttttgagactgaattttgctcttgttgcccaggctggagtgcagtggcacaatctcggctcgctgcaacctccacctctggggttcaagcgattctcttgcctcatcctcccgagtagctgggattacaggcacctgccaccacgccccgctaatttttgtattttagtagagacggggtttcgccatgtcaggctggtctcgaactcctgacctcaaatgatctgcccgcctcggcctcccagagtgctgggattataggcatgagccaccacgcccagcctggaggattgttttgaggtggagcagaagtctagggactaaacgcacaaggtgtactccacaatccccaaggtaagtcctctggcatgaacgcatgctatatgaaggaagactaagactggagggaagttgggatgaggttcaggggtcttcagaagtgagggggtgagcactgatgctggagcagtaggaatggggcccctggaaggttcttagcagggagcaaataggatccaagagtaacttcagggggtgggttttgggagctgcatgaggtatgatggcagggagagcatctgcaggaaaatgttgacgttgaccgataagaaggtagcgaggccttggatcaagcgatagcagtagaaatggagagtggaagccagaagccagagacgctgggaaagcagatggactagtgggatgtttgagaggaggaggggctgttgcagatggccctggagttctgaacttgaatgcctgtgaggacagtgacgcaagaacagcaagagggccctctggaggtagagggcaagtgatggctttggttttggccttaatgactttgagttaccatcttggtgaacaaatggaatcaacagcttgaaatgggtctggaaggtgagtgagaggttggggtggagagaaagacgtacatggaggtgacagtttcagccatgagagtagcgaggatccctaaggggagtgggccagagggcagaaaagaggactgagtcagaacttgggggaatgttcagagggcaagaggaagaaaaagaggattgcatgagagaggccaaaggtcaaaggccagtaaaaagggcagaaccagagcagtgccatatcatggaaatgaagggcagaagggagtaaggacctcctctgcaggactgctgacttggccttagcccagtgctgttttactacagttgtctggctatagtttgccaggagtttctctctgggaccttaaaacaacactgttgggcaggcatgacttgcttttttagtaaagaatttgaggcttagagagactatcactttcctaaatcagccagcaagtgactagagcccagggattcttgaactctccttattacagtgagaatagacggttgaatttggggatcagaaggtcatggtggcctctgtgtttcagtggtaaggatagaggctagactataggaagttggtatgacttgggagggcagcaactgttgctggctatttcactaaaacagagaaggtgggagaaggtgcgccttggcccctgggtgaacagggttggggagtgaccctggctttgggctctttttagggtttgacatcagcgacctctccatgtctgcgtcctccttgtctctcttttaggcaccagggctgaaagctattcagcagcttgtctttccacttcatttagaaaattgggtttcacggagaaggtgtgttggaaggacctcggggcctgtgtgccgctgtttatttttattctttagacaacacactggagaatgagcctcgctggagcaggtgctagtggtggtcgtgaaaaggtggcaggagggtgaaatgctgtggcctggaggttctgcagaccgcgtgcttggtcatcccagcggccatcacaatggagtatttcttcttctgcagaccaggctcagggccaggagttgattttaaacctatctttgaggctttttagaaaattaagcttttgggtcatgtccaaatgacagattgaacatgacatttacgggggcgggtggaattttctcccttaaaactaggtattagttaaaaaccagaagaaggcacgggttctgcacgtgctcagaaagggaagggctgattctcttgtttattcaacagatatttattgaacagcagctgcattaaaaatgttcaaaatcattacagtcagctgggcaaggtggctcacgcctgtaatcccagcactttgggaggccgaggtgggcggatcacttgaggtcaggagtttgagaccagcctggtcaacatggtgaaaccctgtctccactaaacatacaaaaattagctgggcatggtgatgtgtgcctgtaatcccagctactctggaggctgaggccggagaattgcttgaacccgggaagtggaggttgcagtgagctgagatcatgccgctgcactccagcctgggcgacagagtaagactctgtctcaaaaaaacaaaaacaggcagggcacgttggctcacgcctgtaatcccagcactgtaggaggctgaggcgggtagatcacaaggtcaggagatcgagatcatcctggccaacatggggaaaccccgtctctactaaaaatacaaaaattagctgggtgtggtggcacatgcctgtaatcccagctactcgggaggctgaggcaggagaatcgcttgaaccagggagtaggaggttgcagtgagccgagatcgaaccactgcactccagcctggtgacagagtgagacttggtctccaaacaaaacaaagcaaaacaaaactgaataaaattattacagtctgagaaatgcaaattaaagcaatgagtatgacttcatactagactggaaaaattagacatctggataatgcagagctgaggggcatgggggcctcatctgcttttgtaaggcatagactggttgagtcatctaggagagtacttggcacatcatgtgcaggtcaggtattcacacctgctatccccgcccttctgcctctgtgcagatagactaaaatccttatacacattcattaggacacatgtctgcagatgttcagcacagctttgtttgtggtggtaaggagcaggtgacaacctatgtcaatcactgggacactgagtgggtaaaaggtgtattgtgcaacagaagtcacagacaagtggtccgtgtcttcacagggatgaatcttacaaacacggtgctcgatgggaaaagcaaaacacagcatgctatgtgatatcatttatacaaactaaacatacatacaaagcaaccacagacgttttataaaaatatgcagtcagttaggagacttttacatagtccaggcaagaggtcatagtgtcttgtctcatgacagtggagataaagtggatatgaatttcagtggtatgttggaggccaagtccaagggcttgatgatgaatcagatacagaggatgagggagaagacagtggcagggatgatcttgggtttctggttgcgaagccagatggatggcgtcaccattcagtgaatcagccctggaggagaattggctttggtcgggggatcatgagtttagttttgaatatactgagtttgaggtgtgtttgagactcactacattagtgagaccatgtaggcgtttgagtatatgggtctggggttcaaaggagcggtccgagctgctgatgtagatttatgagtcatgtctgtgattggaactggggatggcagcagagtgtgagaagaggagcgagcctaggacagagcctggggaaggccgatattgaaaggccaggcagtgggggcacatgaaagctgaggctgagaaggaggaaccaaggaagtgggaggaaaacctggagagagaaatattttttttctagaagagtggagtgttcaacagtgatgaataatgttgaatgggatcaattaagcaaataactgaaaaaagtcccatgggatttagtgacgtggggatcatccattggtaacgttagcaagctgtgcttcaggaggggttatgggactgggacctggttggaaggggcagagagtgagtgggaggtgaagatgtggaggcagcgagtatagacgagtctcgtgaagctcggctatgattttcttctctgcagctactgtgaggatggcttcatgcactgtaccatgagtggagtccccggaagcttgctgcctgacgctgtcctcagcagtcccctgtctcatcgcagtgagtactgtccccctggaaggcccattgactccatcctgcccagattcctcacgtgtggaatggcgggagagagctgggtgacaccgtcagatgtgcgtgtgcacccaggcatgggtctggcttcgcccaggatcgccttcatttctgggtttgtgtgagtgactttcaggccaaggcatgtctttgcatgtgtcaatcccgaccattgaggcaaggagtatttgatttcgtgtaaggggaaagacctgcagataaattctatgagacccctattttgcccgtggagaccttaacccagtggatagctgtgagttggtggccttgattgtgatgacagtcacccttctttgatggcctcttgtttcctatggacatgctgatgaagacagctcttccttgagaaagcttcttggatgggtttgaaagagagaaagagaagggttgggtccgttgctctccattcgaaggtcctaacggtggctgcactgtcttttttttttgagagtctcactctgtcacccaggttggagtgcagtggtgcaatctcagctcactgcaacctctgcctcctgggttcaagcaattctcgtgcctcagcctcccaagtagctggaattacaggcatgcgccaccacacctggctaattttttgtatttttagtagagacggggttttgccatgttggccaggctggtcttgaactcctgacctcaagtgatctgcctgcctcggcctcccaaagtgctgggattacaggcatgagccaccacgcctggcctgttgtactgtttaaggaccaggcatggaagggagaaggggctgacctggtactgggggtttcacatttacatttatggattgcagcacccttatttgcttccagaaggcttatccttgcttagaaaggactcttccagtgggagagagataaatggctatcttcaatctccagcttgactgcttccctctctgcctctcactttccacaaggctccttctgtccaagggacccagttctgtgccatggtgtttgcttcctggcttgccctgcgtgacaggtctggctcctggcgtgaccgactggagagcgtctctcagcctagagctggggcaagatcccgagggcatgggtggctcaaaggttgagaccagaacttgtgacctcaagatcactccatccttctgtgtcttcttctgtccctctcagagagttttccccacacccactctctgttgcattctgcctctcagacctaccttccgtgcttctgctcagaatcttctagtctggtcactggaaaatgtaatatttttcaaagtcaggaaactcctgggattctgtgcagattgggaaaagccgtttagccttttggagtttcagttttctaacaagagtttccatataaaaataaggctagaaattttgactgttttgcccagaggagcgagtatgtgatacaaatgctattaagtgcacctgggctttggaaagaaaggtgctgtatcagtcatctgctgtcagtattacccaattagccattgatacctactaattgccacgaagtaggatatgtcaatgcgcaaagtagatagaaatccctggcttcatggaacatgcgttctagtgggcccagtggcttggggaggacagtaaacaagtaagtgagatgtgtagtatatcagatggtgagaagaacatatataggatatcagaggggaagcagcagggaggggagattggagtgtccagggatggagtgttgcgggtgttgcaaattcgcatggagtggctgggcaggggctgacgcgagcagagatctcttttaaagccattgtggtcagatggccttctctccccacattagttgtaaccatttaggaatgattctgttgggtccattaaaactcctttttagcacccaaactcaggtcttttcaagcctgggtctggaaatttctgcaatgcatcctgattcaatgtaacctgctatagcaaggttaagggtgatgacaagtatgggacattagatgagagctggggtcagaagagctgccaccaatgtaagccagaggtcagaagcccaggtgagaagatgccctcccagtcccacacagggaccctggctcaggcagctgctggtccccgtgagtgggcaactctgagtctcttgaatttagtcacagactctaggggaccaaaggacagtgtggaaggtaggtccattctctccttcactaatcatctctttgcttttcctaccttcgaggcaaaaggagcctatcctgtcggccccccatggtcaagctggtgtgtcccgctgacaacctgcgggctgaagggctcgagtgtaccaaaacgtgccagaactatgacctggagtgcatgagcatgggctgtgtctctggctgcctctgccccccgggcatggtgagtcaccaggcacagagctggtgcctgcccttcagttttcttgtaggcagggatgagtgagggggctgtgcagccagagagaggaagaaacaagggctaaacacggatagcaatggaggtggtgctggtaatgggggcatggaggaggggaggctcttctgtctcctccctgccaaagtcagggagggagttgttaggaaaatgcctggggttgatcctcacaggatctgacaaaaatataagaacttagcttacaggagtgccataggaagcaaagaatttccagaaaatacgtactagtaaaaacaagcattcccactagaattttcccaggggccgccttccatgctatgaaaatggagggacacatatatatttgcatatgattgacgtatatgcatataattttctatttcaaaaaaagacattgatggccctgccgtgtcactagcaagccatgggcccaacaagtctcttccccacaatgaaacttgttttcctcatctgtaatgtgagtcgtgaggtcttggccagcccttaacattccatgactccggtgctgtgcctgaaacaggcatggaggccgtgcatccaaggccgtgctggtttgcgactcctggctcctatgtggatgttctgctgctggtggcaatgatctgagcatgcctactcctccttatctccctcccaagtctaatcttagccagcgttgtattaaatagattacgcatacatcctgaaggatgcaacttccagatgtttctctttcaaaatgcatcctgtcttcttgttttccccaactccaattccttatacccaaagtgaatggtgaggagttggggcagaggctgtggaggccagaatgggagagggtggctctcagatggctttggaggggacttagtgttgcccaggactctgcttgaggggaagtgtcctggactgtgggacctgtcaatattctgtagagggaatgtggactcaattaccagtgtctctcaggaaggctgggattgcagtgtgtgaaggacagatgcttacttttctacttccccttcaactctttcttctcccaaacagagagaccaactcttgttaattctctcctcctctgtcttagcctctgagggttttggaactgtcttttctgatgaggagagctagcgattggccaatgagcacctttgaactggaagggttgtttggtgccttagcagaaggtggatatcacgaagggtctctaaggtggggaatctcagacctgggtaggaacaaaaaataggagagggcaggggaatcttccttattgctcttctttatccctggggcctcttaggtagagtgtctcagagctttggtgtggggaaagcatagatcattgtctcttcatcatactcagcaggaaaaggaacatcactcagaggactatgtcagcatcggatatgctttgaaacaaacttttttgtcatgaaggaaaaaatacagatagccttaaatattagtaaccacaataattatattatgaccccaaatccaaaaaagaggacagcgggacctcaaatacaggctgtggctatcctgttaggcgctcatttcattcctgaagcactgggcatgcattctgaggacagcacttggatacctgtcacgtgacgaggtgactcgcacttcagccacaggggattctaacttgcaggttcatattgtaagagattcggttattttcacaactgcttccttacgatgccggcgagtgtgcaaattattgcggccagattcgagagagcagagaagtccgtgtaatttattaagggtgcgcagcgtgccgcctgcagcacgggacacgtgttcttggccataacacaaagaaaatggagctgggcctggaaacaccctgtttgggcccatctgatggtgcagacatcatccctcggggtgttcctctgtccagtctgtcccttgtgaaggggcagggttgtgggatgtcactaagggcttggggaaggggtcacggattctgcattcttctgaggacttgacaggggaaagggaagtggctttttcccgggggcagatctgcggggggcagaaagagcaggaatggggtgcagagggcagacccgtcaggccaggcttccctgctttcccactccatgctcttgtgcaatccttcagtctttaccggaagcccagtcacctcatgtgttacgtagacaccgaattcctgttctgcctccatgatgcatggctgtgggccccaaggagatgtgtgtgaaagcactttaaagccagagagttctacagaagtgtaggaatagctttcattgttgtttctgtaactatccaaggctgtctcagaggctgcacccatcagttcttcctgctgtccataggagagacctgtaaaggatgctttttcttagatttccagcctgctgtggacccatgcttttgtaaatacaataaaaatgaattctcataaaaataaaacaaaagcaatgacaaaaataatatgatcccacccaactaaaaaatattttcagctgggcgcagtggctcacgcctgtaatcccagcactttgggaggctgaggcgggcggattacgaggtcaggagatcgagaccatcccggtaacacggtgaaacgctgtctctactaaaaatacaaaaaattagctgggcgtggtggcgggcgcctgtagtcccagctacttgggaggctgaggcaggagaatgccgtgaacccaggaggcggaggttgcagtgagctgagattgcaccactgcactccagcctgagcgacagagcgagactccgtctcaaaaaaaaaaatttcttttttttttaaaaatttttttgagacggagttttgctctgtcacccaggctgcagtgcagtggcatggtctcggctcactgcaacccccacctcccaggttctagtgattctcctgcctcagccttctgagtagctgggattacaggcgcacacgaccacacccagctgatttttgtatttttagtagagatggggttttgccgtgttggccaggctggtctcgaactcctgaccttaggtggtctgcctacctctgtctcccaaagtgctgggattacaggtgtgagccaccatgcccggccttaaaaaatgttttctttcctttttttcatgatccctaaatctaaactcttacttcccactttttatgacatataacagacataacatgactctgccaaatttccctaagattttctaaacactttctcttagtttctgtgcttgcgtcctcacaggctggccctggcccagggaatgcactttgagcagccctgttctcagccgaagattgtctctcctcctctaaggtgcctctcagtgtccaccgtatgcccagaagcacctgtttgaaaatattggcgggggcagagaaagaacccctctctttctggtttgtcccaggcctggcacctgcttagagcagaggttttctggttgaccccacaagctgcaggctgtatctgctcctgccatcgtgcaaaggtctcctggcatgggaatgaggaggatgggggtccctttgctaagtggtccgcaccgtgataaatgaagggcagagaaaccgcctggaaacggcatggtatcggaacctcacacttccaggtttgaatcctgcctcctaacatctacttaagtgagtggcaagtcacttaacatcttggcgtcttaattttcttatctgtaaaactggcttgcaggctgttgggaagactggagatgagagcagcgagcacatgggaggtgcttagtgagtggtggtttaatgaccactaactattacagtaagttcgtggtgggaaacggtgaatcctgccatgaacagagatgctgcagggaattagcacacacaggagcatctttttagatcccagtgttcactttctgagacctgccggatcgataaaatgagggggttgtgctggaagatctcccaggtatttttctctagttcagaaattcttggagccatgcttgcctgaagcatccatctctttaagttagaatattacctgctaccaccactaggtgacagcaaagcacaactcactgccctgctcacccttcctgagtccggcggcaagggtaactctgggagcatcgtagagggcagagaagaagaaaccctgaggtcccattatgtcagccccttctatcacacgggaggagactgaggacagaaagggaacagagccgggtcaagccttcatagttgtatagtggaaattctggtctcctgactctgagaccagggctcctgtaatctgaaacacttaggcctctgtctgggagatgctgacttcccgtttgaaacctagcagctacatctcccaaactgctggtattaggagcctcttggtggcgagaagtgtggttatgtccctgatcccaggatgtccagtttcctcactggccccatgtgaagactgaaggagttgggcaccacttcttaaagttcagagcttgggttcaagggcccatccagaggcggcctcacatgtgggcgttgcacattttaaaagatccaaagaagggcctgtttcagaaatatctcctacatggtccatgatttgtcactcagtcgggcttactgaaatataataagcaaaaattcattttggttaacaagcgagaggtttaaaaaaagcggaacctcataagtcttcataggaggagtcatcacgctcagcaggagtgctttaatcagatcactctcctcctcgcaagcttctggctgagttcagctgctttggcctgaaagtactgatggggtaggagaatgaacgagaggcagttggaaggtaaaaaagattctggagagtgggtcacgatggtgttcatgtatggagagttggggacaatggggccttttcagagaaaggtaacaagaccagtattttcctactttataattttcttggagtggaccaacacgtaggaccacgttctcagcctgacccctttcggactgaagatgtcatgagttggtgagtgatgggacgagtatttttgccaggctttcttctgaagtcttcaggggacattcatagactttatcttagtagccttttgatgtcccgaagggacaaacactagacggaggtggttctcttcattttaactgtgaggtttaagtgacttgccacaaaatttggccagggactgttgtgctggcctgccccgcctctctgcacagctcccctctgggtccaatccatcccctaaattacccctttatttccaggcctatctacctccatgaatttccacctccctgaatgtctttgccactttgggattctctgggtgtttttagctgggctattgttacctgctcttctctcccaagtcaggaagtctcatgctgtgtcctggaaaccctttcctctcattgaagattatgttttgtctcctctccagctctcttatgacctaactccacaccactgtggccttcatagcagtcctcacttaatatcaaggtcctattataatattgctgtccatgaattaataacctcctcttgctaacacgagtcggcagagagcagccacgtggtttgcagtgggtgctcagaaggaggaggaggtggcggctgcagtcatggcattgttatctcacacctgagctgggactggagtgttctgtccgctggaggagggctgggcttccatagacccacacctgggtgacaggaggcatggtgggttgtcccatgggttgaatatcatggcgagaggtaaaaacatgcagcatgcagaccaagaggcctgggagcccccagcccggcctgcccaagggtgaggggcaacatgtgctgctgaggtaaggggagcctggctctgtttcctggagtccgtccctgcacttctgtcccacatggtatttgccacaaggaggcgtattatctggtttccgttgactgtaaggcatccgtgggatacctcagtcattcttatagcagccactaggtggtgggcctcaggcttaagtcagagctgacactggacggggcgatgtggacatgaaccctaattgtgacagaggctttgaatgctctgctagagagaggtttttcagccctgccagctcctaccaaggtgccatcttccctactgggtgcttaagctcattccctcccaagaacagtggttccgggaggtaagagctaccaagagtggggtcaacctgcatcttatgccctgcactgtcatcctgacccatcagctgggcttccagagatgcgggaacacctcctgaggttgggtgaagatgacattaagcagtggaggattcttcctatttccctccccccaaccgccccaacacacacatgctcacatacgattctagcctgggtccttgaaagccctttgttcagcccaagattgccctgttcccagggatttgtccagctccaggcctgggagctcagacttgtctggggagtgactgggtcacgtggagctggaactgttcagaccaggagcttctcgccctgcagggagctctggagccaaggtgccacagtccttcacctgggggtgacccaggcctctttgagaacccccaaggctaggccacaccaggacaggcacccagggctgccccttggagtcgggacagaagcgtgtctgcatgttgagctcagagtgggtttggctgactcttctggggctggtagttcttagttcttttattttctcagccccaacagaccggaggaatacaacatgctcacgaaagtagtttcccgaggggtgacgacggggaagtagagcataccccatggagagtgaaccgggatacgggagactgggcaggagggggcctgtggcttggaccagcccccagactctagttctgatcgatttctacttatgcccaatatttggccctcacctccagagtgttaagtacatattaattttattcaatatagtgttcattttctttaattataaacataatacatgctcattgaagaacacttggaaaaaaattttaaaactgaaaaagaaaataaaatcctcccactcgcctatcccagctcaccacctggaggcagattctgtatttccttctagtcttttgtgaaatatatatacatttggaaccatatgtatatacagtttttcttcctgtgttaaaaattaacagcataagtatttctcacttcatttaagattcttccaaaggaccattgtaatagcaccataggatactggcgcctggtgattcctcaatggatttagtcattttcctattaagtgtttccaatttttttttgcaatgataaataattctccatcaatctttgtccataattctatttccctcagagaaatcctttccttgggatggctaggtgtaagaatatgtgcatttcaaggcctctggacatgattttttgaagtacctttgcaaaaatgtccaggttacagtgccccagcagggcacgagagggcagagggcagtcagtgtctttagttgacagggaggagccatgtagatgggaacccatgtttgccaagccctggcctgggcataggatccctgtcctggcttggcctgcagtggaagctgtccccctggctcagccctggtcctggtgccagtcccagtgctgggcttacccgtaggctcaagtctcagacaacacttcctggagcgggctggaggagggctttagatcagtcactgtggccctgaggacttttggattcttttctcttaggtccggcatgagaacagatgtgtggccctggaaaggtgtccctgcttccatcagggcaaggagtatgcccctggagaaacagtgaagattggctgcaacacttggtgaggctcagtgaggggctgcgccggggacccaggccctgcgggtggagtgagggtgcacgcggccacaggaccttccgcacttgcctccagccccctgtgggaacctggttactctctgcctttcctccgtgcctgtgtttctccatctgtaaaatggggagaatctttttcatcacctgtgtccatcctgcatagacactattcaacaggttagtacagtagcccttatccgaaatgcttgggaccacaactgttttggattttggattattttggactttgaaatatttgcatatacataatgaggtgtcttagggatgggacctaaatctaaacatgacatttatttatggttcatatataccttatacacgttgcctgagggtaagtttatacaacattttaaatatgtatttaatgtgtatttagtatttttaatgtttgtgcatgaaacaaagttttgtgtacattgaaccatcagaaagtaaaggtgtcaccctctcagccacccatgtggtgtcatgttggtgctcaaagttttgggtttcagaacattttggacttcagagttttggattaggaatgctcagcttgtatttctgttcagggagatgggccccagggaagacagggacctcgccccaccagtcattgcatttgggccaagctgccagtgggcacggggtctggagggtcctttcgttgcaggccttacactgcccatgagcacttcgtgagtgtgcttgcagtggcgtggtttgaggtgagggtggctggttgccttctcccttttccttggccatcctgcacgtaacccctcaccctgctcattcaccctgcctttgacttggtggctgtgcacagccttggaaagaggcctactggacagaggtagagagggctgtctcttgggcttgaggtctgagcttaccacctctgacgcacaagtgggcttcttgatgtcagctctggttacgggtggtggcagggagggacacgtggcagtgggcagatcactatagattttaacatgtagctacatacatcttaacgtgtagctatgcacacaggactgctcctggcagaagtgcgtacttcatcactcttttctatactctgggctttcccactgttctgtcttgtttttcccattagcctcaggctttcaacatcagtgtgtctgttttacagacaccctgtggccaatctcaggtagatgtggctttcagggtgaggctgagcgaattcataacaggaggcctaaagagcatccgggcctcctccctggctgcctggctcactttggacaaccccttcccttctttgcctcagtttcccccttttagggacagccactaggcttccctgtctcctgctgggcaccatactgggcctatgaagtccacactccacgctacaggtcctcaacttccttgggcttcctggagggttgggaggcacccagagtattctgtgttccttcattgcctccatggcccagatgggcccctcaaacccaaggtgcccaacttgtcatctctgccatgactgctcctagtgtctgtcaggaccggaagtggaactgcacagaccatgtgtgtgatgccacgtgctccacgatcggcatggcccactacctcaccttcgacgggctcaaatacctgttccccggggagtgccagtacgttctggtgcaggtgagaggtggggagatggggagagggtgctgtttctttctaggaggggtgggaggtgtggcctcaggttgggttctgtggatctgtctgcagaaacaactctggggtctggtttctactggagtacttcccagtccttcacagaagtgcctgaagcggtaggggatttgaagctcaaagtggttgtccattttccctctgctcacctggggacttataaaacgagacagaagcttgtttgttgttgaggattggtgtgggagaaaggctactgctagtccacattagcacagatgtggaattagaaaaagtcatctgttccttctggtagacacagcctcagtcagggtgcatagcttagggagtgggttgggctgggaagtcagtcccgctcagcctcccttccagcaccctgggcagtgcacagtctgcaggtgttgtgcagtggccctggacagggggatggttgaaatgacccctggagtttgcttcccacgatatggctttgtggaattctccgccattttaatgtctaacttggtacaattcagaatgggaggagtgggaggatgggacacaggaaagtcatcctgcccagcagatgagagcgatccaggaatcctcacggtgagtgtgggcagcagcccctctgcctcccactccccactgcgtggattcttgtaagtttctctttctggttgacatcaactgtgtaagcaaggaagtatgagtgcttttctcaccagagctgaggcactgtactctgtgaagctttgaacaaatatggtccctctgtctccattcccaggaggaggaggggcgggagcttggtgtggtctgaatggaagaccacaaacccataggagccccagccccagaggctgagttgcaggagctggtgagtcaggcagcgtgggtgactgtggaccgaccactcgtgtagagcatgctgggcatggggcggagccaacagcagcctcctcagtccccacctcacacccgggctggcccagagaggcaggcagtgtgctggggacacagggcatgcagaccaggcagggaacctatgatccggggggatatgcgcccctttagagctttcccagagattctatatggaagtttcccagcctcagcagcaaaagagagggcgacaccagctttgcagaacaactgcccagcccatttcaaatctgaacatccaggaaaaaattaattcagtgcagcaaggaccagacagctggtcagcatctgctgctcccagcccttccctgcccaggccagctttcccaagtggaccagttttaaagactccccctccaaacggtgccccttgtgtgtggcttgttttcctttcctacagctggttctgttgtcttctgatgcattgtcctggggcccctcccctttctgccatcctcctttggggagtatcatcaagacctaactccctctttcagaaatctcagctgaagataaggacaaataaaacacctacacccttgtttcctcttttaaccttcgccatgcatcgacctaacacaaagccatttaacctgacaattccattaagttgaatggaatcttagaggtcagattgtgtgtgttgtatggacatatgtatgcatgtatgtgtgcatgtgtgtatgcatgagcatgtctgtgtgggtgtatgcatgtgcgtgtgtgtgggtgtatgcatgtgcgtgtgtgtgactgtgtatgagtacatgggtgtatgtgtgtgtatgcgtgagcgcgtgtgtgtgtatggctacgtgtgtgtatgtatgtgtatgcgtgtgtgtgtgtatgagtacatgggtgtatgtgtgtgcatctgtgtatgtgtgagcacgtgtgtgagtgtgtgtatgagtacatagatgtatgtatatgtgtgtttgagtgtatgcatgtgcctgtgtgtatttgggtgtatgtgtgtgtgtgggtgtgtgtgtcagaaaggtaagtggtttgctcagtgttaccaataagtggcagaatcaagattcacaccttgtttttattttttctttttttttttgagacagagtctcgctctgtcacccaggctggagtgcagtggtgcgatctcggctcactgcaagctccgcctcctcgattcatgccattctcctgcctcggcctccctagtagctgggactacaggcgcccgccaccacgcccggctaattttttgtattttagtagagacggggtttcaccgtgttaaccaggctggtctcgatctcctgacctcgtgatccgcccgcctcagcctcccaaagtgctgggattacaggcgtgggccaccatgcccggcctcttttttcttttcttttcttttttttttttgagatggagtctcgctctgtcaccaggctggagtgcagtggtgcgatctcggctcactgcagcctccgcctcccgggttcaagcgacacactctgtttttctaagttgaacattttatctttctttttcatcacatcacaataatagccaccatgggggaggcatttgccaggaatgtgtccccttttgcttaattttctatgcaattgaccaacaaggaccagagctccttatcctctctactcatctcgacttggtagctcaggacccatggagctgtgtcaaaccatctttggttccatttctgggccagcagtgcagagggattcaaccagaattcagagccacaaagtgccctgtggtcaaactgtcccagttacctgggtgggactctaggcaaggctccagtgggactctaatgggctctaggcaaggcctttgagcctgatgcatccatcgaagcaggccacatgtcaccttccttccctccccctccttccccacccccaccccactcactgcaggcacctggctcatctgtcgtgggcgaggttgacacacctgagggcattcacctgggcatatcccccgtcccccagacacacacagaggcacatatgcgcagccatggacgtggcaagatcctgtgacacgtactcaaaggcctgtgatgaagagatgccaatcttctggtctggtgagagccagtggggataatggtcttctcctggcactcctctttccccaggattactgcggcagtaaccctgggacctttcggatcctagtggggaataagggatgcagccacccctcagtgaaatgcaagaaacgggtcaccatcctggtggagggaggagagattgagctgtttgacggggaggtaagtgcagcctcatctccaccctcatgtcccgctttgtgcttctgccacttaataggaacattttccaagcattcatttagagctcgtgtgaatggaataacgcacagccattaaagaggatgaggcagagctattgcaactgaccgtgacgtattattttatgagaagaacaagtggcagaacaatagggatgacacaatcccattttagcgacagtgcagagtgtgtgtgaaggatgtgcacatgtgtctgcacaaacgtgggaagaaccagtgctcacctctagagtagggtggggactggagggtagccgggtttctttgtgtgtgtgtgtgtgtatgaagtgatgatgttatgggatatgtttcatatgtttttctgttcttttcagataaatactttatttttttgagatggagtctcgctcttttgcctaggctggagtgtagtggtgtgatctctctgctcactgcaacctccacctctagggttcaaacgattctcctgcatcagcctccttagtagctgggactacaggtgtacaccaccgtgcccggctaatttcttgtatttttagtagagataggatttcgccatgttggccaggctggtctcgaactccagaccccaggtgatctacctgccttggcctcccaaagtgctgagattacaggcatgagccaccatgcctggccagaaaggagctcaaaagaggagtaaactaattcagtcccctgtgtactaagaacttaaaaagtagttctcataagtgtacacaagactcccttaggagatcttgtttaaaatgtggctcctagaactccatgctgagattctgactcagtaggtctgggtggggcccaggaacctgtgtttaaagttgcaggtcatccccaggccacagttttggatccgctgctttgactatgtggagtgctgtggagacccaggctctgggcacaaacttgtcctggtatcttcattttctcccatggcctcagcctgcagctctgccttcttccaaatacccaccattgacagcaggggatgggaggtgaattcttcaccattatggaagaaaactgcttagcaagcataacgtattaactgtgagtcagcagtgtcaactgcatttcaaagaacagctctatttagggcagagtggcggtgatgatgctgaacaggaggtgtgcagacatgtgagggatagatttgcacatgtgattagctctgcactgcatgtgatatgttactaatgagaggacctctgcaaagggatgatggcagttctcagcctcagcctcagtctgatgaattggagagtccgccacacatgctgaaatggtcctccagggtacagcactggcagggattgggctaagtcagaggctcaggtcagagcccttcttgaacctgcagtgtgtgattcccagcactagcactgagcacctcagtttcctttttcttcagctctgtctcctgatgacagtggctctggggagggggaggtggtgggatacaagaaaggtgagagtctactgcttatttttatagaggaatagatttttaaacaatcaactagagatgcttaaaatcattgccatgttgaaaacctatctaggagaccactatatttaatgactaattgtcaataaaatacctgctcattggtttcatagtactttaatttcataatcatgattttgctgctacctctgttaccgtctcttggtcatggatgcctggagagtggtggtggtgagatggtcacagacatgtcctggcgtggggctggccctgcaggggtgcagtggcaggtggggtcctggaggggtggcagtgcctgcactcgtgggcactgaagacagatgggcaggtgtagagtggagggaggatctggctgtcgagcctgcccttcatcctcctggatttcttgctttgtcttcctccaggtgaatgtgaagaggcccatgaaggatgagactcactttgaggtggtggagtctggccggtacatcattctgctgctgggcaaagccctctccgtggtctgggaccgccacctgagcatctccgtggtcctgaagcagacataccaggtcagtggctttcttgcttcatcttgttggggacttggcctttggagtgttttctgctccctgatcgtaggtctctaaggacttgctttatgaatccaggtgctcctgtgttgggtgcatatatatttaggatagttagctcttcttgttgaattgatccctttaccattatgtaatggccttcttttgatctttgttggttcaaagactgttttatcagatactaggattgcaacccctgcttttttttttttgccttccatttgcttggtagaccttcctccctccctttattttgagcctatgtatgtctctgcacgtgagatgggtctcctgaatacagcacactgatgggtcttgactctttatccaattggccagtctgtgccttttaattggggcatttagcccatttacatttaaggttaatattgtcatgtgtgaatttgatcctgtcattatgatgttcgctggttattttgcccattaattgataccgtttcttcgtagcatcgatggtctttacaatttggcatgtttttgcagtggctggtactggttgtttctttccatgtttagtgcttccttcaggagctcttgtaaggcaggcctggtggtgacaaaatctctcagcatttgcttgtctgtaaaggattttatttctctttcacttatgaagcttagtttgggtggatatgaaattctaagttgaaaattcttttctttaagaatgttgaatattggtccccccctctcttctggcttgtagggtttctgccaagagatctgctattagtctgatgggcttccctttgtgagtaactcgacatttctctctggctgcccttaacactttttccttcatttcaacctggtaaatctgacaattatgtgtcttggggttgctcttcttgaggagtatctttgtggtgttctctgtatttcttgaatctgaatgacaatatcaacttttctttaggtttcttaacctacagcagcaaaccaatcatgcacaatattagtataacactgcagactattctagggtgtttccttatcattgagtcatgggccagcatgttttgagagctatttgtaaaattgctaataaccaacttttgagaacggttccactatttagggtccaacagtttgttggaacttgcatgatttctttaagtggcatgtatgtgacaagtggctctggctactctagccactggtttagtcaggcaggaatggcctccacagcatccctgataacaccatccattttcagcttgtacaagccagtgaggcagcactgccctcacttctctgtggcagcccatctcagtcccagaaagcattaacaattcattcattcatttattcaacaaatactgagttcctgtatgtgtcaaacgtggtcctaggcgctgtggatacagcaggggaaaaaagtttttttgtttaggggtgtgtgtgtgtgtgtgtgtgtgtgtgtgtgtgtatgtgtcttccatgtatttgtttttttattgctgctataacaaatcaccaaaaacttgatagcttaaaacaacacatttattatcatatggttctagaggttggaaagctaaaattggtgggcagggctgcattcatcttagaggctctgagagaggtcccttttcttgccttttttacattccggaggctgcctgcattcttggcttgtggccccatcctccatattcaacgctggcaatgtagcatcttctactttttttctccttttctgcttctgtctgtcacagcaccttttgaactctgaccctcctgcctccctctgatcagaccctgtgatgacattcagcccacacagataatccaggttaaactcttcatcccatgggagccactgttttgccttccataatcctggtgcagattatatcctagcaggaatgttactatagatagtttgggctgatgagccctgtgaagaggggatgtaagagcagaatctttggggaagggagggaatgagtcatgccagtatctaggggagagagtttaggcagacggaacaagcacgtgccgaggccttaaggtggtaggtgtctgcagccgttgtacaaggaggtcagtgtggctacagaggagggacttgggggtaatggtagttcacgagggcagggaggggcagtagccataccatgggggctactaggccatgggaagatcgttggccttttgcccaacagtgagaacattcttcctctatgtttcctggtgacttacaccccttgtaccaagctgaatgcagcttattgaagcaagatagaatacattttttctctttgtctcaacatcagggctctaagtatattgtaaaagtatagcaccttttcttctccaggccaaatatttccagttttttctgtagtttttttgttttattattatttttagttgacatttaactgtatgtatttactggtgacagtgtgatatttcagtacatgtatacagtgtgtagtgatcaaatcagggtagttactatatctgttccctcaaacatttaccatttctttgtgttgggaacattcaaagtctgctcttccagctacttgaaaatatacaataaactgttgataattatagtcaccctgtggtgctaccgaacactagaacttatccctcctctttgtgtagttttcacttgtttctcactcattcgtaactactttttcagaacttgttgcatgttgcactccatgatgggtgaacatggagacaggtgagacatatcttcctgattacatttatgagagagcagaattctgcccagcctactctgaacaggctgcacttctccaggcaaggggactcaccttcccagaggcaggcagttctataactttccctccttggacccctacacctccattggtggagcagtgtacctggctcctctctctgcttctatgcttgttggggacagtgatagttcccaccagtgatctcagggccaaggctgcctgattcccacctctgcccttggctgactatgtgacatgggcatgttgcctctctgtttccatagctttaaataaaatggggccagcaaggaagctcaggaatgggtcttggcaatggcaaggctttgctgctcacctcgggcctcctctgagtctctgtcccgctcctcctcctcttcctcgaatgccctctgcctccattgccgccaggaatgttcccctttcccctgagccggagagcatgctcctgggcttgacggtgctcatccctcaacttgtctctcaaggagaaagtgtgtggcctgtgtgggaattttgatggcatccagaacaatgacctcaccagcagcaacctccaagtggaggaagaccctgtggactttgggaactcctggaaagtgagctcgcagtgtgctgacaccagaaaagtacgtctgggtctctgtgtggacagagccctagagcttgcttcctggaatgtccctctgtccccattgtcatgggggctggaaggggggttgtgggtggtatgacctccaggtggctgcagggtgggaaggagggtctcttggatccttctgggctgaataaccccagtttgaccagctgacggctggcctatctcttgcctggttcccaggtgcctctggactcatcccctgccacctgccataacaacatcatgaagcagacgatggtggattcctcctgtagaatccttaccagtgacgtcttccaggactgcaacaagctggtgaggaccttgagggtagtgggaagcagacggtcccaaggcttggcctggtggtatggacacagagtgtgaccttctaacgtggacactaccctcgtgtcttgacatgatctgcaccaagacaccacttcggctttttttcttggctttcaatctgggaaacaaaaagtaaaatcaacagtttctaggggaagcaatgcctggcaaaacatttccttctgcatgagaagtaactccccttggcatgtgccaatgcttctctttcagccccagtcttaggatttgttctcttattgaagtatcttgttttcaacaccagagccagagatttccttttcctgtcactgctgcatttgtccagaccaaaagaccttcctctcccaccccctaaaaccccttggtgcccatttcttgtctcacagaaattcttttctggccttaattttggtgattttgagtcctcgtattatgacttatttttgtgtcttcatctctaatgacaaggaggaattccgcaaggttaagtgcagttgtctctctcttttttttttttttttgagacagagtctcgctctgtcacccaggctggagtgcaatggcatgatcttggcttagtgcagcctctgcctcctgggctcaagcgattctcctgcctcaacctcccgagtacctgggattacaggcacctgccaccacgcccagctaatttttgtatttttagtagagtcaaggtttcaccatgttggtcaggctggccttgaactcctgactcaggtgatctacccacctcggcctcccaaagtgctgggattacaggtgtgagccaccatgcccgaccatagtgcagttgtctcttatctgctgcatgtatgtgtgtacacacatgtggacatgggcttgtacatggacatatgtgactacagaagtctgtgtacacacacagccatgcacacatacatgctgctgtgtaacaccaccaatgtgggagagactggttgaaaacatggatctcaattctctttctatctatgcagtgattttcggtctctgaggactccaaaggatacttacattccctggtttggtggaaatcctgggcatctgagttggaagagtgaggacaggggaggagttggggacattgagactgttggaacgtcttggaaacaatgacccactcagtgtctgaattcattttctgtcataactgccctgaaaaagtccagtgtgtttagaggcgtgttttggggatgaggaagggttggaactggttgaactggatttggaatcagagtctaggccctattgtcctgcatacctgccccatagcactgcagtgaggcagctgcagggcctgatgtatttccccattctctttgctgaattgaggcaaagaaagacagtgaccagcacatatgtgtgtttgtgtttttgtaaaagcacccacatgctcatgaggctaagagtgggttgtgaggacagatgggtggctgagcagggaggtaggcagagggacagagggaatgttcttctggaaaatcctcaggctcattgtgttctgcagaaggccagcagcactgcattattcaactcttcttgctggaatgcagattagaaactaagaatcttgccttcccactcattccctctttgagaccattgagctacatttctccttctacctggacccccttatccttaaattgaccatcagaacatttgcacccagactaagagccagagttcctgacacctggccataggcctgggccacctgaggctgcctttgcaggtggaccccgagccatatctggatgtctgcatttacgacacctgctcctgtgagtccattggggactgcgcctgcttctgcgacaccattgctgcctatgcccacgtgtgtgcccagcatggcaaggtggtgacctggaggacggccacattgtgccgtgagtactgacgccctcatgttctcagatgccctcccttcttcccatgtgtctatgcttgaagaccttgtgagtgcagggggatatcttcatgggcgagagaagacagagtgttagtagggactggatggccaagggctaaggagggttaagacattggctgtgtaagaagtttatattacgggtgaggtgggacatggattcaaggcatgaacatgtggagacttttcttctggagagattctggcaggggagaagagggaatactgatgaaaagaaggaagtcgatttatgtctttaattaggcgtgattatatttgccaatatgagtgatcaactcatacattcatgtctatagaatcttgcttctttggacagaagcaacttaatgtttttatgtagaaaactgggccgggcacagtgactcatacctgtaatccctgtgttttgggaggctgaggccagaggattccttgagcccaggagttcaagaccagcctgggcaacatagcaagaccccatctgtacaaaaattaaaaaaagaaatgaattcagaaccaatagattctggtttaggtgcttcaacaatccagaagtctctaatattggtgacgcccatagtcccctagttccccaacattatctccagatggcgcaggccatcaccacatgggtctgcagtcctggaggctttgcctgttgtggccacagccttgtctcctgtctacacagcccagagctgcgaggagaggaatctccgggagaacgggtatgagtgtgagtggcgctataacagctgtgcacctgcctgtcaagtcacgtgtcagcaccctgagccactggcctgccctgtgcagtgtgtggagggctgccatgcccactgccctccaggtgaggcctctatccctgggggtcaggctggtgggatgggatagggatggatggaaaggtgcttctaggtcttgcttcatctcagcctccacctgccacgtcctatctctgacctgcaaggctgctgcaggttccgtgggttctttcatcagagtcaggacagtcgtgatttttctcaagtcgagctcctccaaaatgcttttctgtgcctatttatgggattctcacctaaagcagcccctgccgatagaactttctgcagtgggggaatgttgtattgaatgtaactgtgacgagtgtgtctgaggaactgaagttttgaattttattgaattttacttaatttaacgtaaatagccacacgcagtttgtgacgatcctatggtacagcacagctctagagttactgaaggtgttattcagaagagcagaaagagccccggagataagatttcatttgtcctgaggcttggggaggtgaggtagggtgaaggaatccccgctcccagttttgcagagggatcaatcaaggcacaagcaggagagatgctccttgagtgatggggtgacccctgggagtgcaggcaggaggagttggcttctagggcaggaggaggagttggctcctcccttttagttaaaaatgaggcttcctcgtgggaaaggggagcgttttggttcctaatgagagctttcttttgcagggaaaatcctggatgagcttttgcagacctgcgttgaccctgaagactgtccagtgtgtgaggtggctggccggcgttttgcctcaggaaagaaagtcaccttgaatcccagtgaccctgagcactgccagatttggtaaaacagattcctgggttgtttgaagtgatgaatcttattgcttctccaggggccagcttagagactaggttttgggtaaaaagtcctagccacatgagttgagagactgagtttattttatttgtttatttatttaattcattatttaatgtagtttattgttttgtttgttcctagggtttgcttctttttctttagggatggactagactgcttcctccacatatattcctccacagtgtttttgctcttaataggtttttaagtcctaacaggtttttgcttttctcactgaaggtgggggtatggtcacttattgtccttgtaggtcatgactagtctgagcacaggtgtccatatactggaggtggggactcaggagaggaaagtgagatggaacccagggccctcaggtaacatgaacgtcgtgggggccatagtcaaggtggcagggtgtggctgtcataatggggagggaaggtgctcgttgctctcaccctggcttctcactggacttgcctctgggaaactggcctttggggaggtgagaaggagtcctcagggtgagctctgagccctctgaagtcctgctcataagtagggagcatttattaaaatccagatctattcaacaccactccctgacactaatcaagccttctgggagcttaaacttgagaacgtaaattcgctggggaggggctatggtcacagctgctagagtcagatcctgccgccaccatctgtacaaacaagaatgaacactgcctggggtgagttttctagcaaacacaggaaactagaaagtatgtcactcatgcactgttaaccaaggattgaagcaataaatcttgtggatcacgggaaggaggaattaacttcctagtaagactctacctgcgcacactctttatgctgaaacagagactgtagggagcaaaggactgggtgattctgatgctggcttggggttctgtgccaaaagggcatgagagcttcgagccctctccccacctcctttgctggcacacgggcaggggcagctgccacggtgcacgctgaagctgcaagcagtgtgtggacagaagtcccacagcaggctggtggcatcacctggtatcaagccgcagggggacacttcccaggctcagggcgctgccgccttgtcagctttactgggagtgctgaaggccaggtgcctccaaggctgagagtccaaagaggagatggtcctggcccatattggtctccaccacacggtcacttgatttcacctgtgggctggcaggccgtgccactttccgggacactggcaaaaaggtgatgttaccagcagagcctggaaatttggcatggtagtgtaggaatttgtgtgtggggggccactgctctactacagacttgtggtgtgtgcttggggctgggcacagagcctggccagtacctggcacatgagaggtgctcaccctatgtctgctggaggaatgagtgaatgtcttttcctaggcctgacaccgtggagacccctgtctgctactcccaaataatttgttctgctagataaagctggggttttgaatctttattcatctttctacaatgtttttgctccaattttttctctcttcgttagggcccaacatatcaaacatgttttaaaactcatgcaatttacattctgttagaatatgtactgtaaagcatttatcttcaacagaacatgtacaaacacaggttagcgtctacattttagtaacatttgttcttggagacacttgtaagaaggcttggattataattaagtattcatgttgctaaagatgtaggttgaaaagaaatcagctttgagtggttgtgtggatggcctagaacaacgagtatattttttcatatcctaggatgggctaaagctttggtttctagaatcaaaggaagtcggctatgtgtgtgttttgaaggtggggggcatgctatttggggacagatgttaaacaatgacatctcacttggatgtggaatggtccatgggatctcaagttcaggtggaacagaggagattctgtgggaatatggaagtcattgtacactgtagggctcagaagtgtccacaggttcttcctgaaccattttaatttcttcgctcttttctgcagccactgtgatgttgtcaacctcacctgtgaagcctgccaggagccgggaggcctggtggtgcctcccacagatgccccggtgagccccaccactctgtatgtggaggacatctcggaaccgccgttgcacgatttctactgcagcaggctactggacctggtcttcctgctggatggctcctccaggctgtccgaggctgagtttgaagtgctgaaggcctttgtggtggacatgatggagcggctgcgcatctcccagaagtgggtccgcgtggccgtggtggagtaccacgacggctcccacgcctacatcgggctcaaggaccggaagcgaccgtcagagctgcggcgcattgccagccaggtgaagtatgcgggcagccaggtggcctccaccagcgaggtcttgaaatacacactgttccaaatcttcagcaagatcgaccgccctgaagcctcccgcatcaccctgctcctgatggccagccaggagccccaacggatgtcccggaactttgtccgctacgtccagggcctgaagaagaagaaggtcattgtgatcccggtgggcattgggccccatgccaacctcaagcagatccgcctcatcgagaagcaggcccctgagaacaaggccttcgtgctgagcagtgtggatgagctggagcagcaaagggacgagatcgttagctacctctgtgaccttgcccctgaagcccctcctcctactctgccccccgacatggcacaagtcactgtgggcccggggctcttgggggtttcgaccctggggcccaagaggaactccatggttctggatgtggcgttcgtcctggaaggatcggacaaaattggtgaagccgacttcaacaggagcaaggagttcatggaggaggtgattcagcggatggatgtgggccaggacagcatccacgtcacggtgctgcagtactcctacatggtgactgtggagtaccccttcagcgaggcacagtccaaaggggacatcctgcagcgggtgcgagagatccgctaccagggcggcaacaggaccaacactgggctggccctgcggtacctctctgaccacagcttcttggtcagccagggtgaccgggagcaggcgcccaacctggtctacatggtcaccggaaatcctgcctctgatgagatcaagaggctgcctggagacatccaggtggtgcccattggagtgggccctaatgccaacgtgcaggagctggagaggattggctggcccaatgcccctatcctcatccaggactttgagacgctcccccgagaggctcctgacctggtgctgcagaggtgctgctccggagaggggctgcagatccccaccctctcccctgcacctggtatgctggcaccttgtgtgcaggtgggagggctgggcgagggctggcatggccttggtgctacatgcatctgccaagatacgactcgggttctaatcctggcttccctggtctgtgtggccttggttgaaacttgccttcaaagggcctgtgtttcctcacctccctggcagggagacaaactgtgatcctttttcgggggaagatcttttcttattgtgtgtgcttctataaattcaaaggtaatggaagcctattgttaacatttaaacaatgccaataaggagtaaaaaaaaaaaaaaaatgcaagtcttactttatcacacagcctcttccccacccaattccaccctctgccttcaaggtaacctctgttaaaggtggtgatgataagcttcattttgaccacactgggtgggtgaaattattccgagtagctgacattcttcagggcaagaccaggatgtcaggtgtcaggtagcaggtgcagtcttcagacactggagtcagactgccttagtttgaatcttatctctgctacttgctagctgggtaattttgggcaaatacttaacctctttgtatatcgtctatacaaaggatgaggcaaatacttaacctctttgtatatcatctatacaaaggatacacatctttgtgtatcctcatctataaaatggggataataatagcacctacttgcttaaaatagtatctggcacatgacaagtgctcaaaaaaaaatgcttgctcccactgctgttactactaccttttactgacactggcgtctaatccattcctagttcctgaacatctttattcggtgtgtttgggaccatcccagaataataagccttcttttagtatcttttgagtcacacacttgtcagtacttttgtttctttgtttttgtttttattcacggccatagatttatttaaattcttgtaatatttctgctgaggaaaacaacaattacatcatttcatcaaatctcagatgtgctcagacactaacaggagcactaggcatttatagctggaagaatcacagtatgttcacctgccctgcaagatctgaggacacagcagctcattgtccagggaggggctgccgctccatttccttttgcagtctccttgtattgccaggccagtattttactcatttctagaagaatggtggccccttcttaccgaggaagcctatgcctgctgcttttatttgtagacatttaaacttcctttgggtagaattggagtcttctcagtgtctctaaatctgaggtagtccggacccaggaactccatctccccatcccctcctccctggcccacattgcccttgtactcacgaaggcaccccccgccccccttggtggtgccacgtggtcagcacgccctgcagatcctattggatgtcaggttgtaggcctggtggccattgtccctgctggcacctgtgtgctcaccttcctggttgtctttgcagactgcagccagcccctggacgtgatccttctcctggatggctcctccagtttcccagcttcttattttgatgaaatgaagagtttcgccaaggctttcatttcaaaagccaatataggtgggtgagcgaggcacctgaagcagcaggtgacgaagaggctctttttgtggctctacttgattcaaaataatccgcattttctcgttccgtttagggcctcgtctcactcaggtgtcagtgctgcagtatggaagcatcaccaccattgacgtgccatggaacgtggtcccggagaaagcccatttgctgagccttgtggacgtcatgcagcgggagggaggccccagccaaatcggtaacgttggtgccacaggctggatgcagaagctgcattctggttcttatttttggcataagtgactgtgtgacctcggccagtcactttgctccttggccttagtttcttctcctggaaagtgaggggctagatgctcttccacgtctctccagatctcaactgggtgttccttggagtttctgaatcattcagcttttaagtgacttaaggatccaccgttaagacagggtgtcgagccgcagtcagtactgacttggcgtgatctgttctccatcctcaggggatgccttgggctttgctgtgcgatacttgacttcagaaatgcatggtgccaggccgggagcctcaaaggcggtggtcatcctggtcacggacgtctctgtggattcagtggatgcagcagctgatgccgccaggtccaacagtaagaatctggtgtacagtcctcaattcaggagagcgagacttcagaaatgatagaggattaaaagtgggctggggttacttttggatgttgtggctgatattaaatatgctcaataccaacctctgtcctggtttcaaacagcaggaaattatccaaccacgatgtgattaggaaaccaaacaataaaaagtgtgtattgatcctatatctttataactaattataatctttaatttctccacattttccctttgtgtccaggagtgatcatacctctatgccctttctttctaaagtaggattcgtggtctcttactaaaatgtcatgtctgaggccagagtgattcattgtagggccttgagaaccaatgggggctttcatgtatttagagtcctttcctggtaccaggtaatgggcttggcagggttgatggatgagagacaaaggatcatgctgtaggaaagggaaggatccagatgtccagccttgtgctccataagaacatgtgcttatcatgttcttaatatcaacaggatgtgagctgggacaggtggtagagtctagggaccacctcccagctgaagaaggtctgggtgagtggagtgacattgagtcccctcgtggccacctggagaactgttcatctttcagaaccctgcctaggagtgctgtcagaaccctgtcttttctctgctgtcttcctgatgttcttcctgaggaagttatttgctccgttctctatgtcacatatgagctactcaaaatgtgcaaatcgtattgtattgtattgtatttgtaacatatctattccttgcaaaaaactgggagttctttgaaggcaagggaagatcttgcttatttttgtatcatctgtgtatgatgcacaaaataggtgaccatttaacgtttgttgagtgaatgaatgtgacatgtttatgaaatctatgattttagggtaaaggacactaaaagggaaaggatatatatttggataatataacgaacttacaagagctgaaaagctgctaatagaaaatccgttccaacctgaagcacattgcaaattcctagaactttctggagagctgaattgaggaatttcaggatggagattttttctccttcagtatcaagaatccaaagaaagattttcactgggaaagaaagcagttgtggtcttgaagcagatatgatccagagcaagtcatttaaccgtccaaagcctcggtttctcatgtgtaaatgagcatgcacattctctgggctcagccctgtgatattttctcttctcttcttacatatacccccttggtggtctagttcagtgtcatgggtctaaatacatttatacatctttgactttgaaattcgtatctccagcctcacctcaactcagtttgcatgctctaataggcaaaactaaactcctgattttcacatctgtctttcttatcttagaaaatggcaattccaaccttccagttgttcagttcaaaaagctcagcatccttgattcttcttccttttccctgatacctccatgcaagccacgaacaaactatagctccatcttcaaaatacttcgagagtcacacctccccacaccatgtccactagggtcacctcaatccgagtccccatcatctctcacctggactattgaaatagctgtctaactggaaccccagcttccacctttgtcccctgcagatcattctcagcacagcagctgcagtggccctttaatatcaaaatcagctcctgtccctctgctctgtagtcttggctggctttgtttcattcacagaacatggtgagcccttactgtggccaatggagcattgcctgatccatgccctttccctctcttgcttgtccctctctccccagcccccgggagcatgcagtcacatttctgctctggggcctttgcactcactcttctctctgcttgggatgtccctccctcagacatcctcttggctccttccatccttacatcaggtttctgctcagatgccatcttttcaccaaatgcttctccaactgccatatatgcaacgataacccacacctcagccctgggcattctcatcccccttatctcattttgtttttttcctaagcatttatccacatctgaaattctatatatttactttgtttgtgtgtttgttgtctatctctccatgaggacgggggacagggagggactttatgtgcttggttcactgctgtacccctattgcttacaatagtacctgacacagagtagcagctcattaatatctgttgactgaacatcttcctcatagggctgatgtatgtgaccagcctggaaaacatgaggctgtattcagatgctggatataacgtcaggccagtccattttgagccttcttgcccacagatcctttcttgtctctttgctaactctaggagtgacagtgttccctattggaattggagatcgctacgatgcagcccagctacggatcttggcaggcccagcaggcgactccaacgtggtgaagctccagcgaatcgaagacctccctaccatggtcaccttgggcaattccttcctccacaaactgtgctctggtgagtcttataatacctttcttacttccctcaaaaaaaagttccaaaataaacccgccaaagaaacaaaaatagtattcaagagaccccagggtgcccatgcataagatttggccttgaatgaagattattatatagaccaggacctttaagtttctgttcatgggaggtgtataccacaagcccccatggggccagcagaaagctttctgtgtatggtcctatttccactctaattgtccatgtgaacttggcagagagagcctaagcttatttgtgtagagggatcttggacaaaagaatcagaagacataagcaaggaaccccagcgttccgtaggtatagtcttcttccccatgggcctagactaactctcaacatgggtataaagggctttagaaatacgataacacggagactcatatcaaagtaccatagtttaagttgattttaggttagaaacttaaaaaatatgcttttggccaggtgcagtggctcacgtctgtaatcccagcactttgggaggccgaggcgggcggatcatgaggtcaggagatcgagaccatcttggctaacacagtgaaaccctgtctctactaaaaatacaaaaaattagccgggcgtggtggcgggcacctgtagtaccagctacttgggaggctgaggcaggagaatggtgtgaacccgggaggcagagcttgcagtgagccgagatcgcgccactgtactccagcctgggcaacagagtgagactccatctcaaaaaaaaaaaaaaaatacacacacacacacacacacgctttttttgtggcgggggcctgggtttgtatattttcccgttactagatgtaagtcaaaacctgcataaagctactgtccttcgggggaataagtcaatgcaagtttgcccttaaagggcaataactctatgcaagttttgacttatagctaataacattagctgtacagagagatggcagctctcctggtaggaatcttcaagtagatctctttcaggtttccaggatcttgcttcatctccccaccttccccatccctggcgtgatctacatgtgaaccaagataatgacagcgtaagctgtagttattgccatattatcgctgttgttggcatcataattattaataactgcagagcatgtctgaagaaccacaggatgaccacctcagcctcatgtccctatgtctccactgttaaccttgttcagattcttttcagagttgagttgacttcaaaaactagaccaggttgcttaagcagacattgtgaatggttcagaatttctgggtgaaagatgggaactaaggtcttatttgtgtctgttgcaggatttgttaggatttgcatggatgaggatgggaatgagaagagggtaagttcctttctgttgactttgaaagaaaggttagagatgtgtttggggctcttgttcccactggttaatttttcctcctttggtcttagtccagtgcttccttttactattatcttgtttttgcgggtccatctgtacatcttgtgttttgcttcctgtctcatgtacagggggcctccttgctgtgtaggcctgtgttcaattctaggggtcagttgtctggcagatgggcttagagttggagtacctcatcttattccctgcctgaatctgctgttttcttctgcagcccggggacgtctggaccttgccagaccagtgccacaccgtgacttgccagccagatggccagaccttgctgaagagtcatcgggtcaactgtgaccgggggctgaggccttcgtgccctaacagccagtcccctgttaaagtggaagagacctgtggctgccgctggacctgcccctgtgagtcctttgcttctccagccagggcagcgtcaaaggggcagtgcttttagcttggctgtgcagaaaagtagagcaggcacccaccagcccagaagtaccctttccctcatcaccacatgcacagtgctaccttcactcaccttcctttcctcctgtgctctttggacatgcatgcagccagtctcagggatcactgccctctttctctgtctttggaaggcacttccccagattatgcataactggaaggaagaattgcttttctgaggtcaatgctcagcttggctgttggcaagtcaacctttaggaatctgtgtattcagggtatagcagtggaagtatagcagtgagagagacgcttccagaaaactctccaaccacacctatagcaacagtacatcaccaaggcggcctggattaagaggaggaaatatttaaagtccatctcatgtacacttgtggagagcatgtcatccatgggctgggttagccttctgtctcatgtttgggagcaatgactgcttatggtgaccatgactcagcagtggattgtaacctttatgctgaacaggcataactggtgggatgcaatcaaaactgtatttatagctcattccccctttagaatttatttagtgagataaatttccctcttggtctaggtgaaaactccaccagactttaggtttcttctgtttattcataaagaattctatagttactttgtcagaagacaaagtctcagttgataactagatacccactcttgcgtaataatcaaaactttgaatttgattagagttaaaacacctcccagttccaatttaggctgcctgcctctgggaaggagggtatggtcagctttcctctgtacaaagagctttgccttttgtgattaaaagcatatcctggaaattactcgatgtcatttcaaagagagcttcctaatacttcactgtgtaccataggttacccaactgttcttctatggatgtgcgtttaggctgtttccagtgttttgtaatgacaagcaatgctgcaatgagtaaacctgaacatacgaacgaattttcatatggttggaggtgtgtcttcagggtagattcctagaagtgagattcttgggtcaaaagataagtgcatatgaagttccccttagacattcccagattctcctctaacaggtgagatgtggttgtgcaaaactggaatgtccatcagtttggttttcgatcagcgaggtatgagagtgcatgcatctccacggccttgctgagtgtgttgttacagtttttatttattttttttgcaaatttcttacttttcaggaaagaaatagtatctcagtgtacttgaaattcatttctctaatgatgagtgaggttaaacattttatcatatgtttaattgccattttttggtctaattttgtgaattttctgctcatgcctttccccattttcccattagaaaagttgtgataagaaacacatgagatctaccctattaataaattttccagtgtacaataccatattgttagctatttgcaagttgttgtacagcagatctctagaagtttttgttttgtgtgactgaaactatgcccactgaacagcaacttcccattttccccttcccctagcccccgcaaccaccattctgctttttgcttctatgaatttgacgattttagatacctcctgtaagtggattcatgcagtagttatccttctgtgactggctcatttcacttagcttaacatcctccaagttcatctatgttgtggcatatgaaaggatttccttctttctaaagactgaatagtattccattgcatgtatataccacattttctttatccatttgtccactgatgtgcatttggattatttctaactcttggctattgtgaataatgttgcagtgaatgtggaagtgtataagtacctttttgagatcctgatttcaatgcttttggatgaatacccagaagtgggattactgggtcatatgctaatactagttttaattttttgaggaaccttcttactgttttctgtagtcgcgacaccactttacattcctaccatcaatgcacaagggtttcaatttcttcacattcttgttaacacgtggtatttcctggtgtgtgtgtgtgtgtgtgtgtgtgtgtgtgtgtgtgtttgataatggccattctagcacgtatgaggtgatacctcattatggttttgatttgcatttccctgatgatcagtaatgttggatattttttcatataattgagtttttggatgtctctttggaggaatgtcttttcaagtcctttgctcatttttaaattgggttatttgcattttttttttttttgctattgagttgtatgagttcctaatatattttggatattaaccctttatcaaatgtacggtttgcaaatattttcttccattctgtaggctgcctttttattctgttgattgtttctttggctgcacagaagctttttggtttgctgtagtcccacttgtctatttttgcttttgttgccttgtttttggcaatgatatccaagaaatcgtcgccaagaccaatgttgcaaagttcttgtgttttcttttaggagttttataatttcaggttttacgtatcagtgtttaagtttgattttgggttaactttgtgtatgatataaggtaagggtccaatttcattctttttcatgtggacaggttcattgttagtgtattgaaacaaatggttttgtatgttgattttgtattctgcaactgaatttgttttaacttcgctgaatttgctaacaaatttttggtgaaatctttagagttttctatgcatatgatcatgtcatctgcaaatggagataattttacttcttttttgatttgggtgatgttcatatcttcttgattcattgctctagctaagacttctcgtactatgttgaatagaagtggtgagagtgggcatctttgccgtcttcctgattagaggaaaagcttttagttttgcactattcggtgtgatgttagctgtggtattttcattaatggcctttattttgttgaggtaattttcttctattcttagtttgttgaatgttttaatcatgaaatggtgtttgaattatgacaaatgctttatctgtatctgttgacatgatagtatgatttttatcctttgttctgttaatgctatgtatcacctttattgatttttagacgttgagccattctcctatctgagggataaatcccactccgtcagagtgtattatcctttgattgtgctgtttaattcagtttgctgtcattttgttgagaatttttgcatctgtgttcatcaggaatattgacttgtagttttttttaatgtaaagtctttgactttggtatcagggtaattctggcttcataaagtaggtttcccacttcagtgttttggaagagtgtgagaaagattggcattaattcttctttaaatctttggtagaattatccagtgaaagcatctgagctcttatttattgagagattatgattactaatttcatctccttactaatgatggggctgttcagattttctgtttattcatcattcaggcttggtaggttgtatgtttcagggatttattcatttctttaggttatccaatttgttagtgtgtagttgttcatagtagtctcttactaacctttttatttctgcgctatcaattgtaatgtaagctcttctatttctgattttatttatttgagtcttctctttttgtcttggttaatctagctaaagctttgttaattttgttgacctttaaaaaaccaattctaagttttattgatattttgtattctatatttcatttatttttcctcaaatctttattatttccttccttctgctaacttacggcttagtttattcattttctagttcttacattgtaaaattaggttatttgtttgagatctttcttactgtagacatttactgctgtaaactttccttttattgcttttgctgtttcccataagctttgctatgttgtgctttagtttttgtttttctcaaaatattttctgatttttcttttgatttcttctttgactcattggttgttcaagagtgttttttaatttccacatatttgagaactttctgaaattatttctcttagcaatgtctcattttattctgttgtcagaaaagatacttggtatgattttagcctccttaaatttgttaagatttgtttcgtgggctagcatgtgagctattctggagactgttctatgtgtgtttgagaagaatgtataatttgctgttgttgggtagaatgttctgtatttgtttgataggtccacttgggccatagtgttgtttgagttctctgtttccttattgatcttctatctggattttttatccattattgaaagtgagatattaaaatctctcactattatgttgttctatatttatcatcacttctgtcaatatttgcttcttatatttgtgtgctttaatgttgggtgcaatgtacttatatcttcctggtgaattgatgcatttatcactatataatgtccgtttttttgtctcttgtgaccatctttgacttgaagtttaatttctctaagtatggctacctgtgctgtcttttagttaacattggcatgaaatatctttttccatcttctcactttaaacctatgtgcattcttaaatctaaagtgagtctctctcttgtagacagcacatagttggatcttgttttatattttatttatttatttacttaatttatttagatggagtcttgctctgttgcccaggctggagtgcaatggctcgatctcggctcactgcaacctctgcctcccgggttcaagtgattctcctccctcagcctcctaagtagctggaactacaagcacgtgccaccatgcctggctaattttttgtatttttagtagagacggggtttcaccatgttagccaggatggtctcgatctcctgatctctcatgatctgcctacctcagcctcccaaagtgctgggatcacagacatgagccaccgcacctggctgttttattttatttttaaaaattcatttcagccacttcatagcttttgattggagagtttattctacttatacttaaagtaactatggatagggaaggacttactgttgccattttgtaattattttcagtcagtcttgtagcttttttgtccctcttttctactcttactgcccttctttgtgtttcattgatttttttgggtaatgatgagatttgactccttcctcatttccttttgtgtatcttctatagatattttctttgtggttaccatgaagcttacataaaacagcctatacttataacagtctattctaagcttataacaacttaatttcaattgctcacgaaaactctactcttttactgcctctcccccactttacattattgatgtcacaaattatattttttaatgttgtgtattcattaactgatttttatagtgatagttatttttataagtttgtcttttaagtactataccagaattcaaagatttacacattgtcattatagtattaaaatattctatatttgtttatatatttacctttaccaggaattttacctttcatatgttttcatgttgctgcctagcattcttttatttcaacatgatggactccctttagcatttcttataaggcaggtatagtggtgatgaactctttcagcttttgtgcacatgagaaagtctttatttcccctctatttttgaaagacagttttgctagacagagtattcttggctgcccgttgttttcttttgaatagatcatccatctcccttctggcctgcaaggtttctgctgagaaatttgttgatagtctcattgtggcccccttttatatgaaaagttgcttttctcttgctgctttcaaaattctgtttttgtctttgacttttgacaaattgattataatatatgttgtagcggacttctttaaattcattctagttggagtcttttgggcttcttgaagctggatgtctattttcttccctaaatttattcattatttctactttccattgggttttaatcttattcgttattttaaatatttgaactattagctcattatctgtgatataggttgcagtactatttattgacatgttaatatttgccccagtggtgtgagataagaataataatcataaaccaaattttcatatgtgcatgggcttatttctgaactttttttctgattccacttgttgtaagctattcatataccaaaaccacattgtcttaattaccacactgtcttaattaagaggaaatacctctaatattttgtcattaaaggctttatggtatgttttattgtctggtagcactagtacctccacatagctttattctaaagtgttttcctggctattcttttatgtttgttttttctgtatagactttagtgtcaacttgtttacctccataaaaagtttgttggtatttttattggaattgcattaaatttatacattaactttgggagaactggcatttttatgatgttaaatcatcctatccaagaacaagtttgtccacttattcaagctgacttgtctgtcttctagaagtgttttcaggtttattcatttgggttttgcatatttcttgctaagtttattccaagtattgaatcttccttgttgcaattgtaaatgagacttttttcttctccattatgttctttaactacttattatttgtgtatataaagggtattgatatcaatatatataacatctatatatctatatataacctatatatatctgtatatgttaattccatatcctatagctttactgaattcttttattattgagttagttttatcatggattctctagggttttctgggtatgatggtttgtcatttgcaaatagaattgtttttcttttttgtcaatttttgtgcctccaattaatttctcttgtataattccattaataaactttttagtacaatgttgaatagcagtggagtatcttgcacacacacacacgcacacacacacgtgcacacacatatcatgtattttatattatgaaagtatccctcaattctcatttttgagtgtttttttgtcaagagtgattgtggaattttggtgttggtgaaggctttttcagcatctatggagataatctcttgattttttttctttaaatatattgatatggtatattatttgaagaaatttcctaatgttgatcccacttggctatgctttgttattttcataatgtggtgttggattctgtttggtaatattttatttagtacgttggttttgacattcataagtatttttggtcagcaattttaacactacttatttaaattttcagtaatatacatataacataaaatttatccttttaactatttttaagtatatatccagtgacattatcatgaatgaggtcaggagattgagaccagcctggctaacacacggtgaaaccccgtctctactaaaaatacaaaaaattagccgggcgtggtggcgggcgcctgtagttccagttactcgggaggctgaggcaggagaatggcgtgaacccgggaggtggagcttgtagtgagccgagatcttgccactgcactccagcctgggcaacagagcgagactccgtctcaaaaaaaaaaaaaaaaaaagagagagaaagaaaatccacattgttgtgcaaccatcaccaccatccattgccagaacttctttcatcttgtgaaactgaaatgctttattcattagacaatgataccccatttcccccttcctccagcccctggcaacaaccattttgctttctgtctctctgaatgagactactctaagcacctcttttgagtggaattatgcatttttcctattgcgactggcttattctgcttagcataatgtcttcaaggttcatccatgttgtcatcctttgtgtttggttgatttttttttttttgtagtgaaacattttaactcccgtttcctttcttttgtgtatattctataactattttctttatggttaccatggggattacatttaacatcctaaagttataatgctgtactttgaatttataccagctcaactttggtaacagacaaaactctgctcttatacagctctatccccacactctttcagttattgatgtcataaacattacatctttatacactgtgtgttcaaaaacatagacgtatataaattttaatgcattagcctcttaaatcatgtagaaaacaaaaagtgaagtcacaaactaagattacaataatatccagaacttttttggttcctttttatgatttcaatttctttattgaaatttccattcggttcatacatcattttcttgattttgtctacatcttcttttagctctttgataatttttaagacagttgttttaaagtctttctttagtgagtctaccatctggtctttctcagggatagtttctgttgatttactacatgagacagattctgccaatgctattgttgtctaggtggggagacagatatttggtgcttcttactccaccatcttccccgtctcccaccctgtaggttttttgttttttttttgtggtgggggaatactgtcttgatctggtttagatattggtgttaaaactggtttcattaaaagctttaagaagttttctctccttttcagtactctggaacaatttatggagcatcggactatcaggtctttggaagtttaggaaaatttccttgtgaaatcatttggggttggtattttgttttttgtttcttttttttggtggagtaactttctttaattcctactaacttactctaattcttccatgtaaattggtgtgcttaagatttgtcttttatctacaggagttaattttgttaatctccattttcctagaaatttatccatttcatctagattttcacatttattgtatagaggtcttgaaagtagtcttttttttaaactaaaattttgtttattgtttgtatatactctagggtacaagtaaaattttcacagtaatcttttataatatcaaaaattctttttaaatagcgattttcttttgtcatttgttaatttatatacatgtttattatcttttttcttgatcaaattaactcatgatttgtctttctggatttttttaaaaatcaagatttcaatttatttattatgtttactgtttttatattctctactttatggatttctgcttttatccttgctattttatgacttctttccttgaattttcttttagtttaccttttgtgcttttctatttaattggaactgggaatttcattcattttcattgttttatttttattgacagaaatgtttactgttatgaattttcctaggatcactttatatgtatcccaatgagtctgatatgtagtgtatttattatcattattttctaaagaaattctgtactatctgtttttattgtccctttcacccaggatttatatcataaattaaaaaaatttccaagtgtaaagatctttttaaacaataattaaaaaatttttaattttactatactctgacgagagtatctgtaatagttctactttgtggaagttaccgttattttcttcgtgatctaatacatgatcagtttttgtgaaggtgtattctctattatcagggtgtagagtatgagatccctcgctctcttcctgtcacccctccatgagaactacatattttgattttaatgtttgtcttctatagtcttacttaccttttccccattttatctatctggttctgaaagggatgtctaaaagtatcctgttattagtttgtctaccaatgtctccttgcttctcctatagtttttgctctatgaagatgttgtctggtgcatagatattcacagctgttatggcttcattgtgaattatactgttcagaatgctcttattagtcacatttaatcttttttttggctagaattttactttgtctgatatcaaaatctccatccctgttttcttattgtttgatatcctttgtctgtccctttactttagcctttctgaattttagttatatagcaatagttgggtcttgcctttgagccgaattgaaaacctttttgttttagtagacaagttaagcccattctcatttattgccatcttgtgtttgatcttctttcgtcattatattttataattgtttgttatatatttttcatttataaatgtggtgatacgttaaggtgtctaggaaggtttatgcttttgttcctgtcattacctttgaagttatacctttctaaaatgccttcaggcccatatttttaaatttaagcattcattaatcagtttttcagtttttaatagcattctttaacttctacctgtggctatccaacaatcaatgaggttattctaacttttcttgttccctcccctctcctcccattgtcgagttctattatttctactgtcacagcatataacatttgcacattagtcttccattcttcgttttagttttagatctatgactatataaataaaaatgctcactttagttgttttgttaacatttcctagtcatctcttagttggaggaaatgttctctagtagatttctttttttttttttttttttttttgagacagagtctcgctctgtggctcaggctggagtgcagaggcgcgatctcggctcactgcaagctccgcctcccaggttcacgccattctcctgcctcagcctcccgagtagctgggactacaggcgcccgccaccacgcctggctaatttttcgtatttttttttttgtagagacggggtttcaccgtgttagccgggatggtctccatcacctgacctcgtgatccgcctgcctcggcctcccaaagttctgggattccaggcgtgagccaccgcgcctgggtctctagtagatatcttaagaagggcttatgtgtacagaattccattaattcctatgtatttaaaactgtttttctatagcattgatgctagaagggcaccttggctgaatacagaattcttgattcacattttctttcactaaatttctgaaaaatgctgctccattgttgccttgctttgtatattgcttttgaaaattctgataccaatataattcttttgtccttgtaaattatttgatctttttgcctgaaggcctggaaaattttttctttatgtttgaagtctaatagtgtactgtaatatgtctcagagttgactgttttgggttaatttttccggacatctggcacatgactcccatacatagatttggttcttttttgatttccagaatgttttcatgagttatattctttaagtgttagttctgttccattgttttgttttctcttttaagagtccattttttctcctgtcttacattttcattactgtctctttgacctttatactttcttcattaactcattttcattctcttgattggtttttttttgcttttctctgatgctctttattaaattcttattttgatgtcatcttccttgggtacttataatttagtctttatttcagagttgactttgcacttttattacccacccccaccaagttcactgagttctatttttatttattcttgtctttgttcatttctcttcttagtttttgaaattctgattcaaggtggttttcatttgtgcagatgtttgagtatatttaattcagtttgagtattgtctcatagttttcttctatgtcataacattttgttttttgttttttcctttttgtggaattttcattagatgaggagtgttggttctcattttctgatcttttgaagaagcttttatggacttgcttaatctgttcattttgtgaattttgggttttacaagatttctggttcagtgaccctcctttctattagtatagaaaagtcatttccttagtggtgtgtgtgtgtgtgtgtgtgtgtgtgtgtgtatgtgtgtacatgtggatcctgaaggattgtgtggcctctgatttttcaggtttttctggaccctgactttcccgtttgctttatttttatgtctccagtcactttccaagcacctttccatttctttttgctcccagtccccttgaaactatgcttttcaggttgtcaccaaatattgcgtgtgtttttagcacctgctctggtctgttgggatacttcaaaatatttttgcccttaggataggcttttctttctggtggtagtggtggttatagagaaattttaggcttgctgcccactctcttctctcttcttttcagttctccttggattgtccttgctcatgacaaaggctaacagttagaggatgagggatttttgctgggtgggatttggtgttttttctcttttactttatttacggctattttaaagtttggatgtttttggctgggtgcagtggctcacgcctgtaatcccagcactttgggaggtcaaggcagatcacgaggtcaggagttcgagaccagcctggccaacatggtgaaactctgtctccactaaaaatacaaaagttagccaggtgtggtggcgcatgcctgtaatcctagctacttgggaggctgaggcaggagaatcgcctgaacccggggaggcggaggttgcagtgagccaagatcgcgccattgcgctctggccttggtgacaagagtgacacttctcttggaaaaaaaataaaaataaaaataaaaataaataaaatttgggtattttcttgttttctacttatgctgaaagcatgcttttttcatagtaatttaatttgttcttattgttcttcactgtgttcagaggatatatatctccctacatatttatttgccttgtagtttattttattctcatgaccgttggggctggctccttgacttgaccatatatatatatatatatatatatatatatatatattttttttttttttttttttttttttttttttttgacggagtctcggaatctcggctcactgcaagctctgcctcccgagttcacgccagtctcctgcctcagcctcccgagtagctgggactacaggtgcccgccaccatgcctggctaattttttgtatttttagtagagttggggtttcaccatgttagccaggatggtctcgatctcctgaccttgtgatccgcccgcctcggccttccaaagtgctgagattacaggtatgagccactgtgcccggccaacttgacaatattaatagctgaagtattagggcccactttggctacctggacgtctttttgaacatttgtgttttgctaacaattcactttagtatctgatatcattacattttgacaatcagccaaaagttttaatataatattcaatcacaaatatttgtattgtcacttggaaagataatgagtaagaagatgttgaagaaaaggagagagatgagataaaatgatttcaggagatatttatgagtgatatactttactctgtgataatattttataactgtgcagtaacattttgttatataactctaatgtattaatttttaattggttcggcctaactttctctatgtcctgaacattggaatgtgttaatatatatggctcattaaaactaatcactaaactggagtataatgtgatggtttgttgggaggtaatttggtattctggagatggaaggacctcaagttttactatacctacaatacagcaatttacaaactattgaatttattttgtgtcttattcataaagatttggagatctgtttgttaaacatgcacatgtgagtcatgcactattaggtaggcatttcatctatattgcaactaattctcacaagaatactaaaaggtatcgattataggcctattatgcagaggagataggagaggatcagtaaagttaagtaactgatccaaggtcacagtgcaagcaagtgaaacagaaaccaacccctagtttctctggctgtaaagtacccattacacagtcacagttcatcttagggtgggcagagccattctcactaacttgccttgtgtgagctaagaccatttctttgccttgtgatttattccatccttatggcagttgggctgactccttgacgtgacaatatcaacagctgcgtgttggggatcacttgcagcatggatgttagtaagccagtagtattcagtactgtcacttggaaatgactgactgctcaaggacataggggatttttagtagaacttctggggaggctgcttagctctgatggtgcttccagacccatcatttgtcagtggttgtgctgcttgacagtaacccccatagggagaggttggctcaggcttggctatgagtgagggatgttagtggggcctccctgctccaccgaatctgtgtctcagctcttgggcatgtattcacctgccattgtagatgtggtcgtggtttgtctggaaagcttatctccaactttacttaggtccaagattagctttcaaatcatttatggtggtggtgccttcaatgtgaggatttttaccaaatcatcttatgtaggtgcaaaatgatcagtattcaccaataatgttttaataggaatcttgagaatttgccaattatgtgaatgactcagggtcaaatgagggagcattgagactcaaccattttttttttttttttttttttggctctggaaatatttctcctgtgcgatctcttaagggattaagtcaacatggtcacttgtaccattaccttagtcacttggcagctgaaaggacacgtgtctttaggtgaattttctttacaatgagatcatgagctcatagcttgcttagcttttcttaatttccacgagtcataacacccctggaacttaactttgttttctgggccaaggcatccctgtagaatggattattcacactgtacatttaaattttttagaagtgtggttctataatttgccacattttatgtaacaggaaaatatttaatggccaagtgttacttacctaaacctctctacctctcagagccccagtttcctaatctgtaaaaaaaggaggaaattgttctatatgacctcaaagggcctgttccattctctactgtatttatctgtgtgcaacttggtcacacctgcctgtctgcatgtagtaggcatgggggtttggataacgtcgcatccatcctctgcttctctctgtccaggcgtgtgcacaggcagctccactcggcacatcgtgacctttgatgggcagaatttcaagctgactggcagctgttcttatgtcctatttcaaaacaaggagcaggacctggaggtgattctccataatggtgcctgcagccctggagcaaggcagggctgcatgaaatccatcgaggtgaagcacagtgccctctccgtcgagctgcacagtgacatggaggtgagaagtactttctgtggatccgtggtaaggcaatagaatgtcaggaaaaccacctggacctggtggcagttgcttttagttgatgctcttgttaggagctctgccttctgcttaagtggaggagaggagtaccactttcttagaggggtttattgccatccccttgtcttggcgtgatttcatgttgttccgggctcagatttgcaagatggaatcacttttagatagcataaaattgtgaatttagtgccagtttctggcactggtggagaattgggattggcatcaggattgttcactcggaaggtattatgagtccaatgcctaaaccctgtaagctttccaaagggaaacatttatggcctaaattaggtcttttgaaaatatttaaggcctacataaaacgtcaggctccaaaatttgaaaagaaaactgcaaaactgatatatatatatataaatgattgattaaatgcttacaaaaggttacactatgccaacttctttacttgttcgtgtagaaatcataaatatttcattgtgtgaaaacaacttgtaagctagattttctcacttcgcaagaattcctgaatttgaacaataattgcagaaaaatcttagtcatatatcaagtgagtaactcatagccaaaaattaaaaaatcaaaatgataaaaaatccttccaaaaattttacagcaaaattatattcattgtggaatgtgagtacattttaatgtgtttgatatgatatatggtggggctgcccaagaaagagcgtctagtggcacacatacacacaaagaagacttaaagtggtcccattaaaacaccagtgtccaaccttttggcttccctgggccacactggaagaggaattgtcttgggccacacatacaatgcattaacactaacgatagctgatgagctaaaaaaaaggtctgggcataattttctgatatccaccaccacagagaagcaaaaatgtccttgcattcaaagggttggacacagctgctagatgctcttggagacactgctctgatgagttggcaataaggcgactttcccagcctgtcttaaaggcattgcccttccctgttgagtcacatagactcaaggttccttttaatctccaggcttttaggttcttggtgcatggccacccgtacagtattacaacagcctgttttctggtcaagctctgtaaagtcaagctctgttttctagtcaagctcttctttatcttagaagagctgccgacaaatatcaaggtttgtggctgatgttgcagttgagtgtgatgaatgtgcaggaactctcggtaacttccctaaaaacctaggattcctcattgctaggactacggatgagctctttcttctttgtgcaggtgacggtgaatgggagactggtctctgttccttacgtgggtgggaacatggaagtcaacgtttatggtgccatcatgcatgaggtcagattcaatcaccttggtcacatcttcacattcactccacaaaacaatgagttccaactgcagctcagccccaagacttttgcttcaaagacgtatggtctgtgtggtaagaacattttctcaactcctcttctccccctgctatacatttataaaccttacttgctctactctgaggctcttggatgcttatatttcagggtctagtagcgagggtcagattctggtgaggatcaagaatggcctgtctctggcatcaatgtttttgtacccagggccactcagtttatcttttttttgtttgtttgtttctctagggatctgtgatgagaacggagccaatgacttcatgctgagggatggcacagtcaccacagactggaaaacacttgttcaggaatggactgtgcagcggccagggcagacgtgccagcccatcctggaggagcagtgtcttgtccccgacagctcccactgccaggtcctcctcttaccactgtttgctgaatgccacaaggtcctggctccagccacattctatgccatctgccagcaggacagttgccaccaggagcaagtgtgtgaggtgatcgcctcttatgcccacctctgtcggaccaacggggtctgcgttgactggaggacacctgatttctgtggtgagtctccaagttacctctgaaaatcctggagaccagctaactgggcttgctcagcctctctgtgccccagattctttatctggctaataaggatgaaaatccctgtatttcgtatgacctgggattccagttaggatcaaataagatggaagatatatatatacatatacatatatgtatatgtgtgtgtgtgtatatatatatatatacacacacacacacacatatatatgtatatatatacacacatacactctgcacgtagaatttttatgtaaattaatgcatggtcctttccattagtatttctatagttcagacaaatgcgattttaatgtgttagacacatataggcatctgtaaagggctgtgtaaccagtcacattgaatttgaaattccaccaagctttagcacacacttacagtgtagtccatgcctgagcaggattttgaagtgcaagtagaatcattggttgccaagagtcttctcagttataaacactgcaggattgctagtgcagacagcccctccccaaggtcagcttccctacctggacttggcatttatttaaagtacaggggaaactgaaatgaatcagatatggctcctgtccctcaggggtgctggagtgaaaagaatactgaacttgaaaccctcagtcatcaaatataatcctcgactatttttttgagggaaatcaatatgtacatgcctgttagagcctcagagtttatcatcatggaactgtcagcagctctgagctgggtctggaggacttgggcatcctagtcccagctcagctggtggatggactgttctcttagtctttctggacctcagtttctgcatcctagaatgagatagttggcctagataacctgtaggttccttagggctctgattttctgaggccatgtggatgatactgcctcctcccaatcagcctgcaaatcaaggggcaaatgttagtttctaagttactggaagcactttctctgcatactgatttctttgtgtacctcctggttatttactgtgcacacagagggaaatctttggtgctccaaatccttggaaacttcgtccatcacctgcctgccttggtgccttgaggatgtgaggaagttgttgagcgaatcagaacgagggaaatgaatcaccttgtagcttctctcccaaggcagttctaagctgtgtattcctaatttaaagatgcttttcaagcataaaagacatatgtattcaaaaaaggacaacaaaacctactaaggacacacaggttcacaacatttgttaggactagatttggctgctagtagcagagaattaaaattttctgtcatacaactgatcggaggcggtggctccagctgattctgggcctcaaactggattctagttccttgctctgccctcagttgggtgtggtctttttcttcatggtctaagatggagttctagccatcacattcatgctccaaggaggaagctgagggaaggagggaagagggacaaggagcatgcatagctgtcttttaaaatggactcctggaagctgccatgggatactatactttcttttacagttcattgggcagaactagtcatgtgactacacttagctgcaagaaaggttgggaaatatagtcctcattctggtggtcatatgcccagcctaaagttctgtttctatggaaggtggggaggatgaagattggtggaaaatagccgtctctgccctggcaagtttgtctgatgattaaccatgttgaatcagctgtgcccatttcactctggctggtgtgggcctttgcaagtgacctccttctctgtctacagctatgtcatgcccaccatctctggtctacaaccactgtgagcatggctgtccccggcactgtgatggcaacgtgagctcctgtggggaccatccctccgaaggctgtttctgccctccagataaagtcatgttggaaggcagctgtgtccctgaagaggcctgcactcagtgcattggtgaggatggagtccagcaccaggtaggagcctgggcctttcacttcccatggggctgcttccctcttgggtcaaaagggagatatgttcaccagtgattggcctcttccaactgtggcagcagggttgactcttacggggatcattagggatagggaggcagtattgtgtaatggccttgcattcagatagctcttggttcaaatcctgcgtctgtcatgtattatctgtgggattaaacatcaaagtgttgttaccacattattattatgattgttattactattgtctttatgattatagtcatttaagcagaatgatacagaaatccaggagggaaagggaaaagaatattttgtgtcataatgtctgccattgttaagagagattatgtaccttgattgtgctaaacccaatatattcattatcttagtgtttttcaaaggtgtattttgcagggtattaacagttacttgtggtcaagtgagtttaaagaacaccagctaaccatagttaaacaggtttctttattgcagaactctttagtctttttaatatactactgtaccttgcagatatttaagagagtttttgtttctcaaacttatttgatcatggagcgtgtgtgtgcatgcgtgtgtgtgtgtgtgtgtgtgtgtgtgtgtgtgtgtgtgagaatcccttgggactgggattccacagaatacattattgtatcctgtgtcactcataaatacaaaaatcctatgaagaaactaagacctaaagagctcagtaagttacccatggaaacaatttataagtaatggagttgatctcagaatttgaagctctatgtgactccaaagatctggctctttccactatatgaaatggcccttttgctgcatcttttttgggctgatttgcttgggagtcactgagtcatcaaaattttttttttttttttttttttttttttttttttttttttagctctatgggagttattgagtgtattttgaaagcatatttaccagactcctccgtcttggcctaaaatggctgtcatctctcttcaaagttgaccccgtgtatatttgtaggatctggggcagtgtgtgtctgtgcacatgtgaacgtgtacatgtgaatgtgtgcagtggccctgtccttcatgcttgacagtgatactacagaccgtggtagagatagaagcatatttggcttctaggaaaggagaatgtgttttgtgatcatggactgcactcaagacctaatgtcttcatcgccaaggaggaccattcttgctaagtggaccaagtagagtgacttaccactatgttcaaccacgaataggagaactcatggtaaatgtagctaaccagcctgcagaatagtgaaaacaacatttcagtaactacactattctgtccctgatgttataagccaggatagggaccattttatatgattctccccaaagctctatagggtcataatcgcacatcctattgaatggatgagactgaggctcaatggcatgaggtgataaagctgggatttatattcataacatcagtcatcctatagtgtcctagccctgccattgacctcactggaactgtgagctgaactctgggctaactcatgttcattggagcatgggtatccattagggctattacttatagtcacttatagtgatctcatctgctctagtttagttgttgggctttgtcctagtggatccaatttgtcctcaccgtggaatagatgagctaaagtcctactctactgccatatttcaacttgccaagttaagtaattgcctgttctgtgatattccctaaatgagttgacaaaaccttatattcctctccttgatttgtatagctcctgagctcctgcagggcttgaatgatgtggaccaatttacatatggggctagaaacctgtggtaatttcagaccggttttactagtagtggcaaaatgcttgctctcagaaggagacagaaatgatcttttccttggcgttctgtgatgagaagtgagctcaagtttgcagcatttctggctcatgagtgtcaaatgtctgcaaggtcctgagagcaggaagactgtgaactttatcttagtgtctccaaacccctatcctttgcttctcctttctggtgctattttcccctttcactgcccgcctcatcttcagtccaacacattagaatatgcattcaagttgtataaagtttccatccaaatattttggatgtagaaaccgtcttataaatatattttaaaatcaggtaaaataaaattagttaattgaaaactttgaaaacaacacagccacttttagtgatttcagaaaatacagtttaaatgaatgaaaacaaacatcatatccagccacgtgcattttcaactttgactttcaaagcagagaaagaataaaaacctaatgtgaagaacatttccattaaagaaacttttttttttaaactgaaaaataaagcccagaaaaccttttattaagggaaataaactagggtataaaactattgtagtaatttcagaagagcaaaatattcactagttttcatagctcttgtttattttacaaaacagagtctaaagaggtgagtctttggagtaggatcagaagggaccaagagcctgcacaggctgtccctggctcagtggagctgctggtggtggtgggtgctgtagtgacaggcacaagtttagcaggaaccttgtccatggcccagaagctctggcccgtagcctccttccctctcccttagtctctgctgtccctagctgggctcagtgtttgcatttcatttgcatcccccatcacattggctggtggtgggtggtgcatgatgaattgcttgtgtccttctttgaccttgggccttgaaaatgtcagttttcccaccttattctctgcaggccgatcttttgtcaccttcattcagactttaactcctgctggctctcataccggttctggcctggtgatagtcacgcctgggccctggaacctggcgattgcgactgcctgcctgcagttggcctgggcttgtgcagcagtgccatctgccggccgcgttgctgcatagcctggccaggcctggagagccactacggttgcttttagaagcttggccttagcttgttttttaaatttttaatttttattcttttccctgccttgggcaggccttaagcttcctgggaaatgaaaatccccagcggaggaggttggacacctgcttttggtcatctgttgtgtgttacccattctcaggatagttggaaaattgtgtgatttattcttgagtttaaatatctgaggtctgcgtttaaaaggagagaaaaaagaacactgaaacatatacagaacatgactctctccttccgcatcccctcatgtctgccaattcgaccccctgccccagccctccgaggccagcgccctgggcccctccctccaccttcccagctggagtggcagccgctgtgtcttttctggtttttattcctagtccttcccttttccgtcctgcatgctgtcgccagggttgtctttatttagctcttctctgtgaggcagggcctcctccattgtcttcagccacctgcctcacctgtgatgccgggcactgcgggagtgttccttcgtctgtgcctttgttagctgtttcccacctggaattcctcctcctttcccctttgcccaagtcttcctgtgcttcataggtgcacccttgtgagactctctggagtgcccaatcttagtggactctccttttgcactcttactgctcttttattttttatttttacaaatagctttattgagatataatttacatgccacaaacagcacatatttaaagtgtacaatttgataggttttgacatatgtacacacctataaaaccattgacataaccaagataatgaatttccatcccccaaaggttagcttatgcccttttaaatatatccctcaaccctagacaactactggtctgctttctgtcactatagattcgtttacattttctggaatttcacataaatggaatcatgcctacgcacttcttttctgcctggcttccttcacccagcataacgcttttgggattcatccatgatgctgtctgttttgatagttttctccttctcattgctaggtggtattccacggtgtgtgtgtatcacaatttatttttctcattcagattttcacgaatgagtcttatttcctcaacctgactgtcagccattcgagggctaggatggtgtgttcagacctgcccacgatgggcactgtgtctgttgatgagaagcagttgtgctgcaagaggctaggcctgtggtgtctggggccagaatgctaagttcgaagcctggatgtgccacttggtcaaatttcttaacttcttggtgtctcagtttcattatttgtaaatatagatactactacttatctggtagtgttattattaggaaaataaagtacataaatgtaaaactcttagaaaaatatcttgaacatatttattattagttacctgtgggaggcagcagagcatggtggtttaaaaccatggatttgggccgggcatagtggctcacacctgtaatcccagcactttgggaggctgaggcaggtggatcacttgaggtcaggaattcgagacccagcctggccaacatggtgaaatcctgtctctactaaaatacaaaaattagctgggtatggtggcacatgcctatagtcccaactatttgggaggctgaggcaggagaatcacttaaactcgggaggcagaggttgcaatgagccgagatcatgccactgcactgcagtctaggcgagagagtgcgactctgtctcaaaacaaacaaacaaacaaacaaacaaaaaccaaaacataaaataacaaagaaacaaaccatggatttggattcaaatcctcactctgtcgctgtgcctgtgggaacctagcaggtgccttagctttctcattggaaaagtgagggcagtggtaaaacatatcctcaccgtaggactgcagtgaggattacatgagtgatttaaataaagtcctcaacacagtggcacacagcaggtggcatctgaatgttagctgctatcatttattgagtgagtgaaaggtgtcaagggcaggaccagaggggttaatcctgaaggagggcagggcactttgggggaagggggccttacttgtgggtatttgatcttccttcttagctgactgattgctgactgtggaagtaataagtaagaccttcttgacctgggaacttcttagaggcctttgagctactggataagaatgtgtttcttcaggggcaatttcacttgaatttaattttaagtttaaatttaactttatggctgaatccagagggagactgagtcctggctctgcttcttattagtggagctctttgctgtgtaccctgtgctaatcacagtttctcactccttacaacagtcctgcaaggcaggcttgagtacgctcattttacaggtgaggaaactgaggcacagcggaatgcagcctttgttagagttcaggagttcctgacttcaaagccttgtgctgtggggctgtgtgtaccttcgagaaggctgctctctgccctgggccgtctcccatttgaaaaatcagagaactgcactcaggcctctaaagtcactgcgggcatcaagaatgtgatgctttcaagagttttgctgtcctccccaccgctcttcctaccctattgtctgaagtcaatttcagaaataaatggatttttttccccaagcaacaacccaatttctcctttggcttgagaaatgactagcagtgcgatccaagaactctcatttttctttctttgcttggttttagcactgccaacagagaaggctgtagtgaaaatttccgcatgttagtttacaaagcaatgtggcaaccacctttctgaaagccattagaacctcacaacctcctttcagcctgcttttgtttgcctgtgaggctctgtcagagggctgggtcagggactggcccttgccggaggcagggagagctgacctctgtgaattctgggcttcgtacctagaatgtcctgtgccctttctgaacctcgctttgccctcagttcctggaagcctgggtcccggaccaccagccctgtcagatctgcacatgcctcagcgggcggaaggtcaactgcacaacgcagccctgccccacggccaaaggtgagagtcctcccctccctggtgccttcatggaggaacaagggcccctgcaaggccccccagccacccatcttcacctctggcagagcagactcaaacactggcacctagagtcctagagtgggtgggcttccttgcccagcctgcatttcccatcactgggcctgggagccccattctgcacctggggtcgacattctcagattaaccctcgcctctggtccccagcaacggtcagacttaagagtcccctggagggtaaatgtgagggtgtcaacaggaacatggggacactcatctgtcagaggtcccgtggcctggatccttgtgggatgaccgtacagaactcctactagttttcagtgagcaagaacatttcaaatccctctgaggctgtcccaccactaatttctctgacttttgtggccgttcctctcctctagctcccacgtgtggcctgtgtgaagtagcccgcctccgccagaatgcagaccagtgctgccccgagtatgagtgtggtatgtgtcccaccagggggatgtctccagggcccaaccctagccccagggggcaccacgttgaaggtgctgaaaggtgtctctgttctcaggcacagggtgtgtgaaaggaggtgggtaaggaccgactggatactccaaaaaagtggaaagggttacctctggagaataggatttgcttcctagaagaatctactgtaaattactaaacacaggtttgacaggattaatacaagaatggggtgattactggggactatggagatatactgaagaaaaggtcatgccaaagcaacccattttcattttcaataagattttgaggctgctagatatagagaagaccacacactgggcaccttgagttcagcaggttgtttgctagaggttttcatgctagccttgcaggctgctctgtgaatagtgggctgaataatggtataagtccgtgaattcagagctgatggaattacggttagcatggcaggaaatcattagtgcctttgtcccagtcctgtccagtgtgtttattgcttgtacagatgaagacctaaagcacaggcttgtacaatttgcagtgatgcagatattgaagggagagcagatagatcaggggacagtccaaggaactaaaagaaaatcatataatcggagaaacttatttgtactcatgaaattgatcagaaataaatagaagtcctgtaggggagggagatgtggcttgagaacaattaatgtaaaggaggtcttagaatgttagcagtagagagaactagagggatcatttacttcaagcccctcattttatagacattactagtctcctacaatgtgccgggcactttgcccttattattttgtgaactcctcagactgatcctataaggtagagttcccaccttccagaagaagaaacaggtctagaggatccaagttgacttggctgagatgtgaaagccctagtggatgataagaataatcagtatgtgacttggattgatctatctgtctgtctgtctgtctgtctatctatctatctatctatctatctatctatctatctatctatccatctatccatccatcctatgtatttatcatctgtcctatctctatctaacctatgtatctatttatcatctatcctgtctctatctatcctatgtatctatcatctatcctatctctatctaagctatatatctatttatcatctatcctctatcatctatctatctatctatctatctctattgtatctagttatctatcctatatctatgtatgtatctatctgtctgtctaatctatctaacctgtgtatctatttataatctatcctatctctatctaacctatgtatctatcatctatcctatctctgtctaacatatgtatctatcatctattctatatctatctgtctatctaccctatgttttatcatctatcctatctctctctaagctgtgtatctatcatctatcctctatctatcatccatctatctatctatctatctaatgtacctagttatctatcctgtatgtatgtatgtatgtatgtatctatctatctatcaaatctatctcatgtatctagttatcattctatctatctatctatctatctatctatctatcctaacccatgtaatctctgtctccatcatcatcacttacctaaaacagtagaagtctgcatgaataggaatgtagcatcccactcacaggtaataaaagagtaacctttctgaactctgcatggacgtctctctttctggccctcagtgtgtgacccagtgagctgtgacctgcccccagtgcctcactgtgaacgtggcctccagcccacactgaccaaccctggcgagtgcagacccaacttcacctgcggtaaggcctctgtggatgaggaggggtggtgtggcctctctctgctggtgtgagggaggccatcctcctcagggacctcttccaagatcacgtcatttcctgttttctacctagctgaatctgggttgggagtacatctggaacagaggggttagggtcacacctgcacggaatccttccggctgcacgctgctgaaggataccaggtgtgggcacagccacaggcacctccgtcttgggtttatgaagaagcagctggggctgagatgaggaggcctccgaatctaatctttatttctgcccatcctcctgtatgtcatcaaggggagggaatgtttccttgacttcccctcatcattggatcttattcccaaacaaatttatagtttttcgcctctgaaggtgtatatatgtaatcactatatactgtaacttaaacatagcgatggactaaaataagacacgacaagaaaccaaattctgtatttacctcccgagaatccccactctaactccgttggcgttcttgtcctgctgatgtggacactcacccgacttcctagatgtgagacttcaaggtgggaggagagcacattgtgtttgaagggagctggaaacaggcaaaggacacagggacaggatttggtcttttaaaagtgacattgtggctttgacaagattgctggcaatctttcattccacactgattgctggcggacctaaagtgtagggtattgttctaggtactgaggtggggataggatcacagaagctcctggcatagaacagtgcttagcagggcgtggtgtacccagacctactggacttagagattctacatctgacacctctgagaatgaaggaacccgccccttccagatgtatgtgggaaagtgatagagcagggattgagcagccttcacttctcctccattagagttcctagcttcacatttccctttttgattaatgttcatatttttctgcagatggactgcttttggtaacattgaataactcccagcccgtgagcttggccctcacacatttctgacttaatcttctgagtctaaagctccctggcaccctatagcatagctgaatacttacgagccctggctgggcgcagtgctcagtgtggccttgtcctaccctcagcctgcaggaaggaggagtgcaaaagagtgtccccaccctcctgccccccgcaccgtttgcccacccttcggaagacccagtgctgtgatgagtatgagtgtgcctgcaactgtgtcaactccacagtgagctgtccccttgggtacttggcctcaactgccaccaatgactgtggctgtaccacaaccacctgccttcccgacaaggtaaggactgcttggctattaactatcagttaatagtttactcatttatttattgctgtcagtttatccttctatccacccatccattcatccatccacctacccatccaatatttgctaagcaacatgtgctcctcatggaagatttgcatcctacccagcattcccttcttgcccaaaccaagtgctacaaggcttggttggggggcagtcagcattccagctcagcctgagtggaaatttagttaactcaggaggcatttcttgtgagcctactatgtactaagcatggctaggtgctgaggttacaaataatgtgcaggacatggtctttacctttataagcttattttaggttagctaaggaaataacatgattgcatggattatttagagatcagttaatagttatacatacatgttgagatgaggtcttgctatgttgcctaggctggtcttggactcctgggctcaagtgatcctcccacctctgcctcacgagtaggtgagattacaagtgcacaccaccacacctggctacgagcagttaatagtttactcatttatttattgctgtcagtttatccatctatccacccatccattcatccatccatctgcccatccaatatttactaagcaactactatgttctaacagaattggcactgtgctaggtgctatgggagaaatgttaagatgaagttcctatgtatgcccttgttagtatatatgacaatagtctataaactgaatataataaagtgtcaacgaatggtacagattttcattacaaacagcagtcttataggtgaaagagccaccaagattagctatcattaaagatttaattgatggagtgggaaagtgaagggcgcgaaagtggcggagtgagaactgaaatgagccagaactgcagcaggaagacctgagcatagttatagctgctgcattgaggggagtcctgacatgaatgacagacaagctgcagtcatctctccttggagcctgttagggctggaacagatctttatttgtctggaatgcttaagacctctcttcccctctggacgctcttccagctcagggattctaagcacgcagttttggagaagcgggaacaagtctaggaggctacagttgctgctgctgctttcttatatctctgttctccttctcgtcttcctgcccacccctcctgccttgctgtttttctattaatgtttcttgtgtgtctttaatctatagtaatgccactccccatttttatgcctttgatttgttggggaagctgggtcatttgtcctgtagaatgtcatgaattctggatttgactagcagccaccttatggtattgcataatgtgttcctctatcccctgtatttccagtagactagaagttagacccaggggattcattacattcaaggtcaatgcagtagggaggcaagaatacctgatcaagggtgccatgtgcatcacacccagaggcacataatgtccagctgtcctcctccctccctccctacgtcacttccttccttccctccctccctccctccctccctccctacctacctacgtcacttccttccttccctccctccctccctccctccctccctcactccctccctcactcctttcttccttccttccttccttccttccttccttccttccttccttcctttctttcttttctttctttctttcttttcattcgttcttcttttttttttttgagatggagtctcgctctgtcgcccaggctggagtgcagtggcgcagtctcggctcactgcaagctccacctcccgggttcacaccattctcctacctcagcctcccgagtagctgggactacaggcgcccgccaccacgcccggctaattttttgtatttttagtagagacacggtttcactgtgttagccaggatggtctcgatctcctgaccttgtgatccacccgcctctgcctcccaaggtgctgggattactggcatgaaccaccgtgcctggcctcgtttttcttttttttttgagtcgctctgtggccaggttggagtgcagtggcacgatcttggctgattgtagcctcgtactccctggttcaagcgattctcttgcctcagcctcctgagtagctgggattgcaggcgcacaccaccacacccagctaatttttgtattattagtagagacgggatttcaccatgttggccaggatggtctcaatctcttgaccttgtgatccacccgcctcgacctcccaaagtgctgggattacaggcgtcagccaccatgcctggcccagctatcccactttgagagataggactgattatgtgttcagatgaagcaacctatttctgcattgtgaagtttaccccatcaacaatttatagttttactatttataagtgtttgttgtctaagatttattatgtcattaggagtttcaaaattgtgacttttctctacttctatcatactgattgcatttattaactggaattctcccgtaagaaagaactttctcccaactgctttcagttaccctgaaataaaattactttagacaaagtagaataagtgcttgattttttcttttccagttttcatagccatgagttgatgctctagcaactgtcaaggacagcgaaagaggttttttgtttttagcttcattatgaactcatggattcttatgtgtttgatgtgtgttgattcattgtaaactttatttttttttgatattcaagttgtcctccctggggtaaatgggggctcttttaagttggctctggagcctgttggcatggcctcatgagtctttcgtagctttcttgctttctgaaacaataaggcgtgctgggctcaccctgggcatttcctgccctagtccttggatctgccattttgacaaaagtccccctaccttttagtgaaagtggtatttaggcggtatgatctgggtgccaagaatatttatggctctgggttgccattgccttcagacctttttggtgaacagagcttagaaatgcatattttaagagaggataaaaactcgtaaatttgtagtggtatttctgattcaaatgaaattacaggactttacttccttgattttttgcttgtatcatttctcttctaagttgaaaattctggtttcctaacataattaactacttatttgctttatcttgcaatatacctgtaatagtttcaaaactaacctgtaatcctagcactttgggaggccaaggtgggcgggttacctgaagttgggagttcaagaccagctggccaacatggtgaaaccccatctctactaaaaaatacaaaaaattagttgggtgtggtggtgtgcacctgtaattccagctactctgtaggctgaagcaggagaatcacttgaatccgggaggtggaggttgcagtgagccgagattgtgccattgcactctggcctgggctacagagtgagactttgtctcaaaaaataaataaatacataaaatttcctttcagttcttctagtcctaaaaaaaaaacctcattgggggatatttgtgtaaatactaggttttgaagtcatttgaaataactattataattatattatgatgtaatatatcatataattattataaataataattatgtgccactgacgatatctagttaatatttcaatttgttttccatttttagggattgctttttatttcttttaaattttaaaattactatggtgtaaaacacttaaatgattttaaaccccaaattataaaacaagacatattcccaggagtcttactctgtgttttctctaccttattccttcctccaccctataatttatatatgtgaatatatataatatataatatatatatatagagagagagatagggtcttgctctgtcacccaggcacaagtgcagttatgcgacctcaactaacttcagcctccaccccctaggctcagacgatcctccccctcagcctcctgagtagctggaactacagacatatgccaccacatccggctaatttttgtatgtttttgtagagacaaggtttcatcatgttacccatgccggtctggagcttctgaactcaaccaatctgcccgcctcagcctcccaaagtgctgagattacagacatcagccaccgtgcccagcctttataatttttattagtttttctctttttgaaaatataactgaattttatacatgtatatttcttcccatttctcatagaaaggaagcatattatgaattatattttaaattgttctttctcatttaacaatatttgatggagattattctgtatcagtgtgtagagatctgccttattctttcttatagctgcatagtactccattgcatggcagcaccatagttttgtttcaacaagtcccttattggtggacatttgagttgcttcagccttttgctattacaaattgcagtaacaaacagccgtgtgcatctgtcattttgtggtcttgccagtgtgtctttgggatagattcctggaagtgagattctgggtcaaattataaatacacatttacttttgctaagtattgctaaacaattcttctccatagggatggtaacattttcctgcaggccttttaatagaacaaggggtctcattcaataagttcattatacagaagctagaagactgagaagataaatgataatggtttcaaaatgtttgaactgctattatgacattcacagggtggagacccgttttgcataactttggagggcatacttgggattaatttcaaaactgtcattaagtcccgtgatcaaacagcttccttagctcctcattccaacaaaaggatgtccgagcattgtctgtggcgtgcatcccagactttccacgtttccctttcaaccagcctttttcatctgttttcccacatctctaccagagcctattgttcttcccaataggatcccttgtctctcaaacatatcccctgctctgtgtcccagagtctttacttgttatgttcctagtcactcgtgggcaaggggacatgcattcatagcccctgcccaatttgctcgtaagtgggcagagggctcgatgaggatgggctccaagtccaaggacattactgggtctgggcatgtgggtacagcttctcggtgacataggaaggagtgaagtgcagttaaggcaggaagaagggagaccaaggcagccagtgtgttgtattcaagtctgtgggaccatgaaggcctcacgaggggccacccctgagagactggtcatagcttttctaaggctggtgggcagggaaaggaggaggacgaaatctgctttataagcagccctgcatatgggcggagaccacatttggttttatttattgccacattctcagcacttagagcggcttctgtgtagtaggtgctaactcaccgcttgtttcaatgaaacaaatgagttcactcacgaaaacttatgtctacaggtgtgtgtccaccgaagcaccatctaccctgtgggccagttctgggaggagggctgcgatgtgtgcacctgcaccgacatggaggatgccgtgatgggcctccgcgtggcccagtgctcccagaagccctgtgaggacagctgtcggtcggtgagtggggcaggggctgggcatgcctgcagctatcagagcgggaaagtagaggagggcatcttaggaagggtaagaaaggttcttttttttttgaaatggagactcgctctgtcgcccaggctggagtgcagtggcacaatctcggctcactgcaagctctgcctcccgggttcacgaggaagggcaagaaaggttctttagtgacctctggttcaaggctaggggtgaggaagagggagggggttagggctgggtaagaagaaaaagcatgagcaaaggatttctgcgtcatccttctgcagttcagtccttggctaatggtcacgtctgttgtatggccttaagtctaaagtactggtggagtaggtttgagcagagacatggggaggactaaatgcctagaaaagagaacttgaagttttcctttttcttccaccctcatgtatcaccttcgcctgtccctagaacaaatgtatgctctgaattttctaggatcgtccttgtttcagtttactctggtgtttccacatagactgttgattttcagaccatgtttataacttgaggtacggaaaacatgatccctgtttcccaaatccagttcgtggtggctgcccctgaggctcctgtgtgtgctggggtgccctattcttgcatgtttaggatggatcagactggagaaaaagggagcaacaatctgcagggaggactgtgggtaaaattctgcttgctggtttaatgcgattattattactacattattatcagcagataatgatgttaagagaagaggtgccagggcaggcgagcacatccatcttgtggttgcttttgcaaatgtcaatggcagtgaaggcagagttcctgaaggtgttttcgaggtgaatggtttgacggaggagggcctgagggcaaatcccgaaacccaggcccttcacctgctattctacttgcatttgggtactgagagtgagcggaggtgctcagtacctttgggagaggatgacgctgtggtatccaggtgttcctgtgggaaacactaagttttggaaaccctttggttttcttctcctctcacaggccatctgaggccagggaaataacttgctgtcaaataaagagagtgctgcttagaggtcatttttagaaaattgacaaccaatatatttcgtgtttcagtggggagttttgcttgcaaagaatagaacccattcaggctagctacaataaaaggggatttgtagaaaagatacaggaggatctttcagacaggaagtgcaggatttgtaggtgggcaccgtggtcctacagcatgtctctccatttgtcctaagagccggtatttctgtccgtctgctccagctcctcactgcaggccagcttcctctgtgcagaagttttgctttctcacacattttgtttacacacagctttgttaaatctcacttcaactccacacagcttttcagatccgtggttcatccctgtccagtctgacttagttggtctttgtgtttcatggatcaacttctcaagaggaaagttgacaggcccagctcagcccttggatcgggtccgctgtccagttcatgctctggtccagtcaactattgggggagctgcaggtcctggggtataatcctggctgcgtagaaaagctgggggaagtttcaaaaagaagatgagtagggaggtcagggcaggagtggaggaggaaccatgtctagaactcttgaccgtgtgattgctctagggaatcgagtgccctgtcttagaggctgaatgttcacatcttctggggaggagaagggagcctcatggtttaaaatctcaggggacgtgggaggctgggcttcgatctgtactgtgttgagtgaggtgggagcttaagtaagttacagatggtctcagacttcattctgcaaagagggtagtattgttagcattattagctctggtccgacctcagaggcacttgggctcatatatgccggtccatgtgttgtctaggttgtgacagaaaagaaagaacaacactaccatcatcaccctgaagccacagtctgcagaaacacactttccccaagctcctccatagttctctgctcttcgtgtcagaggaatggtggcaggcaagcaggggcattggcggcttctcaggaatgttctaagcgggcctcaggcgatggccttgcttccatgtccatagtgagaggaggcctgcacctctgtacaagcctttgaggggattttccatgaagcctgatggccatctgactcctcacccgtaggctcctgaatgaggctcagtcaaggtgtaggaactgtattctgagaagccaaaggaagtccattagatattatttactctgtgatactcctcaggaagaagaagagggagggctgttcttctcagtatcagacaggaaacagggccaccccagggaatggggttggccagaacctctgtagcttatatgaagcctgtggacactggagggtcctgacccgagcccagagctcgtcctgttaggctggtacaacccgcaactccagtgttgcaagggccagtctgacccaggaagtcagcttttcaaactgtgctcctcagattgcctcagaggggacaagtgaccagagcttggcatctaccacctccatttcagttatagcaattgtgcttaaaggattgtgctgctagatacattcataatttatttttcagtgcatatgttttcaggttgggtggctagtagacctacttagtttcattcttatttgggaaaccaatgaaaacagggtggagaagagagccaggagaagggcctgggatgtgtattttgatacaagatatcaaatgtcgatataagcgagggaatttgttggaggaagggaaaataaagaattgaaaaatataggttggaccctggttgtgcagccagaaaacagggttgctgtggggtatggaggggaatcttagaaagatggaaatttggagggatggctaaaagtgtctgggtttgagaagctagtggggctgtgggaacagacatctggcctgggagccatccgtaatattgacactgtttgcccatggtgagaggcaacaggaaacaaaaataatatgcgaatctcgatcattcagccttctagagaggcgtacgagaatgacagcagatccctaaaggtattaattactgtcttctgtgttctttgagtctttgtttctgaccccctgagaccttgttttttttctttaatggcattttgaatgttctgctgtatcttggagggtgtgtacacagattgaggcatcctaatttgttgtctcctccgtagtacctagtacatcataggtgcacagtaaatgactagaatcttggctgataaaagcctggagacagctcactgcacactgctgggaggtgggcggtgatatcagtaggtctcgtggagactgggtggggttgagccaagtctcaggagtgttgagaccgtccagagagaggcacacgtgttgtgcatcttcagattcggccctgctggggagagtgcttggggagcagagcaggctgccatccacacccgtcctgaacagctgtggttactctttctctcttaaggacacagctccaagatggaacgtagtcctgggttcttttctcttggctcctgggacaaacacactgtcattgctttgactattctttctatagacttttcagaggagggtttcagtccatgttcatgatgctttagccagattggaggaccttctagaggcaagatgggctgacaaacttccaggatgctggtctccctggcatgctttctggggaagctttgtctgttgctctctcatctcacttttcttttgtaaagaacaccgtaccctataaattactaggtaaatgtcaagtaacctcttggggaagcccaaatctgcacgttggtgagcagtattgggatcgagtgttcgtcttgtatgggaggctagccctgcgagagtggagactggatcccagtcatcctgagtgtgcctcccggtcagtgagggtccctagagttggccatgataagggccagattagtaagctgctgctaagggaactctgggctgtctttaatgctcctatggactggatcatggtctctctcaaagtgggatctttcagggggcagaattatatctctgcagctgatgtaagacttcgtttagtgacctggtggttgctgcttcttggcatggccctgaggctggttgacaacaaagatgaaaatgcccagaccagtgatcacttggcacaaccccagggctcagtacgcaggaggcgtaggtaagagcccctgtgtctttgctgctggcctgtccttactctgttttttctgcttttccagggcttcacttacgttctgcatgaaggcgagtgctgtggaaggtgcctgccatctgcctgtgaggtggtgactggctcaccgcggggggactcccagtcttcctggaagagtgtaggtccaggcccccgggacggggaggagggcagattggggccactccagggaccagcgttgaccttggtttcatctcattccctgccctttgctttccccactgggcatttcacccagctgttggtgttatccagatgccagctgggatgacctgccccttaggaaccagttaagacggcctcagccttcccattttgtagattttgggagaagcccagggccctcccagggggattcatgctctctcattcacctgtgaatctgaggtgctgtggctgaggggctggttttgggatggcctcaccacccctccaaagtgccacaggctgcaagtactgttctggaccacatcaacccaggcagggtcctcagaccttttcactgatttctactgaaacctccttggtggttttagggaggtggaaacctttacaacccagaaaaggaacagtatttcccacagtccctctgctatttctgcaggtctggctggggcatcttgccagccccccattgccccactcttgtcctctcctggctggctcacccccgccagtcccttcttctaacacagagcagttcagctgtcccccatgtgctgccaggttctctcttagactctgatgctcatcaagccattttcttaaacacagaggattccgtctttggcggttttagtccagatgctaggagaatcacagttctttcagtctggtcagaaggataaggtgggtggtgccaagtcctggcagccttgggagctggtgctgggaacaggtgaactgcccatatgggccttgcctctgtcttccccagcaagaccaatgcgcttcccttcgagaggaaggccaaaggtctgctatcttgtcctgagcctttcccatctcctacccaggcccattgcctttctcctccccagtgataacagaatgactcactgggctttttcaggtgagtttccacctccccctctagtccgagttgcctatgggttctcttccctgtgttctcccctccccaccttttagtgcttctgctcccatgtgccctggatggaggcaggttttgtttcttctccccagggtcaaggtccagctcagatcaggggctgccccatcctggtggggctgagagctggtccctttgcgctcagtattcctgcccctttccccatctctcatctcccttcaaggcctaccccaccctgcccctcatcagtgtttgcaaagcataaggtgacctgggcttctctcctctacctcaagtctccatcttacctaaaagacttgggtgttggcaatggctttgctgctgaaccatgtcaggggtcagcggggggtggtggcaatgggtcctcttaatgagccagtggccaaggctcagtgagtgagtaatcagaggagggagaagtctggagggtggaatcaggcctgcagtgggaagatttggccacagggagtcaggagtggggggtgaagagaatggctgcaagtgtttggcattttctacacctcatctggaaggagaagaaataagcaggcaccaggagaagtaggtcagggcctgagatggcggcagagggcacctagttacatatctgggtgctggccgacacagagggcactcggagtgacattttctggggaagatcctcctggtgacttttctgaaccatggtcttgggccctttcagcttcttgcccgtggtgacaacccttggggtcaggctacccatgtgcagtcttcgtggacagattgcagggctgcaggggtcccaggccagccttcccgggcttctgccagctccctgtctccccttaccatgggaagtggcaccagcctgggaaatgggttgagcttcccggctgcaccttcccactgatggcccacagtgctgcttcttggccggagtatctgagctcagctcaaaccaatgctgaggaagggagggtgagtcccctggcttctccaaggtgcttgcctgggtgcctcagtcaggtgattttgacccaaactgtttgagtggtgctcactgagacgagccccactcatcccctccgtgggccctaccctgtggtgggacttacatgttaagccaggcttcacgtctagaaaccaccttcctgagagaagagcacattcccaatgggaccctgggctccagccctgccccagcttgttggactaactctggtgccctgcaggtcggctcccagtgggcctccccggagaacccctgcctcatcaatgagtgtgtccgagtgaaggaggaggtctttatacaacaaaggaacgtctcctgcccccagctggaggtccctgtctgcccctcgggctttcagctgagctgtaagacctcagcgtgctgcccaagctgtcgctgtggtaaggcatgcaggctggggctgggctggaccgggcaccacctttaagcctctctttccacttttggctcctgaattctttgcctttttagcaacttagggaaatggataggaccgaaatcttcccatctgctcctactgcttttatgagaaagcaaattaaatgggaaaaccataggaatttcctgaagatcactacatggcaagactgggattcggccctaggcttctctgatttggagaccacctttgaaatgctgtgacgtttcacccaggggaaggcgttcaacttgccaccccaacgctgccaacaaacagaaaaatggcaacaacaacaaaaactagttctttctaccatatcctgctctgaattttatttatttgtttgtttgtttgtttgaggcagattctcactctggagtgactggcgctatctctggataggctagagtgcagtggcactattttggctcactgcaaccttggcctcctgggttcaagcacttttcctgcctcagcctccaagtagctgggattacaggcgtgcgccaccacactcggctaatttttgtatttctagtagagatgtggttttgctatgttggctgggctggtcttgaactcctgacctcaagtgatctgcccacctcggcctcccagagtgctgggattacaggcatgagccactgtgcctggccactgaattcttgaaactgaaattttcaagagtagcgtttcattgtttcataaacccaaacatcctcccattcatcccatctcttaaatgtaaattcacataagcaagcgctgtcacttggagaacgtacggggctcttctcattgtgggctgcatggggaagggaggccgctgtgggctccagcagtaggacccccagcgctgggttgtggggtggggggaaagggccgaccgatacaggagggaggcccagacacggaggaggagccccaaagagagcagcctgctcgccggtctcaccagggtgtgttttgcccactctcactctgcacttttctctcccccagagcgcatggaggcctgcatgctcaatggcactgtcattggggtgagccgctgtcctcttctccagagcaagtggtggggacagggaagggggtactgtgggaaggggagcaggcaagtcattgtaaagcagaaatgaaggaaaccagagagacccaaccccagctttccactgcctgtgggacgtgcctggcatcatggagcccaggctaggaccatcttcctgactctccgggcctgtctcacactcacttcctggcccccacctcaggcacctgtgcatttcttctgtgtgcagagaagcactctgaagtcattgtgcacgttttagtttgtcccctctgccactacctgggctgcctctttggcatgaaagttctcactcttaccatcttgatactggaggtgggaggacgggaaggcagtgggccataggagacaggaggagcagcagagcgatggctcatgggagctatgggtgggtgggcaggagacagggtatgagagtgaggtgagtggggggttgggggatgctggggggcctgaccctggtgcctctgcttccagcccgggaagactgtgatgatcgatgtgtgcacgacctgccgctgcatggtgcaggtgggggtcatctctggattcaagctggagtgcaggaagaccacctgcaacccctgccccctggtaagagaggctcaatggggaccgagggcatggactggacgcgtgtgggacccaggcagtgggacctcactgcggtctttaaataaataaatctctcattattttctgattataaacaataattgacaataataaagaagagactaaaaatcacccacccaaactgcatgcctcagaaataattataattttagttttataagttgcaaacattttcttcctgagttttcagaataaacacagtatttgccaggcttatgatactatgtttacaattctgtatccctttatgtattttaagaaacagcaccaccgttctttgaaaatattaaaaattagtcaacaaatatttatcagacacctcctatgtgcaaggctctacacaacattcctttgaatggatgtgcctcgtgtatacaaccaagctattattgcgggacatttggatggtttcaaatatttcaccctgtttttgccaggccatgctgacgatgcttgttctgaatacttccttgaggtggttctgagaggtggactcctcgttcctagtttgggagatgaaactggcattccgtgggtttcagctgtgacttttagtaacacctcactgggaagttttgagcccatggcggcagggcagggcctgcaagctcaggaggggccttggcttcttcctcaagctcccttctggatgtggggcttctgctgttttagaaaatgccattggtcagaggagtctcttgtgagctagatgcatgaactatggcgatggctttctcagagggtacagggaagtgcttgtctccctcagctcggtgagacagtcggggctgcagcaaggtggagaggagcctcttataagcaggcagcacagtggccagaggggagggggtgggggccaagaggtcgtgcaggtgcgttttacactgttgaggacaagggacaggtagatgttctacatctgtgttcttcatggcaattagaggtatcatgctcaaagtatgggcttaataaaagaagtatggagcggatgggtctgtaggagacacagctgtttctgagagaatgattcagagagagcattccttaattaggaagaaggtaagtatgtggttttccttttgcttattttttaaaaatcccagttgatgttttaggatttggggcccagttgtgtgcacacgtgtgtgtgtgcgtgtgtgtgtgtgtattgtgtaacaaccctcctagaacacatctgggcttccatatggaacgaaacaatgctgcctggagtcgtgtggcatccctttttcctgggatgtccactgaagtccaatcagggcagtcaggagacagcaggccgcccacctcaatgccagcctgtggagacggcactgcagcctgctctctggagggcaggcccgctcactccctgcagtgccctctggtgttcagagggagccacagccgcttcctccgtatctggagaaatccacctttagaatccagtctcagatgtaggtttccaaatactcaaaaatccatggccccatttggcctgtgtattcttcttctttttctccagaattctggtatctcccaggggagtgcaagccacctcctctctcttgagatcccttagattcgccctccctctatgcatctctcaagccttgctgaatccggcctctgctgatcccgttctagctcagcgtcctccgctagtcttactacgtcttctgccacgaagggtctctgggacacctcctgggttgggggtagctgtggtgaattaggtctaggtaggtcggcttgaactgcccacgttgggctgaagtgccagtgttgcccgagatgtgagtcttccgttgcctcccagggaagccagtgctcttacctaaagggagagcagcaggaggcagtttgtgctgacaagtggttgagatgaggcttgacagctgactgctcaaagaaagcatgaggaagagaggtcactctgctgtggaaccctggaaaggcgtcccggaggagggcaaccctgagtggaccttgagcaatgaatgggttgaatgtcgaatagaccttccagggaagggcatggtgaatgaataaccggcagccagaagccggggtgagaaaagggaaacacggggagatggatggaagggctgcgagccgtcgatgaaatacatggaaaggggccctgaggggtgtgcaaggcagttttaggaggacaactgtgtgaggaaagcaggactaattggctgctcagacctaaacaagtgaactctggggctggctgggaacttgctcagcaggaggaggaagaggctgctcctgagaaggatgtttcctgcggtgatcaaatgttctggggaaaacccaaagggcagctctgccctccccttgaacggggaaatgtggaacacatacccccagccagcagcagccaggaaatccagcagtgcccaaacaagtcctgtccatcgtgtgcagctgtggtctggccctgccgggtaggagacatgctgcagagcaggctgttccctccattcacttccatgctctctcctccctcccttgcttcttccaagcccctgccacacccttaacactgttgcccccttcggcttattttctgcctcctttcccttttcttccaaatctttcttctcgcataactgccctccacctttccttttcttggcctaactttgccctctgcctcctgctgtggggattttgcctccctgactgccctgtcctcactggcttttccttctgcctgctcctgaagacacgccaagttcatggcttgatttatgagagcaaatggtttaaattaatctctgagcaagcttactgactcctaaccttgaccttgggacaggtcgtctgtctgggtgctccaaattgacttggtgattcataatagaaaagcctcaggaccccaatgaatggatctctgaatggtgatcactaaatgtggcaaaatgagaaaaagaatgacaacagagttggtttctcacaaagctaaattgattctttaaaaaattctgggattatgtgattacgttctttctgttttttgggggtacgaaggtggaaagggtcaaaagaactataatttgtttttcttctgaaagcaaagctaataatttttagggaatgatgagacagtagatggtagcttggtagctttttgtatgtatgtatgcatgtatgtatgcatgtatgtatgtatgtatgtatgcatgtatgtatgtatgtatgtatgtatgtatttttagacagagtctctctctgtcgcccaggctggagtgcagtggtgagatctcggctcactgcaagccccgcctcccaggttcacgccattctcctgcctcagcctcctgagtagctgggactacaggcgcccaccgccatgcccagctaatttttttcttttttttgtatttttagtagagacggggtttcaccgtgttaaccagaatggtctcaatctcctgacctcgtgatctgcccaccttggcctcccaaagtgctgggattacaggcgtgagccactgcgcctggctgctttttggtttttattttattaaaattgtttaaaacactcttactttgcaaaataaaaagttgccagccctgtttttctcccagtcctgtgtctcgaagctgcttctttgtccgatgcagatataaataaggcgctcttaccttatgccgcttcaacaagtccctagctgcgctgagctatgattgcaccacttgccctccagcctgggtgacagagcgagaccttgtctcaaaaacgaaacaaaacaaacaggaaaacaagttcctagctgaacttacctcctctgtgagtgtaggggtgccaagtaggggccagatgctggggatacaagagaacagcagagacacaatttgcaacttaccatgcttctcagggagaagttttttccagcattctatgggagttccagttacttcctcaccaatgcttggtattgtcatgcttttcaattttagccattgtgaagtgatatcttctagcattttttccttactgcttctctaatttcagaatcttctagtattttaaatttgcatttctctgttggctaatgatgtggagcatcttacatacttattggccatatcatcttttgtgatgtgtttgttcaagcttttggccatttttaaattgggttgtttgccctttaatgattgattatgagtttttttctgtattttggatactagtcctttataaggtatctaatgaaatattttctttcagccagtggctcagcttttatttttcttaattgtgtcttttgaagatcagaagtttaatttcgataaaattcagtttatagatgtttttcttttatggttagtgctttttatgtcctgtttaagaagtttttgtccattctaaggtcatgaagatagtatcctatgttttcttttagaagcattatagtttagttttacttttaggtctatgatccatgaggaataaattttaaatgtggtataaagtaggggtctcccatgtggctatccagtgggtccagcaccatttgttgaaagatgatcctttcctcattaaattatgtcggtgcctttgtaaaaaatgaattgctggccgggcgtgctggctcacgcctgtaatcccagcactttgggaggctgaggcaggtggatcaccaggtcaagagatcaagaccatcgtggctaacatggtgaaaccccttctctactaaaaatacaaaaattagctgggggtggtggcaggtgcctgtaatcccagctactcaggaggctgaggcaggagaatcacttgaacacttgaacccagggggcagaggttgcagtgagccgagattgtaccactgcactccagcctggtgacagagcgagactctgtctcaaaaaaaaaaaaaaaaaaaaaaagaattgcctgtgtatgtatggaccaatcgctaggctcctttttttctgatcctttgtctatccttatggtctcaccactgtcttgattactgtaactttatggttagccttgaaattagataatttaagtttttcaactttgctgtttttcaagattgttttgggtatttaatgtcctttcaatttctatataaatttagagtcatcctgttaatttttattaaaaaaatgtttaaagtgtgccggattatattgaatctataggttaatctggagagaagggatgtctagacaaggttgagtttttcaatttatgaacatagtatatctcttcgattatttaggtcttgctctcagtctgtgctgctgtaacacaatacctgagactgggtaatttgtaaagaacagaaattaattttttcactgttctggaggttcaagattgaggtaccagcagatttgatgtctgatgatggcctgttcctcataggcagtgctttctcatggcatccacatgtggcagaaggtggaaaggcaaaaggcactagggcattccctttgactttttttttttttaaataacagcacaaattcactcaggagagtggagccctcatgacttaaatcacttaggccccatctcttaatatcatcagttgggagtttaaatcccaacataggaattttgtagggacacacacattcacatcttagcagtctcctttaatttttctctgcaatgattttttttgtgtagatgcacaaattttgttacacttattacctagtatttaaagtttttggacgatattgcaaatggaagttttttttaaattttatgttttgtttgttgcttttataaaatcagtttttatattttgatcttgtattcttcagccttgctaaattcacttattagttgtagtaatagtgttttttttttttttttgagggggcagattcctaaggattttcttcataagcagttatgacaccttcaaataaagacagcttttacttcttcctttgaaatctttatacattctgttttgtttttcttgttatcaaactggctaatataatcagtacaatattgaatagaactgatgggaatattttctttctgatcttagagggaattaattcattaagtatgatatagttgtgtgttcaacagcagcagtgcccaacctttttggcaccagggaccagtttcgtggaagacagtttttccatcgactagggtcagggggattgttttgggatgagtcagatgcattatgtttattatgcaccttatttctattattattgtattgtaatatataatgaaataattatataactcccataaggtagaatcagtgggagccctgagcttgttttcctgcagctagatagtcccatctaggggcgatgggagacagtgacagatcatcaggcattagattcccataaggagcacgcaacctggatccctcacatgtgcagttcacggtagggtttgggctcctgtgagaatctaatgctggctgctgatctgacaggaggcagagctcagttggtaatgtgagtgatggggagtggctgtagatacagatgaagcttcactcattggcccactgctcacctcctgctgtgcagcccagttcctaacaggccactgaccggactggtactggggccccctgtcctatagcatattgaagaagttctcatctatttttttagtgctgagagtttctacaatgaattggtttaaattttgtcagacagttttgctgtatattttaagatgaccatatggttcccccttaattctgttaacatgaggaattgcatggattgatttcaaatggtgagccaacctttcattcgtttgatgaatcccctttcttcatgacgtgttatcctgtttcacatccagtgctagatctatttgctcatattttgttaaagattttaatgtttatgttaagagtgttaggtttctaattttcttctctttaatgcttttgttagattttgatgtcagggttatgctagatccaacaaaatatggtggtgttttctaaagagcttatataaaattggtattatttcttcctaaaatgtttggcagatttcatcagtgaagcttactagacttgaagcttttcatgtggaaaagatttatatataaaattcaacttttaaaataaaaaaacggattttctatttcttcttgaattagtttggtaaatcagtttttcatggaacttatccgtgtatttaagttggtcaaatttagttacacaaagttgtttataacatttccttattatacttttaatatctgtggaatctgtagttgtaaaccttctattatttctaatattgataatttgtttctttttattttcttgattaatctagctagagattttcttattttgactaatttgtctattatatattaattattattatattatatattattatattattaatctttcaaagatccaacttttgcctttgttgttttactttttatatttttcttttctattttattgatttctgcccttatttttattatgtcttgtcatttaatgactgggtctaatttgctcttcttttactagcatcttaatatggaagcttagctcatgattttctaatacaaaatttaaaatataaattttccttcaagaactgtttttgctgtactcctcagattttgatatattgttttttattaccgctagttaaaaatatttattttttgatccatgggttatttaaaagtattttatttaatttccaaatatggtggtgtgtttttcaatactttattgttgctaatttcaatataatttcattatattgaaattggtcatagaatataatctctaagatttcaaaatcttgacatttatttacttttttatccagtctctgtttatccatgtttacatttttatggcccacaatttggtctgtctttgtgaatattctgtgtgcatttgagaagaatgtatgctctgcagttctggaatgtaatagtttattatttccaactaggtcatattggttcttacagttttccaaatcctctatatcttcatttgtctttttcctacttgtttttatcaattactgagagaacataaaaatcactgactaagattgtggattagcctatttctccctttagttctatccatttttgcttcatatattatgaagttctgtagatgcatccctcttaagcattcttatgtcttgatgaatctattcttttgtcattatcaaataacctcctttattttttatttatttattttttgagataggatctcactgtgtcgcccaggcctggagtgaagtggcacaatcatggctcactacagccttggcctcctaggctcaggtgattctcccacctcagcctcccacctagctgagactagaggtgtgtgccaccatgtccaactaatttttgtggagatggagttttgctatgttgcccaggctggtcatgaattcctgggctcaagcgatcctcccacctcagcctcccaaaatgctgggattacaggtgtgagccaccgcacccagccacctcctttatttttggtaacattcctcatcttaggctgtctctagtcctatctaagcttggcaacaatggaccaagataacaaactaagaattacagtcagttattcactcattcaacatatatggtatctactatcatttatccaagcagagggatcaaattagtgaaagaaaacaggtaaaaatcctttccctgcttcccctaagtgaagagtaatcttttatgtttatttatttattttttgagacagggtctcactctgtcttccaggctggagtgcagcggtatgatcatggctcattgcagccttgacttcctgggctcaggtgatcctcccatctcagccttccaggtagctgagactacagttgtgcaccaccatgcctaactgattttttgtattttttgtagagatggggttttgccatgtttcacaggctggtcacaaactcttgggctcaagcgatcttcctatctgggcttcccaaagtgctgatattacgggcatgaagccacctcactggccttgtttggtattaatacacctatatcaactttcttattttgactaatttgtctattacatctttcttctcaacctatctatctaaattaaaagtgcgtctcttgaaaacaacatactaattgaattttgctttttaaaatctaaaggtgacaatctccatttaatgtaattattgatatggttggggttaaagctattcttctgttattcattttatctgctgtcttctttgttacttgttctgttgttaattcttttttgtcttttggttcaactgagtttttcttttttttcttttttttagtactatatctctttattggccttttcactgtatttcttcatattactattttagtggttgctctagacttatcacagtacactttgattgaataatataacatttcatgtacaacgtactttttccataatttgtacatttgttgtcatacagtttacttctacataagaagagagaaattccacaaggtattgctattatttttgctttaaacagtcatttgtcttatatggaatttaaaaagtgaactgaaagtggtgatttatatttacctacatatttataattttcagtgctcttccttcttatatatctgaatttccatattatatcatttcccttcagcctaaagaacttcttttagtgcagggctggatgacaacacatttctaagatttcatttatctgaaaatgtctctattctgccttcatttactgaatatagaattctaggttgacgggtttgtttttaaatttcatcactttaagtatgtttcttagtctttggcttgtgttatttctgatgaccagtcagccgccatttttattgttgttttcctgtatgcatttccccccttctattggatgctttaacagtttttctttagttttcagaagcttgagtatatgcttttgtgtaattttcttcctaccttttctattttggattcatagtttcctggatttgtgggttgattttctgatcaaattgagaaaaatttcagttattatttccttaatttttttctgtttcattttgttttactgtctttctgaaactctaattacacgtacattcacgtgttgcttaacaatggggatatgttctaagaaatgcatcgttaggtgatttttgttgtgcaaagatcgtggagtgcacatacgcaaatccagatggtatggtctactatacaactaggttatgtggtataacctgttactcccaggtgacaaacctgtatggcatgttactgtgctgaatactgtaggcaactgtaacacaatgattagcatttgtatatctaaacacatgtaaacatagaaaaggtacagtaaaaaatatataaaggataaaaatgacatactgtatagggcacttaccaagaatggagcttataggactggaagttgctcttggtgagtcagagagtgagtggtgggtcaatgcgaagacctaggacattgctatagtctataaacattgtacacttaggctaccctaaatttactacaaaatatttttctttcttcaataataaattaactttagctcactgtaacttttttacttataaagttttaaaattttaaaagctttttgattcttgtaataacacttagcttaaaacacaaacacattgtacagctgtacaaaaatattttttctttatatcctcattctaaaagctttttcctatttttgaaatttttaatttgtttaacttcttttttttttttttcgagacagggtctcattcgtcacccaggctggagtgcagaggcattatcatagctcattgcagcttaaactcctgggatcaactgatcctcctgcctcagcctcccaaacaggtggaactataggcatttttttatctttaaacttttttgttaaaaatgaaaactcagcacgcacagtagtctaggcctacgcagggctggaataatcaatatcagtcttctgcctccacatcttgttccactggaaagtcttcaggggaaataacactcatggagatgtcgtcttctgtgataacaatgccttcttctggaatactcctgcaggacctacccgaggctgttttacagttaactttttatatttttaataagtagaaggagtatctctaaagtattcataaaccagtaacatacattatcatcaagtacataattgcatgtgctatacttttacatgactggcagcacagtaggtttgtttacacctgcatcaccacaaacatgggagtaatgtgttgtgctatgaagtcaccaggtgataggaatttttctgttccattataattttatgggactgttgtcatacatgcagtctgttgttgactgaaacattgttttttggcccatgactgtttattattaaaccattgatactgttccactggtccctggggctccctatttatattttttacatctttattcctctctatgcttcagtttgggtaatttctattgatctgtcttaaaattcaaggatcttttcttttcttgtgtcctgtctgcagttaatccaatccagtgagtttttgatttagagtattgtgttttctagttctaagatttccatttgatttttttcctaaagtttccagattgttcctaaaattccctgtctatttttccattatatctgtcatttcctctagactctttaacatatttatcatagttattttaaagttcctgcctgctacactagtcacaatagcaaagacttggaaccaacccatatgtccaacaatgatagactggattaagaaaatgtggcacatatacaccatggaatactatgcagccataaaaaatgatgagttcttgtcctttgtagggacatggatgaaactggaaatcatcattctcagtaaactatcgcaaggacaaaaaaccaaacaccgcatgttctcactcatagatgggaattgaacaatgagaacacatggacacaggaaggggaacatcacactctggggactggtgtggggtggggggagtggggagggatagcattaggagatatacgtaatgctaaatgacgagttaatgggtgcagcacaccagcatggcacatgtatacatacgtaactaacctgcacattgtgcacatgtaccctaaaacttaaagtataataaaaaaaaaattcctgcctgctaattgcaatactggggccatttctgtgtctgtttatattaagtgataattctcttggtatagatcaaatttttctatttctttgcatgaaatttttttttactgtgtattagacattggtggaagatatgttgaagagactcttaattctgttgtttctttataataaaggttaagtttggttctagaatgtggttagattattggtggttcattttgaactatagaagtcttgatttttaaactacattagggaaggtctatttcagcatttttcttagccctaggctgaatattttagtcctgagacacagtgtttactgtgaaggcttgtcccttatgaagttccagtagaaacccaggtgtttacccagcccctccaactcgttagaattcagacagcaaactctctcccgtgtggtgtgtggtaactgaaatttctgctcaggtgtttgagctttccagctgtcgttttgtctctgggctccttgtaggctctcctatagatgtataattaagggatcaaccaaagagttcagaggagtttatttgcagatttaggggcttcttgtttctgacttcctcttttctgacattttccctttagtttccagctattctagcagttccaaactgtctgctgagtcctcaggcagatacaactacagttttctgcttgagttctggctgtccagtgccatacagacggccctcatgggaaaagccatttaaacatgaatcttgtccattatggttccttttttcaaggatcaaataatctagactttattcttgattttggtcttcttccagtgcttttgaacagttggctttaaatatttcgttaattgtttataatcatcatctgcaggaaggttagtccaatacaagccactgtgccgtaactacagccagaacctcatcaaaagtttctaagctgaggagtcacaagagtagacgtaggctttaagaaggtcattctggcagatgtgtggtaacctgtagcaggggagcaagaatgaaggtaggaagacaaaataagactattaccagagtccctggtagatgatggttatttagactcaatgatgaaagaggagactggtcatgacaagcaatggatgagtttgagatacatttttggcaagatttggtgataagcaggggatgagaaaaaaggggaagtcaaggataactctcagatttcttgtttgaaagactgggtgattaacgccacttaccaaaatagggaataccagagaaagatgagatttgggacaaaaatcaaatttccttttggatgcaagtctcaagatgacaatagaataattgtccagtaaacaattgaatttgtaagtctgaagctcagggaaaaggtctcatttaataggactggctgctacaacttgagtgagatgtgcacatgcagagtgaaggaatgctacctaggggactgagaactgacaaaagctggttggagttggatgttgactttccgaattctaggtgaaactactggatgagagagatgagaggccagcaaaatcagcctacttacaattgggatgttttaaggaggttaactatggctgctttttccccctctggatgcagggttacaaggaagaaaataacacaggtgaatgttgtgggagatgtttgcctacggcttgcaccattcagctaagaggaggacagatcatgacactgaaggtaggagcaagctgaatgcagggctccctcacatatcaccatcttgcttccttttttggaaatttttcttcaaggaagaggggctaagtttggttcagtattggcttctttttctatttctttctgattatataaagaaaagatagatgacttattgcaggcacagaattttctcttttatttagttattttgttgctcttcttgacaagagtgtacttggtgtagggcctcacaatttggagttgattgatcttttttttttctttcttgagatggagtcttgctctgttgccaggctggagtgcaatgtcacgatctcggctcactgcaacctccgcctcctgggttcaagcgatttccctgtctcagcctcccgagtagctgggactgcaggcacgtgccaccacacccagctaatttttgtagttttagtagagatgggatttcatcatgttggccaggatggtctcgatctcttgacctcgtgatccgcccacctcggcctcccaaagtgctgggattacaggtgtgagccaccgtgcctggcctggaggtggttgatctttaagattttctctacccttgggcgtctgtaagactggacaggccatcagcgtgaaacaaactctggtctatgaagtccggactagctggtggggctgggaggtagttcccttcgttcatctctagttcagttatcagctagccagtttactgttgctatatctcaatccttcaagcatttaactggtcggaagagtctacatagcagccctgttcataggatacaagctgtaaaactgggactccacttctggtctgtgttctgggtgtgggggctttattatacactgtcttcttgtttcatggttctgcagattgtttcgtcatctccatggagtcaagctcatggtttgaagtggctttgtgaaccaaacactgtctctgactttacccactcctctttccttccagcgtgatgagacgctccaggatggctgtgatactcacttctgcaaggtcaatgagagaggagagtacttctgggagaagagggtcacaggctgcccaccctttgatgaacacaagtgtctggctgagggagtgagtactcattctgctttcctctttactgtctcaatctctaagaacaagattcttctgaatagtgtgcatcccagctccggcataatttctcagtgtctgaggcacatctctggcctagttgaagaatcagtgagattacgaaatcaaagcctacggagagataaaattctctgcaatataggatgttttaaaaaaatattttccttaagggaggctgagtgtgtgattcttgaataaaatgtgagatcaaactgatttttagtctccctgggaatgaagatcctgatgactcaactggaagagaattcagaatcatcaaaattgtttcagcctggtcaggtagggtggtcaagctgctcacatttatgataggaaagcatagtttacatctgggcacttaagcacagggctgtgagttcggagctaaaaattggcccggagtgacctgaaagctgtctactctgtactgtttgtgcctaacctgaaattttgctgttttcttagggtaaaattatgaaaattccaggcacctgctgtgacacatgtgagtgcgttactaatatcttgtcccttgaaacccatcagagcaagtccaggggctctttgcagcttgctccttgaaacccattagcaagccgcatgactgttctttggagtaagctttatttcagaaagatatttcgtgaccactggtcagtcattatgttcagtcttgcagggagcagcctcccctccttggatgtcatcagactgccctcttgaactcccttttagatcccatggagcaatctctttccccttttcctgcaaactccctcctgtctccagcttcttatgtgccttttccctcataggatctttgattgctcatagtcctatcctgggacgatatgttccctctctaaccaaagcttcttgaagacaggcaccttggatctatgatcctgacagagtagactctcaacacatatctattcatgagtgtgctaaagctatctcaaagagaaagcgaagccaccagctggctgacaacagcccacatgtgctgtgggggctggtctaagtttatcaccccctcttcttcactctgagctcctctttacctcgtagttatgtcctactgattggttctcattgctcacagcagcagctttggagacgagacacaaatctgcacatcagacagtgttcttcccatacatgcttgtgtttgtgagcacaaataactttcaggatcccaatgctaatgccataatttctgaatatagaattacttgcctggactaagattttttgttttagattagggtatttcttttctgccctgggttcacaggtccatgcttgtttacagatagagaaaggaagagtgaaaacatgaatactttcagtgttcaatcattcattcttgacagcccctgcaattgctgtaaccaaatctcagatcgaggaagcactctgaaagcatgtctttctatgattcccatttgaatggtttaagaatgtgaagtcaggaaaccatcagagaagaagaattctctctaggcacactgcacgtggaatttgattaggagactgttacctacaaaaccaccacaaagggtctttgttggtcaactcattcaagaggcttcgagatctttaataaggacaataagccaggctcagggccttaaatccacagcaacatagtatagtatgctggtctaaatgttttttttttttaattcatcctcttaatgtaattggcaggctttccctttacaatgaaattatctagaaattaggaggcagactaatatgtagttagggttgatttagatttcgagccatctaaggacagaaaactcccagtgttcagactggaatggtgagctgggattaaatttttgaattcccagtgggccaagtagagattcagatctgaatgccactaacccctgtgtgaaaggaaacccccatgtcagcaacctggagtcagcagtacccgaagagaggccttcacaaaggtgcctagggatcttctcggtccccagagaggcagggtatgcccttacatcaccatgacttcgcctttcctcttaccccaaggcaggaatgaagagatagtaattatacttattgactacttcattgcccattagcttctgaatgtagttacaagcacaagagggttgctttagccatgtggtttttagagtctacaatgatacaaaggcaagtcttcctcattttacatcaccatagcacagtgaatttaggctcttcctgcaattaaaattgtaccattaagtgagttaagtccagcaataactatatctctgcatatttcgggccaggaacagctgaggtgaaccaggataactgaattccctccctgtggctggctttatttggttactgtgaaagggacctatttccagcccagtgagggcactggggctgaagagtgttctctagaaccccagccagtcctcaagtttcatctctcacctgtcctgtaggtgaggagcctgagtgcaacgacatcactgccaggctgcagtatgtcaaggtgggaagctgtaagtctgaagtagaggtggatatccactactgccaggtaagggctctgcttcaataagggctgggtgtggagggctgagcctccgtgttcggatacctatccttagttacattctagaaggatctggaaaattcgcagggaagagaagggaaataaactggaagcatttttttttaagcaaatgttttattgaagtaactggaaatttttgactccaggaaaaaaacaaaaatggaggaaagactcagcaaatcctttacagaaaatggagagttatttatgcaagatgggggccacaattcttgaagatcagtcaaacatatataaaattttcctgcataaaacatgcataatcaggcataaaacattttatgcattaacatgcataaaaattgcagctagaggggtgtgggtatgatattattaccatagagaagaggacatgtcagacctatgatcttcctttacaaattgcctagctgtcctgggtgcttctgggtgagatcagacctgccttgcttggagggggtcagggagaaagcaggctgccccagagccctgcctaagccaggacttcccaccattgtgaagctcccatcttcctctgctttcttgcagggcaaatgtgccagcaaagccatgtactccattgacatcaacgatgtgcaggaccagtgctcctgctgctctccgacacggacggagcccatgcaggtggccctgcactgcaccaatggctctgttgtgtaccatgaggttctcaatgccatggagtgcaaatgctcccccaggaagtgcagcaagtgaggctgctgcagctgcatgggtgcctgctgctgcctgccttggcctgatggccaggccagagtgctgccagtcctctgcatgttctgctcttgtgcccttctgagcccacaataaaggctgagctcttatcttgcaaaa

SEQ ID NO: 343 - DNA, 44804 bp, Homo sapiens
  source 1..44804: mol_type = genomic DNA; note = NC_000017.11:c42745078-42700275 EZH1 [organism=Homo sapiens] [GeneID=2145] [chromosome=17]
cacggcgcaggggtggggccgcggcgcgcatgcgtcctagcagcgggacccgcggctcgggatggagggtgagtgagtaaacaagcctgggccgggcggtggggccgggcctcctcccctcgccgccctgggcctgagggagggagaggcggagggatcaggaaattggaaggaatccgagggacacactgcctgcctggccgggggtagcaggcgcccctcctcattccgagggtgggggaatgggggcgacggggcgagagagacccaggcgaggacagcgtctggggctgcgagggctgtgtgcccgggaggaggagcggcgggggcgggctcggggacggggaatcccgttggatggcggtgtgggccggtgggcgggagccccagcgcccaaagggcgcgggagggcggtggcacctgcgggggcctttagcgaggtggactctggggacctggagctgtgcttggggagggctagagaccggggctgatcttgcgatggctttcggggatgttgaggaggggtagcagtaaaaacaaggccgggactagggtgaggtgagtaaggctcccaaggcacaaagtgtaaaggagcactgactcagggtcgcgcaagtgcagtgagcgcctcctcacgtgcgtcctgggtgcctcggtcgcctcaccccaggcctggccctgagcaagaatctccttcactccagacttttggtctcacgccaatgatcgctcacccccaccattcaaccgaggatcaaatgatataaataaaagtgccttgaagcacagacaaggtgttgtatttgggacatgcctgttaggaaatgtgggacaaacttttatttcaataaaaagtgactactgaggaattgtttcttgagcagggaagggaagggatacctgaaggatgttagtgccccccgtggaatgtgaaggaatatggagggtgaaatacagggttgtatgtgatgtagcccaggccgataggaacctgacgcttggcaggggaggatgaaagcaaaggagctcaggtacactaacaattaggtgggtgcaaggatggcaatgaaaacgcgagtctcctccacgtttgctgccatactgccgctgaataaaaaaattcccacaccccatgttttttaaatttaggaaactgatattgaaggaggtttccagcctgagaaggtgctaaccctattagaggtttctgtgaaagcttgtctattttaagtcttggaatccccagatatgccactgataaaagagattacttacataggagagagtgtgtgttaggagataagtactttagactgggctcggtggctcatatctgaaatcccagcattcgggaggcccaggcaggagaatagcttgagcccaggagtttgggaccagctcaggcaacaatagcgagacctcatctctacaaaaaaaaaatagccagatgtggtggccttctcctatagtcccagctgcttgggaggctgaagcaggagtattgcttgagactgggaggtcaaggttgcaatgagctctgatcctgccactgcactccagtctgggtgacagcacctgagaccctgtctcaagaaaaaaaaaaaaagcctggcacggtggctcatgcctgtaatcccaacactttgggaggctgaggtggaccgttcactcgagcccaggagtttgagaccagcctgggcaacatgggacaactccatctctactaaaaatacaaaaattaatcaggtgtggtggcacacgcctgtagtcccagctactcgggagggctgaggcattagaatcgcttgaaccgggaggtggaggttgcagtgagccgagattgcaccactgcacatcaacctgggcaacagagtgagattctgtcaaaaaaaaaaaaaaaaaaaggaggcctggcacagtggctcaggcctgtaatcccagcactttgggaggccaaggcaggcggatcacttgaggtcaagagtccgagagctgcctgggcaacatggcgaaactccttctctacaaaaatacaagaattagctgggcgtggtggtgggtgcctgtaatcccagctattcagggggttgaggcacgagaatcgcttgaacctgggaggtggaagttgcagtgagccgacatgcaccactgcattgcagcatgggtgacagagcaagactccatctcaaaaaagaaaaaaaaaagggagagagaagtacttaaaaacgcacatacataataggagaaaggactatctataaaactgtaataatgctatcattgtcaaggtttatgcttattgttgtgtgtcacaaacataatgaatcaactccaaaggcagggatatatgttttattcattgatgtaccccaaacacctaaaatggtaacacatagtagatactactattaagtataatagtaggtgctcaacatatatttgtggaataaatagtggggaaatttctggcactgggagtcaggtgatccggatgctagtattgtcagtaactggcagagtacttgtatgctaatcgtggaacttgatgctaaggcccagcttaaaattccttaaagtgtaaatgacttcttcattatgatggttacattagtgccctttgaaacagcactagaggctgggctgatggcttacacctataagcccagcactttgggaggctgaggctgttggatcacctgaggtcggggagttcaaaaccagcctggccaatatggtgaaaccccatctctactaaaaatacaaaaaattagccagacgtggtggcggacacctataattctagctcttgggagacagaggtgggagaatcgcttgaacttgggagtgggaagttgcagtgagctgagattgcaccactgcactccagcctgggcacgaaagagtgagactctgtcttgggaaaaaaaaaaaaaagagagacagcactggaataaggaggctggaactaaaaatgaaattttactcccaagaagacatttgggagaagggaaagttaagaaaaatgtggtcgggcttgtttcttatatatttgcctttggatgataccttcaaacaaccaatttaagtctggacactgtggctcatgcctgtaatcccagtattttgggaggccgaggtgggcgaatcacttgagttcagaagtgtgagaccagcctgggcaacatggcaaaactctgtctctacaaaaacattacaaaaattagccaggcctggtggtgtgggcctgtagtcccaactactcaggaggctgagtagggaggattgcttgagcccaggaggcagaggttgcagtgagccgagatcaagccactgcattccagcctgggcaacagagcaagaccctgtctcaaaacaaaataagaaaccgattcaaaatattaattttgtctatttttaattcctagggtctgaaacctggcttcattactctgtaggcaacagttccttccctttgatttgctgtttatatgaaacatgtaacaattcatgtcattaagtatatctttttctggtcttagattaagtttaaaaagtttcactttgggccccccacgttgtggctcacagctgtaatcccagcactttgggagcaggccgagggattgatcacttgaagccaggagtttgggaccagcctgtccaacacggtgaaaccccgtttctacaattagctgggcgtgggcatcccacacctgtcatcccagctacttgggaggctgaggaacgagaatcccttgaacctggaaggcggaggttgcagtgagctgagatggcaccactgtactctagcctgggcgacaaagggagaccctgtctcaaaaacagtttccactttgttcactatttctattttgttcactagtagcgtcccagaaaagatttgaggtagcaacactaaaaacacactaattccatttctacatagaataaactaaagagaaaagagaaaacaatttgtggagaaaagtgaagataattagataggttgggattgaggggaagggttaaaggttaaaaaaagaaaaattgtgcttctccattctggaaagtccccagctttttctttgttttgttttatgtccaaactgtgtacatattggattctttcctactccttagtctatcagtcaatcatcagttgagacttgagtacactacaccctaaagtcatgagttacttaatgggtagttggaattcagtacctttagtgtgttttattctctaactcacctacccgaataatttgattcaaaatagactaaaaagtcttatttttattggatgatatgagcaggcactaaatacagtacagtattaaactttgggctgacacagtacagaaccagtcaagatagggctctagcctgttaggagattgcttttactcttccaagtcagcgttctcactgggcacggtggctcatgtctgtaatctcaaccctttgggaggctgaggaagggggattacttcaagtcaggagttcaaggccagcctgggaaacatagcaagatcttgtaggctgggcgtagtggctcacgcctgtaatcccagcactttgggaggccgaagcgggtggatcacaaggtcaagagatcgagatcatcctggccaacatggtgaaacctgtctctactgaaatgcaaaaattagctgggcgtggtggcttgcacctgtagtcccagctacgcgggaggctgaggcaggagaatcgcttgaacccgggaggcggaggttgcagtgagctgagattgcaccactgcactccagcctggcaacagagcaagactccgtttcaaaaaaaaaaaaaaagatcttgtctccactgaaaatataaaaaattagccaggcatggtggcatgtgcccgtagtcccagctactagggaggctggggccaaaggatcccttgagcctgggaggtcgaagtgcagtgagctatgatcatgcctggtcggcagagtgggaccctttctcaaaaaacaaaataaaatgaaataaaattaaaccagagttataaatcctgtgagccagcattttcctttgggtctcataaaaactaatcctgtttatggtgaaaccctgtctctactgaaaacacaaaaaattagctgggcatggtggtgggcacctgtgatcccaggtactcgggaggctgaggcaggagaatggcgtgaacctgggggatggagcttgcagtgagccaagatcgcgccactgcactccagcctgggcgacagcgcgagactctgtctcaaaaaaaaaaaaactaatcctgtttagatttttgttaccattacctccagtgcatacgatctaattttttttttgagacagaatttcactcttgttgctcagactggagtgcaatggcacgatctcagctcattgcaacctctgcctcctgggttcaagcgattctcctgcttcagcctcccgagtagctgggattacaggcatccaccaccatgcccggctaattttgtatttttagtagagacggggtttctgcatgttaggctggtctcgaacccctgtcctcaggtgatccactcgccttggcctcccaaagtgctgggattacaggtgtgagctactgcacccagctgatctgattctcttaattaagcaacactaggaaatactaatgttataattttattttaaattagaattcagagtcacaggttcctgttaggaaggttctttctgtgtgtagtgcccagaagctcaaactaatgacagatgaaaatacctcagagaagttggagggtataaattagagatgtgctttatagatcctaactgagagatcaggctgtgtacctagtcacagaattgattttaattgaaatgttgatgaaattggtgatcaccagaatgacccaaaggtgtgttactagagctctttgcagggataggttcacccctatcattcaggtttcaattacactatgaatcaaaaaaggaataggatgaaatatttaaaaatataggccaggggccaggcgtggtagctcacgcctgtaatcccagcactttgggaggccgaggcaggtggatcacgaggtcaggagatggagaccatcctggccaacatggtgaaaccccgcctctactaaaaatacagaaattaacccggcttggtggcgagcatagtcccagctactcagggggggtggaggcaagagaatcgcttgaacccaggaggtggagattgcagtgagctgagatagcaccactgcactccagcctgggtgacagagtgagactccttctcaaaaaaaaaaaaaaaaaaaaaatctaggccaggcccggtggcttacgcctgtaatcccagcactttgggaggccaaggtgggtgaattacctgaggttaggagttccagaccagcctggccaagatggtgaaaccctgtctctactaaaaatacaaaaattagctggggcagaggttgcagtgagctgttattgcaccaacgcactccagcctggcaacagagtgagactccatctcaaaaaaaaataaaaaaaatagactgggcacggtggctcacgtctgtaatcccagcagagcgagattccgtctcaaaaaataataataaatacaaataataaatacaaataaataaaattaaaaaataaaaatctgtagtgccatctgcctccaaaggcttacttagccttgctggttaataaaattattattcaagagaaactatcaaagacactgaatttgcccctaagacaaagaagctgtttctgcaaagggacaccttatgtagatgaaaaaatttaatagtttggaacttttgtattctgatctcagtctctctaagtttaagaacttgttccttaaattttttttttttttttttttttgagacagagtcttgctctgtcgcccaggctggagttcagtggcaccgtctcggctcactgcaagctccgcctcctgggttcacgccattctcctgcctcagcctcctgagtagctgggactacaggtgcccgccaccatgcccagctaattttttgtatttttagtagagacggggtttcactgtgttacccaggatggtcttgatctcctgacctcgtgatccgcctgtctcggcctcccaaagtgctgtgattgcaggcgtgagccaccgcacccagccgttccttaaattttttattgccatacaatttcagtaatgttttcccatttccacctagtgacagactacattctagttttagcctttgcagcaaattgagatccagttttctggggaaagattgctacatttttatagctttcttttcctgtagagatgtgacagtaaataaagtggttcgtatttccaatgattaatctttttaaaaaataaactctattttttagaatagtttgttttttaagaaagaaaaaaaagaaagaatagtttgtttgtttttggtttgtttgaaacagggtctcactctgtcacccaggctggagtgcaatggcgcagtcacagcttgctcctgcagccttgatcgtgcaggctccatctgtcttctcacctcagcctccctggtagctgggactagaagcacacgccaccatgcccaactaatttttgtatttcttttgtagagatgggatctcaccatgttgtccaggctggtctcgaacaactgggcccaagagatccacctgcctcagcctccaaaagtgttggaatttcaggcatgagccatcacgcctgccctagaatagttttagatttattttaaaaattgtaggctgggcgcggtggctcacgcctgtaatcccagcactttgggaggccaaggcgggtggatcacctgaggtcaggagttcaagacgagcctaggcaacatggtgaaactctgtctctactaaaaatacaaaaattagctcggcgcggtggcatgtgcctgtaatcccagctacttaagaggctgaggcaggagaatcgcttgagcccagaaggtggaggttgcagtgagccgagattgcatcattacactccagcctgggcgacagagcgagactctgtctcaaaaaaaaaaaaaaattgtaaagctagtacagggagttcctgttctgcaactggccagcagaacatcttaagtggaatcatatgcagttatttgcgtcttatttttttcacttagtatggtggtttcattttattattactattattattaatgaggcagagtctcgctctgttccccaggctggagtgcagtggcgcattctcagatcactgcaatctctacctccctgcaatctctgccctgctaggttcaagcgattctcctgcctcagcctccaagcagctgagactacaagtgcacaccaccatgcccagctaatttttgtatttttgtagagatgaggtttcaccatgttggccaggctggtctcgaactcctgatctcaagtgatctgcctgcctcagcctcccaaagtgctgggattacaggcgtgagccactgcactcaaccagcatagtcttttaatggtcttgagatgtggtgtgaatgtatagaaactattcatggctttttgttgctgaatagtattccattgtgtgtgtatatatctatacacactacattttgtatccattagccaatccattgatatgtgtgttgttttcacttttggctattataaataaatatgaacatttgggtacagatctttgtggagacataggttttcaattctcttggataaataattagaaattgtatgccaggttctgtggtaagtatatattcagctttatttttgaaaaactggcaaactgccttccacagtggctatatcactttgcattcctaccagcagtgtatgaggattccagttgcttcacgtcctcaccaacaagttgtattatcagtcttttttcattttagccatggtagtggtgtttaatagtatctcattgtatttttcatctgcatttccctaatgactaatgatatggagcaaccttttgtgtgctcatttgccattcctgtatcttttctggtgacatagctgttcaaatttctgctctttttttttttgagacggagtctcgctgtctcccaggttggagtgcagtggcacgattttggcccactgcaacctctgcctcctgggtttaagcaattctcctgcctcagcttcctgagtagctgagattgcaggcagacgccaccacgcctggctaattttgtatttttagtagagatggggtttcacaatgttggtcaggctggtctcgaactcctgaccttgtgatccacccgccttgacctcccaaagtgctgggattacaggcatgagccaccacatccagccttctgctcactttttattggtgatttgtcttattattgagctataggacttgcttatataaatattttttaatttcttgatcaaaacagcatatgttttggagtttatcttcaatgtgtagatgaacataatgaaaggctgttaagtactagctaagtacctaactggaatataagtgctgttttgcatgtgtaagtaactaaataatagatctggtagaaatataaagtatttttttgtgtgccactccctttgcccaacaccaatgaatccatctctccaaatctgcctgttctagtgaatgctaagttttttatttgttcccttttttttttttaactttgatatgataattgttggttagggtccagctgtggtgaaaactcatcttatggctgagtttcaggtgtgtgccaacatggcctgctaaattttgtatttttagtagagtcagggtttcaccatgttggccaggctggtctcgagctcctggcctcaagtgatccacccgcctcagcctcccaaagtgttgggatgacaggcatgagccaccacagccagccagacacgacagcatctgtagattatgttctattccattacttaatacttcttttttcttttctttccctccctgcctttctgtttccttccctccctcccgccctccttcctttcttcctttcttttcttttctttcctcttctttttttgagaccgagtctcactctgtcacccaggctggagtgcagtggcgcgatctcagctcactgcaacctctgcctcccaggttcaagcgattctcctgcctcagcctccgaagtagctgggattacaggcacccaccaccacacccggctaatttttgtgtttttagtagagatgtgtttcactatgttggccaggctggtttcgaactcctgacctcaggtgatccgcccaccttggcctcccaaagtactgggattacaggtgtgagccactgcgcccagcccttccttccttctttctttctttctttacttttttttttttttttgacaaggcctcactctgtcacccaggctggagtacagaggcacaatcatggctcactgcagcctctacctccccatgcttaggtgattctcccaactcagcctcctgagtagctgggactgactgcaggcacaggctaccatgcccgggtaatttttgtaatttttttgtagagactgggttttggcatgttgtcccagctggtaatcttcattttcaaatacgtggagaaacctaagcttactatttcaaaaaggaaaataggaaaaaaggaaaatgaatgccaaaaaggaacggaagagggattgcaatttaaaaccattattttggccaggcgcggtggctcatgcctgtaatcccagcactttggcaggctgaggcaggcagatcacttgaggccaggagtttcagaccaggctggtcaacatggtgaaaccttgtctctactaaaaatacaaaaattggccgggcatggtggtgtaatgtcagcaactcaggaggctgaggcacaaggatcgcttgaacttgggaggtggaggctgcagtgagccaagatcgtgccactacactccagcttgggtgacagagcgagactccgtctcaaaaaaaaaaaaaaatccatgtgcatgagatataatcatgagcttattgtggtatatgtgtggtaatgggttaaattttgttgttttcttgtccgtgctgatgattttttttttttttttttttttgagatggagtctcgctctgtcaccaggcagcaatgcagtgatgctgtctcggctcactgcaacctccacctcctgtgttcaatcgattcttctgcctcagcctcccaagtaactgggaatacaggcacccgccaccatgcctagctaattttttgtatttttagtagagacaaggtttcactatgctggccaggctggtctcaatctcttgaccgcgtgatctgcctgcctcagccttccaaagtgctgagattacagacgtcagccaccctgcccggcctttttttttttttttttttgagatggagtctcgctctgtcgcccaggctggagtgcagtggtgcgatctcggctcaccgcaagctccacctcccgggttcacggctgtctcctgcctcagcctcccgagtagctgagaccacaggcgcctgccaccatgccaggctaattttttgtatttttagaagagacggggtttcaccatgttagccaggatggtctcgatctcctgacctcgtgatccgcccacctcggccacccaaagtgctggctgggattacaggcgtgagccaccgcgcccagacctttttttttttttttttgagacagagttttgctcttgttgcccaggctggagtgcaatggcgcaatctcggctcgtcgcaacttctgcctcccaggttcaagcaattctcctgcctcagcctccagagtagctgggattataggcatgcgccaccacgcccggctaattttgtatttttagtagagacggggtttctccatgttggtcaggctggtctcaaactcccaccctcaggtgatctgcccgcctcggcctttcagagtgctgggattacaaccgtgagccagcgcacctggctttttcttttttttttttttttttgtagagatggtgtctcactttgttgcccaggctggtctcagagtcccaaagtgttgaaattataggcatgagccattgcacgtgacagagtctcactctgttgcccaggctggagcgcagtggtgcaatctcagtagctcactctagccttgatctcctaggctcaagtgatcctcctacctcagcttcttgagtagttggaactacaggcatgcaccaccatgcccggatgatgtttttgattttgttttgttttgtttggttttgagacagagtctcgctatcgcccaggctggagtgcagtggcacgatctcggctcactgcaggctccgccccctggggttcacgccattctcctggctcagcctcccaagtagctgggactacaggcgcccgccacctcgccaggctaattttttgtatttttagtagagacggggtttcactgttttagccaggatagtctcgatctcctgacctcatcatctgcccgcctcggcctcccaaagtgctgggattacaggcgtgagccaccgcgcccggccgatgtttttgatttttaatagagatgaggtcttaccatgttacccaggcttgtatcaaactcctgagctcaggctatcctctcagcttggcctcccaaagtgctgggattacagatgtaagccactgcacccagcctcttttcctttaaaaaataacaaaaacaacagcaaaagaaaattttgaaaaatagagataggatctgactgtgttggccaagctaatctcaaactcctggcctcttagcaaccctcctgccttgacttcccaaagtgttggaattacaggcatgagccactgcacattgcctgatcatttatttttcttttcttttccttttttttttttggttttgttttgtttttgtttttgagacaggggcttgctcagtttctcaggctggatgcagtggtacaatcatggctcactgtggcctcaatctcctgggcttaagtgatcctctcacctcagcgaaaaaaataaatgtgtaggaaattttaaaaaatagggtgtgaaactttagtttctgtttcaaattttggctcttcatagctccttgtaatgttttgttttgttttgttttgttttgaggcagagtctcactcttgttgcccaggccgcagtacaatggcgtgatctcagctcactgcaacctctgcctcccgggttcacatgattctcctgcctcagcctcccgagtagctgggattacaggtgcctgccaccacacctggctaattttttttttttttgtattttttagtggaaacggggtttcaccatgttgaccaggctggtcttgaattcctgacctcagcctcccaaagtgctggtatcacaggcgtgagccactgcacctggctagctccttgtaatgtttttaaacatttttaatgttaggtggaataaatagagctagttatctaagaaacccaagtagttattatagagtaaaagcatcatcttgtggattttattgaatttttacatgtatttagtgtttgtactttctctaaaataattggcaggcctgttagctgagcctagaaattggttcagaaaagcattatgggcaggtgcaatggctcacacctgcacctgtaatcccagtactttgggaggccgaggcaggcagatcacttgaggtcaggtgatccccagtagagatggtgaaatcccatctctactacaaatacaaaaaaatttggccggctatggtggtgcgcgcctatagtcccagctacttgggaggctgaggcaggagaatggcttgaacccaggaggcggaggttgcagtgagccaagattgtgccactgcactccagcttgggcaacagagtgagactctgtctttaaaaaaaaaaagcattatgaaaaaatagaatttaataaagtaaagggcctcttcccaaatggcatcaagtattatagggacctgtcttagacatacaaaaatagtaggagaaaccttgaagtctttctgattctgggggaaaatcctactgagggtgtcagggtctaacttgctgcactaacttaatagaaccactgtctgttctcttttgaaaagctggacacctgttctgctgttgtgtcctgccattctcctgaagaacagaggcacactgtaaaacccaacacttccccttgcattctataaggtaggtaaagtatattagaatacatacttcttggccgggcgcggtggctcacgcctgtaatcccagcactttgggaggccaaggcgggcggatcacgaggtcaggagatcgagaccatcctggctaacacggtgaaaccccgtctctactaaaaatacaaaaaattagccgggcgtggtagcgggcgcctgtagtcccagctactcgggaggctgaggcaggagaatggcgtgaacccgggaggcggagcttgcagtgagccgagatcgcgccactgcactccagcctgggcgacagagcgagactccgtctcaaaaaaaaaaaaaaaaaaaaaaaaaaagaatacatacttctttaaaacgttgaaccttaattcaaataccaaaaagggggatttgcattgctatctatttccatatgtcttgctgctgacttggagatgagattatactgctgtcatatcctacttttattactaggcatgtggtaaatttagaccatttggcagtatggttttgtagcatgggtggatctttccatgaaacccttggatgcaaacttggttcttgctgaccacttctcttactcaaagtaaagagaagacttccatatcttgaagtaatccaagttcctagtacctgtgggagaacttcttgagtgctaaattaaaaacaagataccacaggaggacagaggctaagctttttgataattggaccacaaattgctgatgtgaaattttgttgttgttgtttttttttgttttgtttttgtcttttgtttttgttttgagacggagtcttgctctgtcgcccaggctggagtgcagtgatgtgatctcggttcactgcaacttccacctcccggtttcaagccattctcctgcctcagccacctgagtagctgggattataggcgtgtgccaccacatccagctaatttttgtatttttagtagagacggggtttcagcatcttggccaggctggtcttgaactcctgacctcgtgatccacccaccttggcctcccaaagtgctgggattacaggcatgaatcaccatgcccggacttttttttttttcttttttgagatggagtctcactgtgtcacccaggctggagtgcagtggtgcgatctcggcttactgcaacttccacctcccaggttcaagaaattctcgtgtctcagcttcccacataactgggattacaggcacaagccaccatgcccgactaatttttttttttttttgtatttttagtagagacggggtttcactatgttggccaggctagtcttgaactactgacctcagaagatccacccaccttggcctcccaaagtgctgggattacaggcgtgagccaccgtgcctggacttcttgttgttttttgtttttttgttttgttttgttttttgagacaaggtctcactctgtcactcaggctgaagtgcagtggcgtggtcacggctcaatgcagccttgacctcctgggctcaagcagtcctcccacatcagcctcctgagtagctgggactacaggcactggccaacacatctggctaacttttgtattttctgtagagatggggtttcaccatgttgcccaaggttgtctcaaatcactgggctcaagtagtgctctcacctcggcttcctaaagtgttggttttacaggtgtgagcccctgcctcttttttttaaattgaaactttctgttgaactcacacatttgggttctttaaatgtgtgtttttatgagtaaatttaatgggaatgaaagcataattgatcttttttttttttttgtatttgaggaatgctttatttccaggcaataaaatgctatttctcatctctgtctctcttagattacagcaagatggaaataccaaatccccctacctccaaatgtatcacttactggaaaagaaaagtgaaatctgaatacatgcgacttcgacaacttaaacggcttcaggcaaatatgggtgcaaaggtaaaaaataattcccaagtgaaagtttatatatttcaatatactgacccagtgtaaaggggttggaatttttttttttttttgagacagagtctcactctgtcacccaggttggagtgcagtggcgtaatctcagcttactgcaagctccacctcgcaggttcacgccattctcctgcctcagcctcccgattagctgggactacaggcgcctgccaccacgcccggctaattttcttgtatttttagtagagatggggtttcaccatgttagccaggatggtctcgatctcctgacctcgtgatccgcccgcctcagcctcccaaagtgctgggattacaggtgtgagccaccgcgcctggcccaggggttggaatttctttttaacttttgttttgaaatcgtaacagggccaggtgcggtggctcacacctgtaatcccagcactttgggaggctaaggcaggtggatcacctgaggtcaggagttcgagaccagcctgtcctacctggtgaaacctcgtctctactaaaaatacaaaaattagccgggcgtggtgtcatatgcctgtaatcccggctacttgggaggctgaggcaggagaattgcttgaacccaggagatagaggttgcagtgagccgagatggcaccactgcactccagcctgggtgacagagcaagactccatctcaaaaaaaaaaaaaaaggccaggcacggtggctcatgcctgtaattccagcactttgggaggctgaggcaggcagatcacttgaggccaggagtttcaaaccagcctggccaacatagtgaaaccctgtctctaccaaaaatacaaaaattagccaggtgtggtggtctgtgcctgtaatcccagctacttgggaggccgaggtaggagaatcgcttgaacccgggaggcggaggttgtggtgagctgagatcgcgctactacactccagcctgggtgacaacagagcaagactccatctcaaaaaaataaattattaattaattaataaaataacaatatatcttaatcttttccatggctttgctaggctttgtatgtggcaaattttgcaaaggttcaagaaaaaacccagatcctcaatgaagaatggaagaagcttcgtgtccaacctgttcagtcaatgaagcctgtgagtggacacccttttctcaaaaaggtacttttgggagtttaagctcagtcttcctctcttccttgggcttaaagctttttcctatatttgtgactttttagaaagtgaataagtaagacaaggtatggtggctcacacaagtattcccagctatttgggaggctgaggtgggaaaatcgcttgaggtgaggagtttgagaccagcctgggcaacatagactgtgtctctaaaaaattttttaaaaaagtagccagacatggtggtgtagtcctagctacttgtgaggctgaggtggaaggatttcttgagcccagaagttcaaggctgaaataaactatgatttcaccacaacactccagtctgggttgacagacaagaccttatgtccaaaaaagaaaaaggaaagaaaggaaataaataaataaggttaaggttaatagatacagctattttagtcaactttgaataattaagatagtaaatctgcagcttcaagaataattacgggggctggacgcagtggctcacacctgtaatctcagcacttcgggaggctgaggcagatggatcacttgaggccaggagtttgagaccagcctggccaacatagcgaaacactgtctctactaaaaatacaaaagttagctgcgtgtgatggtgcacacctataatcccagctacttgggaggctgaggcctgagaacctcttgaacctaggaggcagaagttgcagtgagccaagatcacaccactgcactccagcctgggtgaaagagtgagactgtgtctcaaaaaaaataataaataataaataaataaaagaattttctagttaagaaactttggctggacgcggtggctcacacctgtaatcccagcactttgggaggccgaggtgggtggatcacctgaggtcaagagtttgagaccaggctggccaacatggtgaaaccccatctctactaatagtacaaaaaaattagccaggcatggtggcacacttctgtaatcccagctactagggaggctgaggcaggagaattgcttgaacccgggaggtggaggttgcagtgatctgagatggcaccattgtacttcagcctgggcaacaagagcaaaacaccatctccaaaaaaaaagaaactttatgaaaataaattatcattattattatttagagacaagatctcactatgtcacccagactggagtgcagtgtcatgatcatagcttactgtaacctccaacacctgggaaatagataatatttttaaaatataaaaagtaaatattatctaggcatggtagtgtatgcctataatcccagctactcgggaggctgaggtgggagaatcacttgaacccaagagttcaaggctgcagtgagctatgatctccagcctgggcgacagcgagactccgtctcaaaaaaaaaaaaaaaaaagagactgtctcttaaaaaaaaaaaaaaaaagcagaagctgggtgcagtggctcatgcctgtaatcccagcacttttagaggctgtgacaggtggatcacctgaggtcaggagttcaagaccagcctggccaacatggtgaaaccctgtctctactaaaaatacaaaaattggccgagcgtggtggcgtgcacctataatcccagctactcaggaggctgaggcaggagaattgcttgaacctgggaggcggaggttgcaatgagccaagatcgtgcaactgcactccagcctgggcgacagagtgagaccctgtctcaaaacaaaaaacgaaaagcagatagtgtattgagagcaaatatctttcctgaagcagaatgttactataatttctataccactttgcttctccatgtactatccctatcacctatgcagctaagttgatgtccactgtcttaaagtttaggtcttcagaaaacttcctcatcttttaggactttcagaggctctttactgttgtgtataacccaggtagaccaacagtttgagctgaggtaaacatcagctgagtatgggaagtactgtgctgaactctatagaggacacaaaggtgaataagagtcccttcttttggctgggcatagtggctcacacatgtaatcccagcactttgggaggctaaggcaggatgattgcttgagtccaggagttggagaccagcgtgggcaatatagcgagaccctgtctctacaaaaaaaaaaaagaaaaattagctgtttaactggatgtagtagcacatgcctgtaatcccagcttctcgggaggctgaggttggaggatggctttagcctgggaggcagaggctgcagtgagctgtgattgcacaactgcactcagcctgggcaacagagtgagatcctgtctcaaaaaaaaaaaaagagtttctactttccacaagtttgcagtctagggattccttttaggagatgatgttacaaaactctgaatttattaagttgtttttaaaattttgtttttgttttttttgagacggagtatcgctatgtcgccaggctggagtgcagtggcgtgatcttggctcactgcaacctccacctcccaggttcaagcaattctcctgcctcagcctcccgagtagctgggactacaggcatgtgccaccacgcccagctaatttttgtatttttagtagggactgggtttcaccatgttggccaggatagtcttgatctcctgacttcatgatccacccgcctcggtctcccaaagtgctgggattacaggcgtgagccaccatgcctggtcaaattttttataattttaaatgccatctgaattttaaaaatttaatttattagcttgtaagaactagaggctactaagatcattttttttctcttttttttcttttttttcttgagacagagtctcgctctgtcacccaggctggagtgcagtggctcactcaacctctgcctcccaggttcaagtgattctcatacctcagtctcccaagtagctgggattacatgtgtgtaccaccatgctcagctaatttttgtattatgtttttgtagagatggggtttcaccatgttggcctggctggtctccaactgacttcaagtgatctgcctgtcttggcctcccaaagtgctgggattactggcatgagccactatgcccagccaattttggaaggaaattacatttctttcttgggttatatgcccgtctttccctctccatgtcattgcttatatttcagtgtaccatagagagcattttcccgggatttgcaagccaacatatgttaatgaggtcactgaacacagttgcattggttcccatcatgtattcctggtcccctctccaacagaactttatggtatgtattgaaagcactgtggtggttatttaaactgtatgattgtgttatgttgatatgccagagctcctcttagggtaaagattgtccagtaattaacacagctaggacatgcagggcagaacaaggttgtaatttacttactctaaacaatatatattgcaagttgttctaacttgtcagattttatgctctctgatgtgtgctttggaattgatgctggttcttttttaaatgaataatattgggcaagatttcaattttctcttagtaccttggcccaatattatgtacagttaaatgcagtctaaatcagactcttgaggcttgagcaggttgtctgctccctgttgatggagtaatcctttctgaattctctaaatgcaagatgctacaaaaacaactgagacaacagacgtgcacacagtcctttcatctgggcctttgtgctgactcctactaggattatttgtggttttgataatcattcctctctaaatactgccattgcttatcatctgcctggtgacagatagccgtactactggttggaatgaggtcgaggtttatagaagggaatcatctcttagaataaaacttcagaataattttacttgctacttggggattttagaatgactatattctctgctgagcaccccactcccccaaaattatttactattgtttattgccagaaaatatccatagcctaggctgcagttgactttaggttcccattgagtgtgactggcatgagttgtaatcataatttttttttattattggagaatcttagtccatcttatagaatacccatgtcttatgattgcccagtttattttgtagttaaattacagatcataatcttagaagccttcatttttatttatccatctgtctctctacttatgaaactttttttttttttgagacggagtctcactgtgtcgccaggctggagtacagtggcgcgatctcagcttactgcaacctctgcctcccaggttcaagcgattctcctccctcagcctccctagtagctgggactacaggcatgcgccaccacgcccagctaattttttgtattttagtagagatggggtttcaccatgttggccaggatggtctcgatctcctgacctcatgatccgcctgcctcggcctcccaaagtgctgggattgcaggcgtgagccaccacacttggccccatttgaggtttttttggccaaacaaaatggccagtgtttaaaatgcaggaaactctgggacaaaggcattttcaggagactcaagcaacaaacaaagctcagcaaagattccactaaataggaaagagcagatgcatgatggcttcatggaataaatcacatctggtttggtttcaggtagaagatgagacggttttgtgcaatattccctacatgggagatgaagtgaaagaagaagatgagacttttattgaggagctgatcaataactatgatgggaaagtccatggtgaagaaggtagtggtactgaactccttggagaaaattttgttagaatcaggcctcttctttggtacctcatcatcttgccatcttgcttttatcttctgccccatggggtacacactgcagaatatttcaatgtcatcacatggctgggagttaatttttttttttttttttttttgagacggagttttgccttagttgcccaggctggagtgcagtggtgtaatctaggctcactgcaatctctgcctcctgggttcaagtgattcttctgcctcagcctcccaagtagctgggactacaggtgtctgccaccatgcccagctaattcttgtatttttagtagagatggggtttcaccatgttggtcaggctggtctcgaattcctgacctcaggtgatccacctatctcggcctcctaaagtgctgggattataggcgtgagccaccatgcctagcccaatttttttttttattttttttttagagacagggactcactcagtcacccaggctggaatgcagtggcatgatcatagcttattgtagcctcagcctcctgggcttaagtgattttcctgctttagcctcctggggggctgggactacaggtgcactccaccacacctggcttttttttttttttttttttttgagacagagtctcgctgtgtcacccaggctggagcgcagtggcacaatctcggctcactgtaagctccgcctcccgggttcatgccattctcctgcctcagcctcccgaggtagctgggactacaggcgcctaccacacccggctacttttttgtatttttagtagggatggggtttcaccgtgtgagccaggatggtctcgatctcctgaccttgtgatcctcccacctcagcctcccaaagtgctgggattacaggcgtgagccaccgtgcccggccctggcttatttttaaaattttttgtagagatggagtctcaccacgttgcccaggctggtcttaaactcctggcctcaagcaatcctcccacgttggcctcccaaagctctgggattacaagagtgagccaacatgcctggcccaaaataccctagttatttctttttttctttctttcttttttttttttattaccctagttatttctgattcaagcagcagaaacagaaataaaaattatttaaagtatcctagttaaattttaaaaggagttgggacataaaaggattatgtagtaatcagtggctggagagaaagtttattgtacaaataagtttaatcttagggcttaggagttttccataaggacatccaagaccattttgttctttatttctctttctctgagaatggcaatgaggctctctgtcatacttctttgatccaggcatcccctgaatctcccagaagttggttttaataatctgaatttcctaaaagccaattgtttggatttagtcataattctagaaaagtctgtccgtgtgtaagaaatggaaagaggagaggctctccatcacttcataaaccaacagccccacctgctcttttgacaattgtgggcactgttgtgatgctgttgaactacattatttgtccacagtgcctcctagtgttcaaagacctcctaaattgtagtacatctccataaagtacaattttaggaaaaattgctgtcttttgatttagagacgtcattactgacccatcagcagcaaagccaagagaattttcattttattatttttctctgccctacttggagattgtttgaacactttcatgagattttgaaccagaaattcagagttgacttgtgactgaggaagtgaagttcttcagtaagaataaagcctatggctgggcacggtgggtcacacctgtaatcccagcattttggtaggccgaggcgggcggatcacctgaggtctggagttcacgaccagcctgacatggagaaacccagtctctactaaaatacaaaattagccagggtggtggcacatgcgtaatctcagctactcgggaggctgaggcaggagaatcacttgaacctgggaggtggaggttgcggtgagccaagatcgcgccattgcactccagcctgggcaataaggcgaaactccgtctaaaaaaaataataaaaataaataaagcctatagctgtattcctactctagccagctgcccactgcatgtgtaggagccaatcaaatgattgtaatttcctgatctcccatgtaaaaatgtacacatgtgacatatctgggcctctggagtgagtacaagaaaacctgcctaggaggactaatggaatgtgaagtgaccactgctcatctttcgaatcctcatgtttcagagatgatccctggatccgttctgattagtgatgctgtttttctggagttggtcgatgccctgaatcagtactcagatgaggaggaggaagggcacaatgacacctcagatggaaagcaggatgacagcaaagaagatctgccagtaacaagaaagagaaagcgacatgctattgaaggtacgtagcactggctcccttattccttttttaaagtgacagggatagggaagaaggaagaactggaaagatttgttgcctattaaaggctgttggtgcttcttgttggttcacttaaaaggagaacatgatcattaagtgatagcttcagatagctgtgacttgggtgaagaagaaagtagaagaactgatagaataatcattgctattcatttctaattatatgtctcatgtgaaattgggatcatgccaatttatatatatgtatatatcaaattttatatccctttttatttaatcttatgagtacttttccatgtcactaatgtttaatttaaaatttaatagtttaattatactatatgtccagggacatagtgtattctcttttattgtatcataattatagtatcagtgtagttcttcagcatccacttcatgataggattcttctatgttcaggcctctctatgaacactcttttcacctccaaattcttatttttatttttaaaatctattatttattatttttttgagacacagtcttgctctgttacccaaggtggagtgcagtggcacaatctcggctcactgcaacctccacctccctggttcaagtgattcttgtgtgtcagccttctaagtagctgggactataggcatgcaccaccatgcccagctaagttttgtatttttagtagagttggggttttaccatgttggccaggctggtctcaaactcctggcctcaagtgatccgctcccctcggcctctcaaagtactgactgggattacaggcgtgagccacctcacatccagattctaattgggactgtggattttgttgttaatatgtagactactctaacttccttatttactggtagcatatatcagataagtccagatagcactgatgtttatatatctccaaacaatcagtggttaggttaacaaagcagctgtaatcaaaatgctatgacaaaaggaaaaaagatcacacagatttgtttacgtgttctgataatcgcactcaggagctttttatcatttccaattcaggcaacaaaaagagttccaagaaacagttcccaaatgacatgatcttcagtgcaattgcctcaatgttccctgagaatggtgtcccagatgacatgaaggagaggtagggaaagctgtcccacttaggccatatacagagtgctcggacaaaacctttattccctcctaatttttggttagtaaaaagctttgtttatggtaagggcattatgatttgcccgcaatttgattatttcttgcttactcaattacctctaaatgccccccttactatattaagggtcatcgtatactggcttttgagtgagtctgggcagagaacatttactctgccatttttctggagagttaactccagcaccatcttaacaaatccttccctccccttactttccaacatttgcccaacccagcataattacaatggtggacccactctagttatctaccattctcttatcaaccagacctataaaaaacacccatcctcccttggcagaccgtaggtgagctactgtcagtacccaatctgtatttcctcagtggaggcagttcctcggaggaactcttatctctcttttcttaaataggtatcgagaactaacagagatgtcagaccccaatgcacttccccctcagtgcacacccaacatcgatggccccaatgccaagtctgtgcagcgggagcaatctctgcactccttccacacacttttttgccggcgctgctttaaatacgactgcttccttcaccgtgagtggggctactctgtttgaaatgctctcctctcttccatccccagccaccatttccttctctttgttctggtttctcgtatagagttcctggcttctgttctaacgttttacaaagggccagttctattttcccttgctcaattatagtgcaacatgctttgcatgatagggacagactaactagcaacttatctgtccctcagtacctcttagctttgaaagcattgtgttgatgtcagaaatgactgaattttgtgcaccctgatggtagccgtttatatcgaattctaactcctacaatagctctctaattcacttttgtttctccccatcttgtcaagtggatagaccactggcaacaagacagtttttgttttccagcttttcatgccacccctaatgtatataaacgcaagaataaagaaatcaagattgaaccagaaccatgtggcacagactgcttccttttgctggtatgttcttaagctgttctggcattattaacttcattctgggaacacaagccacgtgagccagtacacagcactctgggggtcatatagcacaaataaaacatggcttttgctcttaaggagctccccagttactgtgggaccgctcttaaggaactccccagacatggtagcactataaagttagtctgatggagtgcagattcgaagatcattaaaggcttgcctgctctaaatatcatctgcttagatttcagagcctaaaactgtattgttagaattggagcaaagtgtatgctgggggggtgggtacacactctagtttctttgctatcttgttataaatgcatataactatgagacgaatagcacgtgatgatgctgatgtcttgttgtgatcaaccagatggaccgttccctgatggacagaccttaagaagcagcataaatggtctggcatacctgtggggaagccatatattgagagctagaaggaaatagatcaactggacttgccaaagacacagttgggctttttacacaataggatgagcctaggcgatgaataaaataccttgataaaatttctgccacctattaaaattatattatacaaccagccaagtgcttttggaaccatctttagtgggataatagatggaaagatggtagagaatgctgttgggcacacatgtggaaaatgggccgtactgtaaaagcaaaagaatagacgttattgggtttattttttcctaatgtgtattgactccttcctatgtgccaagtatcatagtagacccttaacataccttgtcttattttcatcctataacagtgtcatgaggtagaggaaactggattacaaaagttatatattttgcctaaagtttgttgataagtcagcggtatggcagcgatgaaattcaagtcagggtctaactccacagatcatgcttttaaaattactccatgtttttcagccaggcgtcgtagtgcacacctataatcccagcactttgggaggctgagggaggtggatcacctgaggtcaggagtttgagaccagcctggtcaacatggaaaaaccctgtctctactgaaaatacaaaattaaccaggtgtggtggcgcacgcctgtaatcccagctactcaggaggctgagacaggagaattgcttgaacccaggaggtggaggctgcagtgagccgagatcacgccactgtactccagcctgggtgagatagtgagactccatctcaaaaaaaaaataataataaaatgaaattacttcatccttaaaaaaatatatatgccatgttatgtcaacataccagcatttatataagtcaaaaggtcattgcccttctcacaggagtcaccttgataccctgtacatgtattacgaagatgctgccaatgcctgaaatgtatgcatgtttaacttacagagataatgtatgcacaatttttcttttattgcgttttaggtttgagtgcatattaaatataatgctggactattttcccccaactgtttactaagaacattttcaatcatgcagagttgaaagataccttcttcctggatttgataacatttttttctgtatctcctttctccataaatttgcgtatgtatatcttttgctgaaccatttgacaataagttgcagacattgtgatgctcatttggtaaatgtttcagcataaagacattctcttacataaccacattattacacctaggacaattaataaaaattgtatagtatcctctattacccattctattaatatattcaatttttttttcagctgtaccaagaataggtatttttgtgttgtgttttgttttgttttgtttccaaaccaggatcatccagtcagacatcatatttggttattatgtctttttttttttttttttgagacagagtttcactcttgttgcccaggctggagtgcaatggtgcaatctcagctcaccacaatctccacctcccgggttcaaacgattctcctgcctcagcctcccaagtagctgggattacaggcatgcgccaccacgcccagctaatttttgtgtttttagtagagacagggtttctctgtgttggtcaggctggtcttgaactcccaacctcaggtgatcagactgcctggcctcccaaagtactgggattacaggtgtaataaggcgcccggccttgttatgtctttttactcgtttttaatctcaaataattctatcacttttaaaatctttttaaaagttccaggctggttgtcttgtaggatgacccacatcctggattcatctgttgttttttcacagtgtcatttctgtgttcttctgtctcctctttcttataacctagaaattaggtctggaaacttgattttatttatgttaaaatgtttggccattatattaaaatggtggctcacgcctgtaatcccagcaatttggggggctgaagcatgtggatagcttgagcctaggagttcgagaccagcctgggcaacatggcaaaaccccatgtctataaaaaatacaaaaattagctggactggacttgggaggctgaggtgggaggatcagttgagcctagaaggtcaaggctgcagtgagctgagatcatgctactgtactcacctgggtgacagggcaagacctcgtctcaaaaaaatatatatatatataaatacatataatctattatatattatattatatataaatacatataatctataatatatattatatataaatacatataatctatgatatatattatatataaatacatataatctataatatataatatataaatacatataatctattatatataatatataaatacatataatctataatatataaatacatgtaatatatagtatataaatacatatataatatataaattatatttacataaattatatatattttatatttatataaattatatataaatatatttatataaatttcatatatttatatattatataaatatatattttatatttatataaattatataattatataatatatttccatattatatattatatatataatatataaaaattatatgtaaatatatataaatgtttaaaatagtataattgatactgtatacttcatacacagcataggcacataatatcaggttcagttaattttgaaacttctcttttggaatttcctttaggccttactgtatattattccaaattccagatacccttaatgatagttaacctttatttttttttcatttttattactcaaaaaaacttcatttttaaattgagctttctgactctgcttgtgccttcaacactttcacaacaattttctgctgcttgctaaggaaagcacacttgctcctgcaccaatacattcagcacacacggatccaccataggccctgctgacatgcttttttgttttggacaatctcataggaactttaggtctcatagcacaaaccccccgaagtctgctgggcacacgccacatgcagatttcagtgctttcccaaccctcttggtataaaggtaatcaattctattaccaggggctcaggacagcctagttttgttaaaagctatattgtaggaaagcctacatgtatgtcaaatgctggaccattctgagtgcctctagacaatgtcactggaagataaacctttattttgtagaaatagatttagttttcagaaacagctaggaagtctttgaaaaccaagtctgatgagaaaatattgatgatctaggtgagtgataattatttcattttttaaaaaagggggtgatagctgtaaaataatgaaacaatattcttctgagtttcatacacagatttgggaggaagtttcaaaattaagtagtaagattgtacagattaagcattacacattttattaaggaaacagagaaagtgtggtagactggaaagaatagtggcctagggagacaaggagccctgattcctatacccctctggaactattagctgcatactctcaagctagtttcttcccctctctgaatctcatttcttcatccataggagaatgtgttctcaaattccaaacaagtaacacgcaagttaattttagatacaactcactggaaaattgaagacacagatgcatagattatatcttttttaagattataggacattagctgggcatggtgacatgtgcgtgtggtcctagctacttgggaggctgaggcaagggaatcacttgagcccaggaattcgaggctgcagtgagcaggcctctgcactccatcctgggcaagagagagagaccctgtctcaaaaaaacaaacaaacaaaaaaacattataggacaactcttttgtgaaaaagtacgtaagttttgttaagcagctctcattgttatatgatcatacttattatatggtacagagaaaaagaaaagacactattattgtagacagatgttgtaaagatgaaagtttgtgatgatgagatcaatatggtgatgggcctgttcctatttcctgtctgtaatgtgtccactgcaggaaggagcaaaggagtatgccatgctccacaacccccgctccaagtgctctggtcgtcgccggagaaggcaccacatagtcagtgcttcctgctccaatgcctcagcctctgctgtggctgagactaaagaaggagacagtgacagggacacaggcaatgactgggcctccagttcttcaggtacgatgaacagaaaatgaagactttttctttccatgcaaggactctggtaaacccaggatcactgcctgacacttaactttactacctcttaaaaattataaattctttctacaagttttgtaaacagtaaagatggggaatattttctttttttttttttttttttttgaaacagtctctcgcttttttgcccaggctggagtgcagtggtgctatcttggctcactgcaacctccacctcccaggttcaagcgattctcctgcctcagcctcccaagtagctgggattacaggtgcctgccaccacgcccggctaatttttatatttttagtagagacggggtttcgccatgttggccaggctggtcttgaacttctgacctcaggtgatccgcctgcctcggcgtcctaaagtgctgggattacaggcgtgagccaccctgcctggctaatttttgtatttttagtagagacagggtttcgccatgttgcccaggctggtcttgaactcctgagctcaagcaatccacccacctcggcctcccaaaatgcagggattacaggcgtgagccaccatgcctggcctaaagatagggaatattttcattcctaactgttctaccttttaaagtagaatgaagtacttctgagtttgtgacaaactactgatgacaactgcattctaccttcttctgattctgttatttcttcccttctcagaggctaactctcgctgtcagactcccacaaaacagaaggctagtccagccccacctcaactctgcgtagtggaagcaccctcggagcctgtggaatggactggggctgaagaatctctttttcgagtcttccatggcacctacttcaacaacttctgttcaatagccaggcttctggggaccaagacgtgcaagcaggtaccatctggaagcagcagaacaaatgggcccctcctttcacgcattgctctgtccagccctttgccatcttaccaggctgtgtgtctgggtctggagagaagttgtcttaagttcagtccctgatgagcctgtgcttctgtgagtttcccaaacatggcccttctgcaagtgccaggcctaatgatgtttggggacccgcctcctccttgctgaatgctcatttctgtctggactctatttaatgcttctgggtcctacactctttcgcttcttttttttggctctggcctcctttctaaatgtgtacccctttcccagaagggactcccaggtctttctgtggctcttgttaatgagcacactgctgctgctgctgcagctgctgcagctgctgctccctccaccactccgccagcctcttcagtcattttattctccacattttctatcactagattatctttattttgtctttgagacagggtttcactgtgtcgcccaggctggagtgcagtggcatgatcatagctcactgcaacctccgcctcctgggctcaagcagtcctctcccctcagccaagcaagtagcaagggactacaggtgcaggccagtatgcccagctaatttttttttttttttgagacagaatctcgctctgttgcccaggctggagtggtgcagtggcataatcttggttcactgcaacctccgcctcccaagttcaagtgattcttctgcctcatcctcccaagcaactgggattacaggtgcccaccaccacacccagctaattttttttgttttgtttttttgagatggagtctcggtctgttgcccaggctggagtgcagtggcatgatctcagctcactgcagcctccgcctcccaggttcaagtgattcttctgccacagcctcccaagtagctgggattacaggtgtgcaccaccacgcccggctaattttgtatttgtaatagagacggggtttcaccatgttggccaggctggtctcaaactcctgacctcaggtgatccacccgcctcggcctcccaaagtgctgggattacaggcatgagccaatgtgcctggccatttttgtatttttttttagtagagatggggtttcaccatgttggccaggctggtctcaaactcctgacctcaagtgattggcccaggaaaagacaggaaaagaccacagtgagaagacagactgaagaacagggacaaggaggcagctgtcagggccagcatgtccaacaggaaaggaaccccaatgctttggcttcctaccttctggaggagactctgtggcctcttcttcatgcttcctgtactgagaacaattaatagaaccatggactgggcaaggtggctcacacctagaattccagtgctttgggaagccatggtgggaggatcgcttgaagccaggatttcaggaccagtgtgggcaacaaagtgagaccccatttctacaaaaaaaaaaaaaaaaaaaaagccacgtacctgtagtcctagtactcaggaggctgaggtgggaagatggcttgagcccaggagttctatactacattgagctatgatggcaccactgcactccagcctggccaagagtatgagaccctctctcttaaaaaaaaaaaaaaaaaacaaacaaaaacagaaccatgagctgaagtgccctttgctttcattttggagctcatacctatttccctgatcacaggttctcaacgtaaccatctatggatttgtatgcaagaatgttcttgtctgtattttcctgagaatagttacagttttcaaagatcccccacaaagggccaatagccccaacaaagaaaaggaaaaactaaaaaccagtgctttaagagaaaaaacacatcctattgaaatggctgaggctccggtatctttatactgacagagggagctaatatttagcccactgaaaccattcctgtcctgtcctgtcctgccttacactcagttacacaaggcacagcgttgcccttcctaaaaagaagaagatactgttggtcacagtcagcccactcttctacccgtggcttggtagaaagagtagtaggtgacagcttctgaccaggggcggtattactgtgctcagtatttctcctttcctgagtcaggataaataattaggaatgaacttcagagccagtaacccaatgttccagtggcactctgtctctccctgactgatgagaggcttggtcagctgcctgagtttctcagaaccctcccaaggccagcacccagctgggccacttacctgacccccttgctcgaggagtgacaggcccgttggatttctcttccaggtctttcagtttgcagtcaaagaatcacttatcctgaagctgccaacagatgagctcatgaacccctcacagaagaagaaaagaaagcacaggcaagaagggttggacaaagtgttttgttttacagccaggctgttccctgtgctctgacctccccttggagttcccatctgcctccctctttagcaaccgcacaggctgtgtgagcccatcagcttggcatcacatgactgagagccagcctcctgagtgctccctgagggtctgtgccttagatcagccctcttcttgtcccccagtgctgtggaccataactgtctgtttttctatttaagcttctggccaataggacatgagctggcctcatggctccaccctgaagccatttctccttgttggttttgttaccaccttacccatttctcaactctgatcagagtttatttatttgtttggtttgtgttgtttttctgagttacatgatagcctttacttaggttggaagtttttaaaaaaattctgcaccctggccctgttccctagtgactatcacctatcagaggaaggagctgacaccacttctagatacagaaggaaatccctgtggctcctccctttcagttctttcagagaagattcctgaaaggccttcccacctccccatcttgaaactcccccatatctccacctccacaaagacaaagggagagatttggagagaaacaatagctttataatagaccaataggcttgggctttcttttatttctgtgttgtgttcttttatgttatttgcttgtttgggaggggttgtgtttaagtttaactcttgtagcacaggccagctggatttaggatggactctagcttctgtgtaccaaagtcgtcctgttgaggggtttgggaagatactccccagtcatcaaacacagtccctcagagcaagtcacgttgtcatttacctgcatttgcagagctccctagggccgtgactgagacctgtccttcctgtctttttcagattgtgggctgcacactgcaggaagattcagctgaagaaaggtaagttctaccagggcattcttcagcagttcagctggaggcctcactctgtggtcatcaccctaccccacctccagctgcacttgttgaccctgtgccacttccgcagattgcagaattctctgcagcaactgagaacagctgagcctctcactgcaactgagaagacctcttaggaggtaacattaagggccttgtggtctgtgatttttcttttttttgagatggagcctcgctctgtcacccaggctggagtgcagtggcacaatcttggctcactgcaacctccgcctcccgggttcaagcaattctcctgcctcagcttcccaagtagctgggattacaggcatgtaccaccatgcctggctaatttttgtatttttagtagagacggggtttcaccatgttggccaggctggtctcgaactcctgacctcaaatgatccacctgcctcggcctcgcaaagtgctgggattacaggcgtgagccactgtgcctggccagtatgtgacttttctagtgtgccatttgctaggttccagacctcatttaatgtttagaatagcttccctgttgtcccagaccatctccacaccctccccacaaagcagatcaccccactgcagcttatgaacaacggtcatccctgtcttctcacttcaggtgctaaatgtgtgtccaaggagattgttaggaccagcctcctctgaatcagggcagctggacacttgggagggaagacagctggagagtatggtcacagcagcatcctcctctgttttctttcctagataactcttccacacaagtgtacaactaccaaccctgcgaccacccagaccgcccctgtgacagcacctgcccctgcatcatgactcagaatttctgtgagaagttctgccagtgcaacccagactgtaagtgtgctacgttttctgtatagtctaccaaaacagttggctccagtgtgccctaggcttgccccattcctgtgccctttactgcttatggccttctgatatcccctttgctgtgttttagggattctacaaatgaaataagtgcatgagatctgggagagtcgtttctggaaaacgtttaggttcatgattctaaaagcagcaattacacagaaatcagatactttcccaactttgtcttctaggggagaattaagaaatgtggggggcagcaggcgcagtcactcacgcctgtaatcccagcactttgggtaggcggatcacttgaggtcaggagttcaagaccagcgtggccaacttggcgaaacctcatctctactaaaaataaaaaaattaggccaggtgtggtggctcacgcctataatcccagcacttggaaggccaagtcgggcagatcacttaaggtcaggactcaagaccagcctggccaacatggtgaaccccgtctctactaagaatacaaaaattagccagacatggtggtacatgcttgtagtcccagctacttgggaggctgaggcacaagaactgcttgaacccagagggcagaggctgccagtgagccaagattgtgccactgcactccagcctgggcaacagagcaagactctgtctcaaaaagaaaagaaatgtgggactcttttttttttttttaagttacagccccagtttcccttttctgaatactgttttaaaaaattttttattcagatattttttgtttgtgattctgtgtatgtctattttcatttcatagctggagttttaatatcaggtagaagacaggggcctggatgtcagcagagacatccgggtacttatcttttacttcttatcccaccatgcccttcccaactcaaagctgagcagtttgatggcagtccccacagcttgcagaacttggtgcccaggcggttttgctggaggaaatacctcctaacccatagcagatagtgatcttagccgcagcagagaagtggttgcgctgggttgggcagtgggtggagaaggatggcatagaacggatgcattctgttctcaaaatgatacttgttttgatggtgacaatttaccagtgaaacacactgatttcatattctctggggtactctccacctcagtgggagggagaggattgttggggaatctctaggggacacttcttattagtatacctgctttttttttcattttttaaatttttttgagacaggatctcagctctgttgctcaggctggagagaagtggcacaattatggctcactgcagcctcaacctccctggctcaagccattcatccccctacatccatcaagcctgggactacaggcaggtgtcaccacacatggctatttttttttttaatttttttgtggagacaggatctccctatgttgcccagcctggttttgaactcctgggctcaggtgattctcctgccttggcctcccaaagtgctaggattacaggcatgagccaccatgcttgaccacacctgcttttttgactcgaaggcatgaatgttgggaagcactcagttttctatggacaaaacttgtgtatttgattattgggaagggagcttcctcttattttgccaaacatccttgaacacaaaaaatttacttctttgctgtcccttgagtcaaccacaagccccagtattagcttatttcccttctaagacttacctgtcttcccttcccaggtcagaatcgtttccctggctgtcgctgtaagacccagtgcaataccaagcaatgtccttgctatctggcagtgcgagaatgtgaccctgacctgtgtctcacctgtggggcctcagagcactgggactgcaaggtggtttcctgtaaaaactgcagcatccagcgtggacttaagaaggtgaggcctttcctcaggaccccacaccacataaaatggagggggaaggaaggaacggtcccaagcattctctttccactggttcttttgaggctttatatgtgaaagtgcttgataaatcctaaaagacacatatttactgaattaataaaggcttcagtcccagtagggcttagaaaaatggttcctggccaggtgtggtggctcatgcctgtaatcccagcagtttgggaggccgaggccagcggatcatgaggtcaagagttcgagaccagcctgggcaacatggtgaaaccctgtctctactaaaaatataaaaattagccaggcatggtggtgcatgcctgtaatcccagctactcagaaggctgaggtaggagaatcgcttgaacctgggaggtggaggttgcagcaagccgagatcgcaccactgcactccagcctgggacagagtgagattccatctccaaaaagagaaagaaaagtggttccttgaactggccagacaaaaaggagctgcgaggtgtatgcacctttggtgatgtctatgtttacctcacacattgcagtgaattcctatagactaaggcccaggagggctccatggataaaggaagagatatcctatttccgttcgtcaccacctcccattttcttttctctcccaagcagaaaagaatgggttagacctttttctgctttcagatcctcttaacagttgctggttctttccaccccacccccaccacacatgtgcacatccagcacacaccccctactcatgcacaccctgtagtctgagacttggccccctcttccccagcacctgctgctggccccctctgatgtggccggatggggcaccttcataaaggagtctgtgcagaagaacgaattcatttctgaatactgtggtgaggtgagtgctatagttttggcccacattcttactcgggggagactgatgagaaactctgattttctgtgggccaggcttctttgaattaatctctaaataactcagctgtgttctcacgtggcctcttggggagatcccacagaaccgtttgcagtactgaaaccactgttcaactctttggcaactccagacacaagagatgaggggggctcttttcagccttaaaactggttggcctgggtgggaattggaacagcataacttgaacttgctctcttgtgattctcatcatgatgctcagtaagcacccatgtgagataccacccagccctttctgggggcagggtaccatgccctgagcaggcagcctgatactcctatttgttatttgtctatctctctagctcatctctcaggatgaggctgatcgacgcggaaaggtctatgacaaatacatgtccagcttcctcttcaacctcaataatggtatgaagtcactttgtctcatcccaaggtggtcttttttttttttctttttttgagacggagtcttgctctgttgcccaggctagggtgcaatggtgcgatcttggctcactgtagcctctaccctctgcctcccgggttcaagtgattctcctgcctcagcctcccgagtagctgggactacaagcacctgccaccatgcccggctaatatttttgtatttttagtagagactgggtttcaccatgttggccaggctggtatcgaactcctggcctcaagtgatccacccgcctcggcctcccaaagtgctaggattacaggagtaagccaccgcacttggccccaaggtgatctttctaccagattgcccttgctgtagtccaagtttagatcagctccgaatcttccagcagatgcatagagcaagggggcaggatcacacttggggatcccacaggccacagtgcccttgctttggaagaacctccatttctgggttctgtttgtaataggagtgctgagcgtctttacctgagaaatctccctgcccagtagatgagaagatccataattcaaagagggacccaaagggagtgctcccacacaaggctgaattctgaggctgcatgctttcctctgctcctgttagcacactgggcttcaacattcccatcagactaaagtgtttctgttaccatttaactgattttaaattcaagctgagaagctgtggaattgcctgctgtgcttatggttttccttgatttactttatacagattttgtagtggatgctactcggaaaggaaacaaaattcgatttgcaaatcattcagtgaatcccaactgttatgccaaaggtgagtcccagtaacctgggaggtggggtgggggatggatgcctctttactgtgatttccattcgttgttgaacattttccttagctgagctattttttgtccaaagataatcatgattaatatctggtatcattttaggcccctctcaatcttagttttctaatctgcttttttcagcgaatacattataaacactttcccacaaacatgatttaaccagcctgagcaacatagtgagacccatctcacaaaataataataggctgggtgtggtggcttacgcctgtaatcccagcactttgggaggctgaggcaggtggatcacttgaggccaggagttcaagaccagcctagcaaacatggtgaaaccccatctctactaaaaatacaaaaatcagctggggggcgtggtggtgtgcacctgtagtcccagctactcaggtggctgaggcacaagaatcgcttgaaccctggaggcagaggttgcaatgagccaagatcatgccactgcactccagcctgggcaacagagcaagactctgtctcaaaaaacaaaacaaaacaaaacaaaaaaccccacttataataataataaagataatttttctgccataataacagatctaaaagcatagaggcaactaccatattgactactttctaattccatttgattcatgttttcactgggaatttggagaaaatcaacccagaagcctactggttattgacttggagttgggtaggaacctagcctcgggtttatcctgcttgcagtggtcatggtgaatggagaccatcggattgggatctttgccaagagggcaattcaagctggcgaagagctcttctttgattacaggtgaggtgccagtaatggtccttgggatgtggcccaggaattggaaagagtggctgttggaatagatttgggggctcagggagggtaatggagatggaggagagagtctcccggtgaataaggctgtgtcccttgttctgatatctggtgccttgcctcagaagtgggaccattgtaaacagcccttaaggagtgggaggggaagtgaaacgggaggggactccgccttttcaatcacaaaagtcatgagagtaacctggttcctcttccctgctctgggacaggtacagccaagctgatgctctcaagtacgtggggatcgagagggagaccgacgtcctttagccctcccaggccccacggcagcacttatggtagcggcactgtcttggctttcgtgctcacaccactgctgctcgagtctcctgcactgtgtctcccacactgagaaaccccccaacccactccctctgtagtgaggcctctgccatgtccagagggcacaaaactgtctcaatgagaggggagacagaggcagctagggcttggtctcccaggacagagagttacagaaatgggagactgtttctctggcctcagaagaagcgagcacaggctggggtggatgacttatgcgtgatttcgtgtcggctccccaggctgtggcctcaggaatcaacttaggcagttcccaacaagcgctagcctgtaattgtagctttccacatcaagagtccttatgttattgggatgcaggcaaacctctgtggtcctaagacctggagaggacaggctaagtgaagtgtggtccctggagcctacaagtggtctgggttagaggcgagcctggcaggcagcacagactgaactcagaggtagacaggtcaccttactacctcctccctcgtggcagggctcaaactgaaagagtgtgggttctaagtacaggcattcaaggctgggggaaggaaagctacgccatccttccttagccagagagggagaaccagccagatgatagtagttaaactgctaagcttgggcccaggaggctttgagaaagccttctctgtgtactctggagatagatggagaagtgttttcagattcctgggaacagacaccagtgctccagctcctccaaagttctggcttagcagctgcaggcaagcattatgctgctattgaagaagcattaggggtatgcctggcaggtgtgagcatcctggctcgctggatttgtgggtgttttcaggccttccattccccatagaggcaaggcccaatggccagtgttgcttatcgcttcagggtaggtgggcacaggcttggactagagaggagaaagattggtgtaatctgctttcctgtctgtagtgcctgctgtttggaaagggtgagttagaatatgttccaaggttggtgaggggctaaattgcacgcgtttaggctggcaccccgtgtgcagggcacactggcagagggtatctgaagtgggagaagaagcaggtagaccacctgtcccaggctgtggtgccaccctctctggcattcatgcagagcaaagcactttaaccatttcttttaaaaggtctatagattggggtagagtttggcctaaggtctctagggtccctgcctaaatcccactcctgagggagggggaagaagagagggtgggagattctcctccagtcctgtctcatctcctgggagaggcagacgagtgagtttcacacagaagaatttcatgtgaatggggccagcaagagctgccctgtgtccatggtgggtgtgccgggctggctgggaacaaggagcagtatgttgagtagaaagggtgtgggcgggtatagattggcctgggagtgttacagtagggagcaggcttctcccttctttctgggactcagagccccgcttcttcccactccacttgttgtcccatgaaggaagaagtggggttcctcctgacccagctgcctcttacggtttggtatgggacatgcacacacactcacatgctctcactcaccacactggagggcacacacgtaccccgcacccagcaactcctgacagaaagctcctcccacccaaatgggccaggccccagcatgatcctgaaatctgcatccgccgtggtttgtattcattgtgcatatcagggataccctcaagctggactgtgggttccaaattactcatagaggagaaaaccagagaaagatgaagaggaggagttaggtctatttgaaatgccaggggctcgctgtgaggaataggtgaaaaaaaacttttcaccagcctttgagagactagactgaccccacccttccttcagtgagcagaatcactgtggtcagtctcctgtcccagcttcagttcatgaatactcctgttcctccagtttcccatcctttgtccctgctgtcccccacttttaaagatgggtctcaacccctccccaccacgtcatgatggatggggcaaggtggtggggactaggggagcctggtatacatgcggcttcattgccaataaatttcatgcactttaaagtcctgtggcttgtgacctcttaataaagtgttagaatcca

SEQ ID NO: 344 - DNA, 7832 bp, Homo sapiens
  source 1..7832: mol_type = genomic DNA; note = NC_000019.10:c29213151-29205320 UQCRFS1 [organism=Homo sapiens] [GeneID=7386] [chromosome=19]
gtgaccggcttggcggttggagcggctgtcgccatgttgtcggtagcatcccgctcaggcccgttcgcgcccgtcctgtcggccacgtcccgcggggtggcgggcgcgctgcggcccttggtgcaggccacggtgcccgccaccccggagcagcctgtgttggacctgaagcggcccttcctcagccgggagtcgctgagcggccaggccgtgcgccggcctttggtcgcctccgtgggcctcaatggtgagccggggcgagggccgcgagcagggctgggggtctctcggtgcccgctcctccggcccccagcagggagcggccgcgggcgcgcgagcggagcctgaatcaggtcgggctgggcggcctccgcaactctgggcctggcccccgggctcggggcgtctttctggtggccggcctggactcgcgtccgccggcttcgcctggttcctcctcggccgagttcacgagctctgtagtcccgctgttccagccacctctgaggggttttgttgcttgcaggtcgtttgaccttgggcgagtttctaaacgtacttcctgtgaaatggattcatatctttatcaattttgtaggggtgtcgtgaggcttaggtggaggaattctacgtaaagccgttagcacagtttgggcacttacatgcttaagaaatggaaacttactaatatttgggaagttggtcttctcaccactaccgatcccttcatgtccttccccttcatcacccccccaccaaaaaaaaaacaaaaaaaacatacacaaggtcagttacagtgtagtgtcacaacataatcagtcgtcaaggacgggcagagattgacgacatttacattttacagatgagaaaacagacgaggtagaatgactcgcaccaggatccgtggtgtggacatgtggtagcagggatttgacaagacgaattgtcgtagccactgagctcttcgcaggggctattccacaccctctgtccttagatccccgtttatcttctttgcctcgccttccatctttacttggccctgtatcggagatagagaaatggcagcctgtgggcagtgtgtctgcaggctgtgtagttttcaaaaaaactgggaagactaatggcatctcttaaaatgctggaagccggtaatactgggatctagtttctacttgggaaaattccatagtgtgctgtgtagtggccgcccccgcagttggagcaagtggtcttctccagtttgtcacagtctttaccaggtctgcgtgtttcattctgttaccagcctggctccactgatagctgtttgtgactcttcccctacacgctaaccaaattgcccgccacttttctttttactctgtcttcattcaccctgggctctgcactttcttcatggtccttccactaagttgctacatgtccatatgttttccttacccatcttttcaatctcagttaaggatcaggtgaataaagtttttatttgctgatttgtctgtctctgtagcacatacactttacactctgtattgtgtttattggtaactcctccacccttgggcttaagggcatagagaaggtaatatcttctttatttttctatctttcacaacgtcggattttgtatacagttagtgcaaagtatttgtgaatgaatatttgttaaggagcatcagtgggttttgaagaaactgtccatggcaggtgtagagtaccctagcccatccttgggacctggaggtgagaaggaaggaaggagaacatttcaatagcaaaagaaaagcatctttggaattcgtcgtgttgctaaagtttcttcaaaaaattggaggcttacatttctctgatggccagtgatgctgagcattttttcatgtgttttttggctgcataaatgtcttcttttgagaagtgtctgttcatgtccttcgcccactttttgatggggttgtttgtttttttcttgtaaatttgtttgagttcattgtagattctggatattagccctttgtcagatgagtaggttgcaaaaattttctcccaatttttaggttgcctgtaaaccacaatgagataccatctcacaccagttagaatggcagtcattaaaaagtcaggaaacaacaggtgctggagaggatgtggagaaataggaacacttttacactgttggtgggactgtaaactagttcaaccattgtggaagtcagtgtggagattcctcagggatctagaactagaaataccatttgacccagccatcccattactgggtatatacccaaaagactataaatcatgctgctataaagacacatttacatgtatgtttattggggcactattcacaatagcaaagacttggaaccaatccaaatgtccaacaatgatagaccggattaagaaaatgtggcacatatacaccgtggaatactatgcagccataaaaaatgatgagttcatgtcctttgtagggacatggatgaaattggaaatcatcattctaagtaaactgtcgcaaggacaaaaaacaaacactgcatgttctcactcataggtgggaattgaacaatgagaacacatggacacaggaaggggaacatcacactctggggactgttgtggggtggggggagggggagggatagcattgggagatatacctaatgctaaatgatgagtcaatgggtgcagcacaccagcatggcacatgtatacatatgtaactaacctgcacattgtgcacatgtaccctaaaacttaaagtataataaaaaaaaaattggaggtttacctgacttagagaaactatttttagaaacaggcaaataatgtagaaccataaggcaaaaaccttttctgtaatcatttcagcctgtaatttaagttcacattatagtctgtctagatggttcatggcaggatggcttatgggagtggaggggttggatctggagaagattcttgaattggagaggaaggttgtactattttcatgcagatttccaaggcgcattggagctcaaccttaaaataaaacttgttttgttaaaattccttaaattttctcctttaagtatttgattttgctttaggttagaattaaatctagcatcttactgaaagtcagacctaatgcagctcatgtaaatatttggagaatgatttttgcaacagggcagtttaatttccgaaaggattcttggtggtgtagcctactaaagtgtaaccagctagatagagtgggaggagacttttgccaccaaatctctgaatgagaagggcaaagccattttattgagttttcttgtacatttccttgtatactgttaagggttgtggatactgtttttaatgtagaagtatgaactttttattcctttatcttttagggaggaagctcatcttttctgtaatcccaggtagtgctaggagcaagtaatttatgcttaattccaaatgccagtatatactggcaggttagcatttatttgttagagtagtagtataggatgtaatgtcactttgactccacagattctgggatgtgagtctcaagttgccattatctgtgtcctggtcttctccaggaaatgatttagtcagaaaagcacatagagtgattttggtaggtttcattattgtttgaatacttctggcttccataaagttattgaccttgagaatcatgtgaaaagcagttcaggtattccatattgtaatgtttgactactcaaggaagtacagtatattaggatgatatcctagtagagcaaggtagaattgcagtttattacaataaaaatgcatcataaaagatctttattttggatacacattttctaaaagaggaatttttagtgtccccttttttaaaaaggaaactttgtggcaaatttcttaagatgaatatacaatttgcaaagaggtttgcttcctgaaacatacctaaaagtggtactaggtaaaatttttttttggtcagatatttaaaaatagtattggagagagggatgtaactgtgtcttgtttttgttttttaaactaccaaagaaactccttgctcccaaagtactacatagtaattatttgtttaacattcatttgagctcttttatggcctagactagaagtgccccagttgagagaactacagcagtgaaaagggaagataatacccctacttttacagtaactattgccctttactgaagagggggagatatgaaaattttgccctttttttcccttgctaaattgaaataattagttcttttgcagttttcattttattttgagagctctgataaggatgtccttctctgcctattagtggttttaagttaaagtaatactaatttatacactagagtataaaatagaaacgctaatttttctgcagcagagttatacagttcacagaatgtttattatatcattattattttatgaattaacagttttttccgagaacatagattggactataaggggcagacatttgccttaataaggtgatcacacgtcaacttactgtgtggactagatgagttttagggtgtccttctaatccagagagtatgggaggtatttagcatgatttatatagtaagtcttggcagttgaattttcggaaactttgagttattactgtttattttgctgtttaacgtttttagcatgatgcactgaggtgttgtgaatcctgaatcagcaatgttcaaccaactagggggagctcaatttacaaatagtatcttgtgatttcataccagtatgataggtggtggttcacttcatttcatttttaagattttatatgctagcaccgccaatttgactatttctgagacccagtgagtgccatatttcacatttttagaatttgattttttacctgtgaatccataaagggctatttcctgatatatactcccttcgggatactcatctaattgtgttttttaaccttctgtttgtcttgcagtccctgcttctgtttgttattcccacacagacatcaaggtgcctgacttctctgaataccgccgccttgaagttttagatagtacgaagtcttcaagagaaagcagcgaggctaggaaaggtttctcctatttggtaactggagtaactactgtgggtgtcgcatatgctgccaagaatgccgtcacccagttcgtttccagcatgagtgcttctgctgatgtgttggccctggcgaaaatcgaaatcaagttatccgatattccagaaggcaagaacatggctttcaaatggagaggcaaacccctgtttgtgcgtcatagaacccagaaggaaattgagcaggaagctgcagttgaattatcacagttgagggacccacagcatgatctagatcgagtaaagaaacctgaatgggttatcctgataggtgtttgcactcatcttggctgtgtacccattgcaaatgcaggagattttggtggttattactgcccttgccatgggtcacactatgatgcatctggcaggatcagattgggtcctgctcctctcaaccttgaagtccccacgtatgagttcaccagtgacgatatggtgattgttggttaagagacttggactcaagtcataggcttctttcagtctttatgtcacctcaggagacttatttgagaggaagccttctgtacttgaagttgatttgaaatatgtaagaattgatgatgtatttgcaaacattaatgtgaaataaattgaatttaatgttgaatactttcaggcattcacttaataaagacactgttaagcactgttatgctcagtcatacacgcgaaaggtacaatgtcttttagctaattctaattaaaaattacagactggtgtacaagatacttgtgaaatctgtaactgactttattttcttgcccaaatatttgcttcctgctttgcgtcagggacgcagattctgcacggtcattgttgggatgaagtaaaattaacgggtcatctaagtgtctatggcattgacagaaacagtagtatctaggtattccttatttaccggacttggtaagagtcctggctatgcatttcctccctactgtgtaagccgtgtgataatctcaacactaatctgtgggaaagagtcctgaatgaggcattagtagctctgagggtttatcttcacgtctggtctgctggtttttctccttaagtgacaggccaggaaattttattagtcccttatgagtgtaaattagtacttaatcctttagtcttaataggcagtgatgggatattacctgagagaaactttccaaaatgagagtgctctgccatttcgttcattttgtgtgtggttcatcatgtccccaaagttcctgcatccactctatcaggaggcagaaagggagcatctgagacctaatactgcctgcatgcagaagtggtcctgctgggtttgtttctgtagtgatgacactttgaatgttttttcctgttgggtttacagtcactcagcacttttcactgtaagatggtgtggaaccagacgcagagcacatcggaattcacatcctattctgcctccaattacacaggtgaaacaagactaaggtccattttcccctgggagttgggagtgggctttgtcctttgagaatcacagtcactttttgatgtgtttgtctttgctgtttagaggtggaccagtcgtgctttactgagtctacctgataatctcatgtacacttttttaaaatggcaaaaatggttaggttgggtctgcccaaagggaactgaccatccaggattccagcctttgatgttaatagctaggtgttgacagaaaaaagaaaatgtcaaactttctatgcttatgagtagatactagtctttgcttcatttttaccattctagaaatgaaattagcatgtgtgataattggtgggacacagaagtattttatattctgtgtctctagatagtggaggcactcttcggattgggggttggaggaagggttggtggcagagttggaatgtgaaacattgagttgtgaggggaacacaggtccacacactaaaaaacctgtgctgccaaaaatgtcaacagcaccccctccctatagagaaatactgataacctatatcacctcccaccctgaagtgataccttgaaattctacatggcagtggaggacagaagtaggaagtttgcaggtctctaggtactcacttagtgccggaattgctatatttggtggctgcttacttcatctttcatatttagagtttgatggtgggatgctgttaaattgtagtagaccatttagtttttaaagaaggctttgttccacaagtgacaggacaagtcaagtcacttcatgctgttttgctgaatggatacggcagacctgtgttaacatttttaccattctgtgaaaacaaaatcctagatagtaggagaaaattacttacagaataaacctgaccagctagcaccctgacatcagatcattaacctactgcattttattggggataattcttgggacaatcttgagagccaagtgttttcattatgctttaaaaagtgttataaaaatggcctttttgaaaatgttgcattatttgttaaagataacatcaaattttctttggtctttctgagcatacctttgtaaaaactttgactcaatctgagtgtatagagggcatttgtcctgactggatcaaaatgtgctttagtaccctcatttttctaaactgtaggaacatactatttaaatatcagaagtaattcttcattctcacagtactaaatttcattttctgta

SEQ ID NO: 345 - DNA, 306527 bp, Homo sapiens
  source 1..306527: mol_type = genomic DNA; note = NC_000010.11:c17130492-16823966 CUBN [organism=Homo sapiens] [GeneID=8029] [chromosome=10]
aacgtttttaattttgatgtattccaatttatatcttttggttgtctgtgtgtttttctttttttgcccatgcttttggtatcatactcaagaaatcattgccaaatccaaaatccaaggtcatgaatttttgtcctattcttctgagttttatgttatagtttcagattttttgaaccattgtgagttaattttatagttttagctcttagatttagatctttgaacttttttgagttaatttttgcatatggtatgaggtaagcctccaacttcttttgcatgtggatatctagttttcctagcgctgggtaaaggtggaactcctctgcaagggaggtgaggaaggaggggaacagagaaaggtgtagataatgaccagtttacttttgttgaaacctagttacttcttaagcaaagattgtttaagtggatgttttcaaagctgcttgttactgtttcaaaggtcaaatagataatgattaagttgcgcatcacttaaggtagattttgacctctcacaagttgaagagtactgaagatctaagatcatttacatccctctggaagaaaaaataacatagccttctagggcaaagaagaaaaaactcaacagttacaggatattccatggttcaaagtacacctgcctggtttgctgttctccaaaatcccatgctcagttggttggagtggcctcactcttacctgccaacctgggaggttgatgatgaacatgtctttaccttttctttggagtttgcttaccttattaatatttgctgaagtaaatggcgaagctggagaacttgagctgcagagacaaaaaagaagcatcaatctccaacagtaagtaaacacatgggtcattcctgctcagggactaggctaattcctcaccagttttcccaaatagccagataaacaaaggtgcaatttttcttgaggaaaattatgttgagaagcaaacagggaaaaacatttagactgaggtatgaaattactttcctatgcacaaattattatctgtcattttgcaaataatctgtttgcaattgccaggaggtatctctgagaaatgtgcagagaaaaaagtggcagatgagcaggggcagttgggttgagatgatcaaaaagtgaagatgtatttggcctgtagttattcagtaagaaactttgttattttggtttaaaaattgtacttgctaattactgatgcattctctcgtttgaattatataggcctcgaatggctacagagagaggaaatttggtgtttcttacggggtctgctcaaaacattgagtttagaaccggatccctgggaaaaattaaattaaatgatgaagatctcagtgagtgtttacatcaggtaatacactggaaatatattgaagtcattttgtatatccatatacggtgacttaattgaacaagtctagattaatctgtaccttgaatcttttttaattattattttttattaatacataatttgatacattcctataatgtgtaaagttcaaatcagggtaattgggatatccatcaccttaaatatttaccttttcttcatgctaagaacatatgaattgttctcttctagttattttgaaatgtacaatagattaatgttaactatagtcaccctactggtctatcaaacactaggtcttatttcttctatctaactatatattgtattcattaatcaacctgtcttcagcctccctcccccttcctagtgtaccttgaatctttagcatagagaacataattgggcatcagacatgttcttgtaaaggacgatggcctggggttaatagtgggtagagggagtatgctaaaagatagaagctcattgtgccagacaatgcaccctagtccagagaaggcacggagggtggaactgaaactcctccacaggggatgcgaggaagtaggggaccaaggatatgtggacatgtgaccagtttgcttttgccacagaacagaattggccagttattctcctgccttactgggtgttttcatttcccaataatcactgcatatttcagtcataatgttagaagtcagcattattcagagcttactgtgggccatccactgtgcttagcaccgtatggatgttatctcatttgaccttcacagctgtcctatgaggtggcctttattgtcaccctagttttacaagaggtaaagaaaccctgaagcagttaggtaacttgcccaggacagcaataaatagctgagccaggacttaaaacctaaacagtctgcttccaagccaggtttcttaataagcaccctaaactggtattataggaaaacatacaaatggaaaataccttgatctattgttactgaaaaggataagtggaattatgctgtggctattttagcccagtgtttattacgcatggtgttgttttggtttttataataataggcaagatcttagtgcttaaagtagaatactactcaagtttttaattatgttactgtaaagataaatatgatattttcactagtgctcttcatttcttcttctttttctaaaattagatccagaaaaacaaagaagatattatagagttaaaagggagtgcaattggtctgcctcaaaatatatctagtcaaatctatcagcttaattccaaggtaagtctgacatctacgtcataagaaccgatgagttctccctagttctattgtataagtaaccgttttgtaggggatataccaactttgtgtgctctttagagatttagcatgtaactactcactgtttggttaaatgacacagctgtaatggaggctgtagaagtgatggacagaaggcaggaaatgctgtgcaagcacttgttgcagaagtaggccttgggctgggagcagtggctcactgcaagtgaatggatgattaatataaaaaactgcctgtaatcccagcagtttgggaggccacagagggagggtcgcttgagcctaggagtttgagaccagcctgggccacatagtgagactccgtctctaccaaaaaaaaaaaaaaaaaaaaaaatagctgggcatggtggcatgagcctgtactcacagctacttgggaggctgaagtgggaggatggcttgagccagggaggttgagactgcagtgagctatgatcatgccactgtgctccagcccaggcaacagagtgggaccttgccagaaaaaaaaaaaaaaaaaaagaaagagagagagagagacagaaagagagagagagacagagagagagagagaaagaaagacagagtgaaagaaagagagagagagaaagaaagaaaggaagaaagaaagaaaagaagccttgctgaagttctgagagcaatcttcttattggggaagtggatgcatcactgacatttatgaacatttccatagtcactgcctacagagaagcaatcggtcaacttatcagtgggttgtactttaaaaaaaaacttaaaaaaaccccagaaatctatgtgataggagggaataggaaggaagaaaatcctgaggggagaggaatgaagaggaaaaagggaataaaaggaggaatgaacaaagtgtgtccctagcagagggcattaggacaatatgtcaaggatataacatcacatgtgcaatgcctttgaaccagctaactgaagctttttcttccctattgccagctggtggatcttgagagaaaattccaaggcttgcagcaggtaggtctcatgctactacatacccaaatctttcacagaaaacatactagaatcattaatagagctgctattcttattttgaaggtgaatggatgattaatattaaaaacttgctttttcccataatttaattctcatcccagcatgtgcttcccaggatgcagatgcagagctgagtctaagacagatgaaatgacaaggctgaggtctccgagcctgttagggcttctgaccctgagtttgcagcccacagcccacatcctttaccatcaccctttagctgtgtgtgctgtgcttggtcagctagtgatctcccaacttgctgattctcccatcagggactggggctcggaaagcaagcatcctctctgacgctaagctcggaagtctaggtgtatcacaaaatagtccgaattttcttaaaatgacatttgctggtaattaaacttgaacagtttcttacagaaaacattgtataactgtactacatgcttgtagactgatctatgtaaacttaggcttcttaccccttttgtaggaagctgaccttttaaagactttcatggaagctgtaaccttctatgcagagaaatgtacagaatctcttcatgtttaaaattttgcataaaaatctggggattccagtgtaagaatttctgcaaaaatattcttcatctgttttgctcatgcttcaagcattttcctctacttttaagtttgatctgtcccactgtgaaggacagatacaaaaaaaaggactcatgcagattgaggcaggtcccaccattctggcaaggattgctgctgcaaacctttttgtcatttgatgatcaagttcgtgtattccttttctccacttagataatacattgacccctcagctgtcatttttaagagagtagttaagcgaaagaaaatgagtaaagaatagtgctgtggaccgtgacactgcactcaagttttgtctcctggagggcttcattatattcgctcagccagtcctcctaccctcatccctcaggaggaatgttgaatgattttcaaatgtgaatgctttgtgcctttggatagggcaaatgctctctggccaccacagtccccaccactccctattgtcttcctcctgactcctgatttcattttctactaggcccctgtaggcttttaagattttagtccccagacagtgttgcttttgtctgacagaaaacctttgaatgagtttgtggttaatgttttaaagagcattctatgatggacagagccaattgttgtgctagcacaaagagaaaaatagaataatggaataaaacagggttcataaagagacccccagacgtgtggtcatctaatttatgaccaaagtggagaaggaatgtgctttgcagaaaatggtattgagtcagttggctatcctctggctttctatttcatccataaaatgaaggaaacagacgtaatttttttttatgagtcactgtatatagtatgttgtatttgtatgtgtgtgtgtatgtatgtgcatatatatagacacatatataatatatatgtatgtgtgtgcatacatatatatgaaatgtaatcaacagtttgcccctattttaactttttaaaagcagagaattaggttgggtacggtggctcacgcctgtaatcccagcactttaggaggccgaggcaggtggatcatgtgaggtcgggagtttgagatcagcctggtcaacatggtggaaccctgtctctactaaaaataggaaaattagccaggcgtagtgggacattcctgtagtcccagctactgaggaggctgaggcatgagaatcgcttcaacccaagaggtggaggttgcagtgagctgagatcataccactgcactccagcctgggtgacagaccgaggctccatctcaaaaacaaacaaacaaacaaaacaacgataccaaccaaaacccagacaattggactatgagtgaaattcataaagtggccatcattgcataatcaagtgttccctctaaagaagttttctctggctgggcgcggtggctcacacctgtaatcccagcactttaggaggctgaggcgggcggatcacgaggtcaggagatcgagaccatcctggctaacacggtgaaaccccgtctctactaaaaatacaaaaaattagctgggcgtggtggcgggcgcctgtagtcccagctacttaggaggctgaggcaggagaatggcatggacccaggaggcagcgcctgcagtgagcggagatcgcgccactgcactccagcctgggcgacagagcaagactccgtctcaaaaaaaagaaaaaaaaatcaaaaagaaaagaaaaaagaaaaaagaaaaaaaagaagttttctctgcacccaaaggcagtaaaaatcttaacaagattcaaactggtagctgacatagggtcagattccccaggttatgtagatgtagatgtagacaaaggtaggtctgtttgtgatctgggctgaaagcagtcaggtgagcaccagggtgaaagatatgtcttagctggccacatttctaacaaagggacttggagcaggagttcagtcaccttaacccatgggaggaggggcagcagcagcagatgattatatttcaaaggctcacctcgagggaccaaagataagaatcaccggtaaaataaccggaatctccattttattttctttgtgcaatagcaacatccattattatttccacacctgaaacctttactcctgtccactgaggtctctttctcaggtgagaataatacttttccaagacaaagtgagaatcttctcccctcagacttcatcccacccgtggtcaaaagcatgctgagagttaaggaataggaacaagattgataatagaaaatgctttctgttttttcacaagagaggtgatttgaagaagaacataagtaatggctttaaagtgtagaaggagacccccactgattaagagttaaatgtaatcccacgtgcacggtaacatgcgttttgttgctgctgactgcaagtcatctcattgactgtcctgtttttgtttcagactgttgacaaaaaggtttgcagcagcaatccttgccagaatggtggaacctgcctcaatctgcatgattcctttttttgtatctgtcccccacagtggaaggtgagtcatctactctttggttaagaatgatggcaggtcagcatctgtggtttccttggaatcatcaggcatatttaattctccatctaaagtttctaggattctgtggcctcccaaatcaaattgaaatataccaggtatgctaaaacccaaacagtggtgagtatgattgtataacccaccaaatactaaagccattgaaaggagaggttcacttgattggataactgcctggaagaacacaatatttctgttaacattaatttaaattgttcagcattggaaagtaccaaacaaatcttgacatacctatgcaaattttctcattttctttgtttgtttattttttctgataacgatggaaactgtctccagcatgcacataaaaaaaaaagttaagtaagtattcccagatgtagcaccactgtgaactgaggattctattatgtttagataaggattcctctcctgtgactgctgtgatcttatgaagagctcttgtgttctattaggtgaaatctgagttccagaggaagaatagccaggggttaatatcagtattattgtatttgactttatgaggacttatatactgtccacgtataaatccttaaacgtatcatgtgaatgttcgctccagatacctctgtgacctttggcacctgactttgttccttatatgatcacagggtcctctctgctcagctgatgttaacgaatgtgagatttactcaggaacacccttgagctgccagaatggaggcacatgtgttaatacaatgggaagttacaggtaacttttttttttttttttggtaaatatcagtatatttttgaaggcctaaaacatcccatagttaagagcatcctaaattaactatctgtattccaccaaaagttggtactccatgaggaaatatttagctcttgcttaacgtctacatagctatttttacttaactgaagaaaagctcatgagtcctttactctcaccccgtgaagaaatccttgctctaacatccccaaggaaccggaagaaggctcccgtgattggcacagagagtaagcatggcctggtgcaaaaggagctgaagacttaggaagagccggagcattgaaggggagccactgaatggccttaagtagaaaaggggacaccccaccacaccagtgtccccagctgtactctttccatgtattagcaagctcatagttttgggtaaagagagctttattcaatgctatgtcaaaatgtgaccataacgaggtcaaagattaaactgaggttcaatgaatgaagtaactctctctgaccacagtcatcattatcagtacagctctatcttctcttctgacttattctgtcaagtgacttgtccacagaattctcctgctcagctcaggcatcactttctgcaggaaactttcccttccctttttaagcagagtgaggcatctcagggcctctatgttcccatcatgctctagggatatccatcgtcaaagctttgctgatgccacacacattgtctttctaaaaacgaagtccaaaaaattaaggcagatcaatgccaaacttacttttgtacagttctttgaagtcaccttttaaactagacagtgtctttccttatagtttggctggtctcttttattttgtgatttttaaaagattaataaataaattctgctatagaatgaacaaatcctttcaatgctctggagtagaatctcactggattgaagagcaattatttgctctcttactggtgtctctgctatcttgttcttcaatttccacataacaatatccattctagtctttccagcaaaaatgagtgcagtaattttgttttttaaaccatcactattttttttaaattttattattattatactttaagttttagggtacatgtgcacaatgttcaggtttgttacttatgtatacatgtgccatgttggtgtgctgcatccattaactcgtcatttagcattaggtatatctcctaatgctatccctccaccctccccccaccccacaacagtccccggtgtgtgatgttccccttcctgtgtccatgtgttctcattgttcagttcccacctatgagtgagaacatgcggtgtttggttttttgtccttgtgatagtttgctgagaatgatggtttccagcttcatccatgtccctacaaaggacatgaactcatcatttttttatggctgcatagtattccatgttaaaccatcactattaatgcacacttctaaaaatgcagtcacaaaccttctctttttatttgatacttttgtttttttgatctgatctttaaaacttttactcattccaggttataaactcaaattattcaaacttctactagatatgtctatgagttcaatcattatgcaaaagtaaaattaaccacttctgacttaaatttagtgttatgttattaaagagctttttgattccaggactctgtttctcatttaaatgaagccttttttccctgcctttgttaggcttgggctggaagcaaaatgcagtctagtctctcatttccgtgaacccattatctcctgatttctgtttatgggcatttatcaaggaggattgctacatagaggcattggtggcaaatgtccaggctcctagaacttctgctttctgaccttcctgatatctaggaatgttacagagattagatttcactcctagtcttcctttatcatcactgtcttttggagtcttgtgggccaatagagcgacaagtatgggcaaactgtgatgagatccatagaccaagataaaggctgttgctgttttcagcacgttatttcttccccctgcaaaatgaaaaacaaaacaaaaacccttttactatttaccactctgcagcatgtcagaggttagagttctttatccacacacacatatgacagaatgagagctaggaggaaaggaaccatttatttgttgaaagctgcatttctaaatgacagattcaactttgtaagaacagtacgaaattctctcttgcactcttttataaaggagagcaagaatacagaagaactgatgatgtgtggatggctttggaaatgatcttgattcctagactctgcccttcatagatttgctggaggacattagagaacagagcatttaaatcagggttctttctcttgatatgggaatagtttctgaaacctcatgaattccatttcattatctacactttaagtcccgtaattcaggcatatgttagagactttttgagggaataaaagaaaatgaaaaaaggtgcatgagcataagattaaattattgctttgtggaatccacgtgtaatgaaacaagtgaacatttagatactttcttgagttctgttaattatgtgaggttaaatccttgttaatcagggtattcactgaggctagaaaaccctttgggaaatttcagcacacattagctaaaagaaaacttgagcctcagaatcatctggacctgcaaaaatgtagtcatggcatcaaagttcgctttggagtttggacctcattcagtttctttaactctttgagctcttttacttggacggaaaaaggagtctttaactggattaataatttgccattgtaaagacctctgaaaaggtgcagatactcattcatggaaagtcctgtttcatacctgtttcataggtaaacttctggtggaaattcttttttagaacaatgattatagcacaagaaacatcattttctgtttccactgattcttttggcttgaggtctagacccagagcttcagacaactaacacaattacatttcgccacttctccatgctgttactccctctttgttctgaagacgtgattcttgttgtttccctgctcactttgttttgttttgtttgtttttgtttgtttgtttttgagacagagtcttgctcttgtcacccaggctggagtgcaattgctgcaacctctgcatcctgggtacaagcaattctcctacctcagcctcccgagtagctgggattacaggcacctgacaccatacccggctaatttttgtatttttagtagagatggggtttcaccatgttggccaggctggtctcaaactcctgacctcaggtgatctgcccgcttcagccacccaaagtgctgggattacaggcgtgagccaccgtgcccagcctcccctgcttactttggatttaagacagcccttgggatctgagcttgccatgcatggatggtgtgtgttgtacatttagggctcagatctagaaggctttccagaaaaacaaaaagttgagtttctctggttttccagaaacatgatgattagtaaattttatttcacttatttccattcatatcactggtagattttacatcatgcagagtttaaacaatgaggataatctagttttagctcaggtggtagttaggtattaaacttattacctttttcactcagtcagtaaaattagtattgaaccatggactctaacacaagttaaactatgactatccaagtgtgtttaacctcttctcaattgccaaaatgcacttgcagtgttttcaaagaaaagcctagatttgttctgctggaaccaagttggcaataaaaggtcatagaaaagacacttctgctatatcagtaactaataactaaagcaggaatagtagtaagttggttttaaaaatacaatatatggcttttattttcacttagggaggtatataagtaattgttcatttttaaaggccatatcaagacaccttgaaaatatattttgcctgttaaccctgttatgtttaaaaggtacatgaggctgggcacggtggctcacacctgtaatcccagcattttgggaggccgaggtgggtggatcacctgatgtcaggagttcgagaccagccttgctaacatggtgaaaccctgtctctaccaaaaaatgcaatacttagcttacgtgctggcacgcatctgtagtcccagctacttgagaggcagaggtgggaagatcgcttgaacctgggaggcagatgttgcagtgagccgagatcgcaccactgcactccgcctgggcacaagaccctgtctcaaaacaaaacgaaacaaaacaaaacaaaaaggtgcataaaaatgcagcatcttcatataactctacttatcagaatgtaagaatataacatgcaggaacaatggtgcaggagtcgggtagacctaagtgtctatttatcttctgccaattattcattttgtggttttgggaaatgttagtctgtaaaatgggattaataatacttgtctttgaggatcataggaaggaatcctatggtttacttgagtttcttcctccctttctctatcttctcacatcatctaaacttaagtgaaagaagtatactctgtagctatttagagaacagtataggattaatgcctactcatctcccagtgataatagcaaggatgaaggaagagagagataaagagaaaggatttaactgcaggtccatgaaccagaatctcctctcaaatcttatgtcattttgcaatagttaagcacttagtgataaaataaagacaatcttcttagcacttgctacaggggaatgcctgtagactgcaatatgaccataattcacagagattaccactattatttcataagaaattgaggcagagggagttagtacattgtctgggtaaacagttaacaggaaggaccaaaatttaaacctaggcaatcttatcccaggggtttccaaacactcagatctcccagacatagaaaatagaaagctagtaacagttggtttaaagattcttcagcagggtgcggtggctcacgcctgtaatcccaggactttgggaggccgaggtgggcagatcacctgaggtcaagagttcgagaccagcctctacctctagaaaagagacttctgctaaatcagtaactaatcaattggtttcaccacatggtgaaaacccatctctactaaaaaaagaaataaaaaattagccgggtgtggtggcacgcacctgtagtcccagctactcgggaggctgaagcaggagaattgcttgaacctgggaggcggaggttgcagtgagctgagatcatgccactgcagtccagcctgggtgacagagtgagactccatctcaaaaaaaacaaaaacaaaaataaaaaagattcttaaacattgttgggaggtgttgggacaggtggcaaagtaaacttttagtaatgaagtctcctggatcaaatgctcaaatatgtgtatgaactgttttaaagttccataatcctcaagagtctaattaaattctctatacaaatattctatgtaaagatgggaggacaaagaggaaagaaaacaatatgagaaggaaagtagagagagatgcggggaatataaatgtctatgggggggatggataattcaatttctctttaattttaatcatttattgttattttcctatgactttatcttagtgagccgttccaaaggcaactttggaatgctcagaaatgtcatatattaatgaatcagcttttatgtaaatatatactgatgtcgtaaattgcatggaacatatttataccaaaaaatattcatttattggaaactcacatttatttgggcatgctgtatttttatttgctaagtctggcctcccgacttgaatgcatggatggtgctccctgcattcttattctccatttctggccacactcattgctctcctcttccttagaaactgccaaaaagctgccaccccagcaattggttctggggcccaccacaggcaagccgaatcctgtgcctggaggttggttcttgatgcctttcaaacagtcaaatgctaatttcccacaatgtcgttcatacattgtcatccatgaacattactaagctccttgtacctcactgtgtcttgttaaaatagctcttttcctttgtagaatggcatgggagggaggcctggccacgcaggcacgccctgttccttgtctctgacccctggcaccaacagtcatttcccccatgagagcttttcttgccaattctgctcaagtccggcaatcggcaacctctgggcctggccctacctctccatcagatgtgccctggcatgtggggataggcttaggcttctgggactcctctaccctcctcctcccctagctcccatgctcagatcatagaagttcccattaagctgcagagataaggctaaagcagctttaacaatgacaagggcttaaaacaacattgcttatttgattatcattggacttaaatcttctagtaacaaagcacccactgctagcttacgcatagtgtaataattaccacattttgttggaaattcaagtgtggctatgaaagaaatgccactgtattatattatataactacgctttttatggatagaagacatattgccctttgtaagataataataatgatcatagactgtgaggtgtggacactggattgcgtgtggggttatataatcctagagagcattcagagttatcagtgtagcccacgttgcctgtgcttcatggcaggtccaattggacagatgatgaatggatttgctgatctctccctttaccttcttgaactaactccattacctttggcttatacacatctgacctttgaaaatgctgtttgatgacctgataacacaagaatttatagtgctaggcttaccagataataagttgtgattcaccaacattgtatttactcaatccaccacttggagcacagcagagtgattttctcccgagactccagtcagtaaatttgcattgctggctgacgattccaagttaacatcgttgatttgtaatttgaattatttttctcattgatattaagagacaggcactggccccaaagcgcgtgccctgacattgtgctcttgtgtaaccaacagttgtcactgcccacctgagacgtacggaccccagtgtgcatccaaatatgacgactgtgaagggggttctgtggcacgctgtgtccatggcatctgtgaggatttaatgcgagagcaagctggagaggtgggtcccttccccaaatgtgcctccttgcagagagccatggttagtagctcctcctcctcctatgcccactgcatacaagcactacctggagcttacagaggtgaagtcacttcctgtctgtaagtaggacataggcgaggaggggagatgaactatgcaggaagtaggacccagagattaagatgtcattatgtaaaataggatttttttttttttttttttttgagatggagcctcactctgtcacccaggctggagtgcagtggcacgatctcagctcactgcaaccttcacctcccaggttcaagcaattctcgtgactcagcctcctgagtagctgggattacaggagcatgccaacatgcctggctaattttggtatttttagtagagacggggttttgccatgttggccaggatgatctcgaactcctgacctcaggtgatccacccgcctcagccccgcaaagcgctgcgattacaggcatgagccaccgtgcccggccgaaatgggaccatttttattatcccgtcatgactctctctgagataagaccttctcttggccttgtaagttttattttaacagtgacaaaacacaggaatataaaaggaccagtcttgttggcaacatgtggtttcaaggagtctgacttttcccggcctgggtctctggaactgctgcagactctaagagcccactccccagaacgaccctccatgccctgcgtcctgatgactttgactcctgaccctcaaggttgtccagtcttggctggcttggctcttcatgagaacttcaattctttatttttagttgtattttttctacccatgtgatggaaaataattcccgtccaatgatggggatggaagggttgaggaggtgggtaggaggaagaactttccaaagaaaaacaaacggaattgattttccaaggtctgtgcctacatgggtgtttttccctctaaaaacatagcaggctgagttgattgactttaattatattgacttacagttcttgattgttgttactctttccctggcatctttgggagaaattatagcttgcttttactctgaaataaagatgtttccctttttgcatggtctggtctaaatgcttaatcatatgggaagaaaaagagaagccagtggattggccttatggaaatgaacgttagaggataaacagttaggggcttgatgaaatgttcaaaggcttttcttgctgattttcatgattgtctttattcacgctgttgtcatcctgccagcccaagtacagctgcgtctgtgatgctgggtggatgttttcacccaacagccctgcctgcacgctggacagagacgagtgcagcttccagcccgggccttgctccacacttgtgcagtgtttcaacactcaaggctctttctactgtggggcctgtccaacaggtacattctcagggccacaagccaggctctgcatgccaggttggcgaggtgccagaaccaattttctttcactattgatgagtaagaagacaattcttaggaggtgttcaaatccagttttgtgtcctggttctgctcgacgatctcactgctatcacaattccacgtcaaaagggggaggcttgtccaaaactgtgctagagtcagactttggggcaaggttagccatagaatttgtaagttagacactgcattgcagtgaccaccaactgaccagatttgagatcaaaagagatactctagtcccacctttcatactaaccagatgtttgtacacatggggaaattatttgacctctttgcatctccaccacagtctagtagctcttgcctgggtgtgtcattagagtatcttgcggccttgacctaaacagaggtatccagctccattatgccctgcagcaactgaatctccagggatgccatatgttgagtcatggaaaacatgggctccgttagtcaaagactgcctgtgtttgaatccgagggcatcttttgttttatgagatagtcatcatatattccacacatttttttttttgtaggatgcctactatgagcaaagcactgtgctgggtgcattggtaggcaattagccagacctcaggttcatctgcgctccagggatgttcttagaaatggagccacaaagataatgtaataatagtagctggttttgttttgttttgttgttgttgttttgagacagagtctctccctgtcacccaggctggagtacagtggcatgatctcagctcactgcaacctccacctcctgggttcaagcgattctcctgcctcaccctcccgagtagctgggattacaggcacacctcaccacacccggctaatttttgtatttttagtagagatggggtttgccatgttggccaggctggtctcaaactcctggcctcaagtgatctgcctgccctggcctccaaaactgctgggattacaggcgtgagccaccacacacggcctggtttttatttttaatcaaagtgttattaaggcattgtataagcaatttttaattcttttaactacaacaaaatcaagacatggtaaaaataagtattactcacattttacaatatgagaacttgagcttaaagaggttgaataacttgcccaagatcgcatagctttacagatagccagaattgaaacccaagtttcttggcaagtttcttctcgccaagaaaccccacacacctattgccccatgtagtgatttttggtttagtggttttctgcgtgtatatatttagatcttgtaaaactggaaagaaatggaaaaaaaaaacctataaagactttttccctcttagttctcaggggcaagcacaatttgcaagcaatcacattttgaaggtaatttatcatggacaatctttaaaaactataaatcagaaaaataaattatttaaattagaagattggcaatgtttttacattcttctttttattgttggagaggaaaaagagaaacaatttttttgttttcttgtttatcaccctatttttcctgaaatatatggtagttatattttataagcagcaaagcaatatatgctgcttataaaatatcactacaaaaatatggaaaaaatagaaaaaaatacctttgatcttatcacacagaggaccatgatgaacatttgggcgtttttttcttccaactttttttcatgtacacattttgccatgcacaaatatgataattttcttaggcagagtcttagaagaggattctacttaaatcaaagaatatgaatatttttaaatctttaaaggtttttaagaattcttataattttaataatttgaattataaatctacaaccattgaatacaatgggaaccactaaagtaaaattcttaaatctcatcttcctaatgacaccattagtcatttgttctccttcctcttctactttattcttcatttgtacaagcacatatgcaagagtttaaaaaattctttccccaaattaggagtatgagcccaatcctccatatgattttaacagtttgtttttgtttttgagacaaagtctcgcccaggctggagtgcagtggtgcaatcttggctcactgcaacctccacctcccgggtttgagggattcttctgcctcagcctcccaagtagctgggactacaggcgtgaaccaccacatccagctgatttttgtatttttagtacagatggtgtttcaccattttggccaggctggtcttgaactcctggcctcaggtgatctgcccacctcggcctcccaaagtgctgggattacaggcatgagccaccttgcccagccacatttagtattttaattaatgtatatacaaaaattctttcaatgtgtgtgtatgcaaatgtaggtatacaggtgtacacatgatattaaaaagcgtttttagtatttggtcacaaagatgagtcataaggtgttcagctatgcttctattgataattgagggttttttccctattaaacagtgctgcggtagacatcctcttacctacttataccagtatactaagatgtatactaccatcttagtatactggtagttttatcacaataggctgagttttaataggtgcaactggcagtcaaagtctatgtattttaaaaattttagtgaatactgccagagctctttccaaataggttatatcaatttaatgtctagctatcagcatataagaggagcccatttgcccactttgttgtcagaatttgattttaagaattcaaaacaacttttgccaatctgataagcatatctcatttttattttatagttccttaggtggagaaggtttttatatgttttgactcttgtatttcttccttgttgacttgtctatagagctaaacttttaaatcctcttgttttcctaggctggcaaggcaatggatatatttgcgaagatatcaatgaatgtgagataaataacggcggctgttctgtggctccacccgttgagtgtgtgaatacacctgggtcttcccactgccaggcctgtccaccaggtgctgcctcggttcaatgtcaacctcctgaccccagcacagggaacacagacataggaatacggaatctagtgctccatttaaaatatgatttctggctgagtgcagttgctcatgcctgtaatcccagcactttgggaggctgaggtgggcagatcacatgaggtcgggagttcgggcctggccaacatggtgaaaccctgtctctactaaaaagacaaaaattagctgggcatggtggtgcatgcttgtaatcctagctactcgggaggctgaggcacgagaatcgcttgaacctgggaagcggagattgcagtgagctgagatcgcaccattgcactccagcctaggcaacagagtgagactctgtcttaaaaaaataaaaaataaaatattatttctgtcttaggagaggaaatagtacagaaagttttgcttatcttgtgaattcaggacacattagtacaactctatgataagaaagaaaaaacattttgaatatcagtagaaaacaacaaactttacaaactgtcaaatagctacagagataatgcagaatttgaaaagttttctgagtggatcacagacttactgttccattgccctcacgaataatttgttaatatcatgcactcctgagttgttttgcatataccaagtttactaaaccacaggcatcacagtaggcatatatcgtaattgttggtttccctccttttctggaaagaagtcttttctgctattctctaatctaaatcgaattactacccaagaagttcagggagtactaagggataaactgaaaccttgtatgtttaaataacatggaactacagtactttgggcttctataataattgacctctaagaacatcagagtcactgtaatataaaaatattaactttcttagtgtcagcactttctaagtctaccagtagttttatacatatttttttcattagaaacaacccagaacattgcttatgaaatcaggttactaattcttgttatttttcttatttatgaaatttcatttgttgatgacattttatacttatattttttgtttcgatgatagaggatccctgattggtccatttcatgatatttgaatcctagacaggctttgtcctcccatcttcttgacattgtttcttatgacctggctcttgttctcatcagggtaccagggtgacggaagagtgtgcacactcacagacatctgctcagtcagtaatggaggctgccacccagatgcctcatgctcctcaactctaggtaatgactcatctctctctttggctttgggtattgtaatatgaccttctaaaccaattcaacatcttaaacacaaaatcctctgttctcaaaattgttattttgaccttcaaacctaaaattaatccatgccataaaactacacatttggctttcttaaatatgtaataaactatgctctttaatggtctgctctgatttaggaaataaggtaattaagccagttaattaattaacgactgtattccaacaagcaggcaggagaaaaggaggaagaaggcaatgccaccttcttttgaaggactcttccatttctaggccattgcttagaactgagctttgctgcaaagggagtttgggaagtacactctatatttcaggcatcctgagtccagctgaaataaggagttcagaaagaaggaagtagaaaatagatctagggtgacaaccaacagtgtttgcaatgctgcatagaagggtttaaccctgtaatttaacaaaatatatactgctaaactttctccaagaaagattgtatcaatttatgtattcaccgacagtgtataaaaatacatatttactccatctttgacaataatagatattattattatttttcatcttggtcagttttataggcaaaattagtttttccattattttcatttatactttttgattactaataattaatactttccacattttcactgggcatctttctacttgttcatcccctttgctctctttctttcttactgattggtaaagtttctttatgtactaaggacattatctcattatctgtcttatgttttataagtgtttttcctggcatgttgtttttgttttaatcttgtagtggtagtgctattcagaagtttagaatttttacgtagtcaaaaagataaatcttttctcttactatttctcccttcacagtcatgtttaggaaggctttctttactgaactctttaaaaattgtcaagtacatgttcttttatacttctatggtttctttttttatggtaagatattttatatttttagaatgtattttttatccgtagcatcaaatagagatctggcttggtatttttgctcaaataagtggacccagttccatttcttgaataatcatgtctcttgctatttcaagataccacctttattttttattaatttgtcatatacttgcatatatagaaaagaacatatatgtgtatgtaaacacacacacacacacacacacacacatatacttgtgactaaatgcttattaaatgattatcaacataccaaagtggttaggagcatgatttctagataaagactgcttgcatttttccctgggctccaccagattttagctgcttgtcctcagtgaagacacttaatctctgtgctttagttcttcatctgtaaaatgaggataataatagcacctacctcagggtgcttcagatgattaaatgagtccttatatgtaaagtgcttgtaacaaatattattacaaaaataactgttttttaatatggaggacagtcataatgttgatgacatgaagtattaataacactttgtgtacttttaggctgcccttctttactgcaacctgtaagtttaccctgggaaacttaaaaaatttctactcagagcttcaacagtttcagagcttgcttactccatttttccctataaatatttttaaaagaagtaattaactataaaaaaatgcatttctaggcaattatttatttaaaagaaatatttgtgttttttaatattgaagtggaatcttgcaagtaatataagctgagaacataacaaaacttgtatttttgccaggcgcggtggctcacgcctgtcatcccagcactttgggaggtcgaggcaggtggatcacgaggtcaggagatagagaccatcctggccaacatggtgaaaccccgtctctactgaaaatacaaaaaattagccaggcgtggtggcgggcacctgtagtcccagctactcgggaggctgaggcaggagaatggcgtgaacccgggaggcggagcttacagtgagctgagatcgcaccactgcactccagcctgggcgacagagcgagactccgtctcaaaaaaaaaaaaaaaaaaaaagaacaacttatattgtcattcaattctactgtaaatctgtcacattgtgtaatttgttctattttttaaattattcagcagggtttttctatccatctttaacagttcttgctgatggaggaatgtagttaactgccacattgatttccttgtattatttcaaccattgtgcagtagtagaaagaacatatatttctgcaatgagatgtggctttttgctattaagtgagaaatctggaaaactctctggatattaaatttagtaaaattttgtaatgtctatgacgagtatttttaacctaacattgcgtaagaaaactgtcaagatgctggatgctctaaaactattgttagctattacctcatgtacatcataattaatcgtggatgttaattcatgttttaaatagacacgatcatttcaaattccttttgaccaagttccttcctaacctaattcgattgccattgttttaaccttgtaccttggcaatgaggagctcatcagaagtgtgggagaagttttggtgctggtattttgttgatgtccccatatatttatgttactatattatcttcaatctgtggttttattgcaaacgtcttttagagacttaagttcattctgtgatagctatttagcctgtttaaaactggcagcatgcaatctgcacatccacataactggggacatgtggcctgcctgtgtaagccacactcctgtacaggtgtgctgtaggcagcctacacacgaggggagtgcttgctctctgggctcccctcattctagctgtgtgtgtgtgtccttggccgggacaggctgtctgtgtactggcttcatctgtaaagtggggattataagagagtacctatatagggctttttttttttttttttgagatggcgttttgctctgtctcccaggctggagtgcagtggcaggatcttggctcactgcaacctccacctcctgggttgaagtgattctcctgcctcggcctcctgattagcctggactacaggccaccatgccccgctaattgttttgtatttttagtagagacagggcttaaccatcttggccaggctggtctcaaactcctgacctcaggtgatccgcctgcctcggcctcccaaagttcagggattacagattccatagggctctttattagtattattattattataattaaaaaattttttcttggaaatggagtctcactctgtcacccaggctggagtgcagtggcactatctcagctcactacaacctctgcctcctgggttcaagtgattctcctgcctcaccctcccaagtagctgggattacaggcgtgtgccaccatgcctggctaatttttgtatttttagtagagacagggtttctccacattggccaggctggtctcgaactcctgaactcaagtgatctgccctcctcagcctcccaaactgctgggattacaggcgtgagccactgtgcctggccctctattgggctcttgggaggattaaatcagtcagagtaagtccagtgcttgcaacagatagtttcatcctaagaatctccttttctgcattaactcctccatgatgaggaatgtctgtcttccccaggtgcagctcacctttgtgcacagctcaggaccatctgacatatgggctgacagcacccatgtcaacccagtacgtcaataatgtgtggaaggcatttaatggctttcttattttaagataagaaatacaaaaataaagattctaatattttctcctcataccttgttttgtctgcccgtcaaaatacacagactggatgttggtggatccttgtctagacagcagattctgagtttagatactgcatccgaacagaggaggagacctgtatttacacgtttgtttttatttctgaacaggttccttacctctctgcacgtgtctcccgggttatactggaaatggttatgggccaaatggatgtgtgcagctcagtaatatttgcctaagtcacccctgtctaaatggacaatgcatcgtgagtcctttgtttttcctgtggacagagagtacctgagaattagtttcacgcctataaaatgtaacgttataggattcaggaatgtcaagataatgagtcaagtttcagataaggaactgtcgagaactctcagatgaaagatagataatgattttagttcttaggaaaaaacattgagttaattttttgtctcagtggtttatgaagtactaaaactacgcctgcagtttgatctaaataaatctgacatacaaaacaattaccatttaaacctattaataacaagtagactactagaaaatacttacatataaacacatatatatttgtagcacctgttaaatatatcagtaggccaggcgtggtggctcatgcctgtaatcccaacactttgggagggtgaggcgggtgcatcacgagccaggagatcaagaccagcctgaccgacatggtgaaacactgtctctactgcaaaaagttagccaggtgtggtggcgcgtgcctgtaatcccagctactcaggaggctgagaccggagaatcacttgaacccgggaggcagaggttgcagtgagctgagattgcaccactgcactccagcctggccgacagagcgagactccatctcaaaaaaaaaaaaaattatatatatataattatacatatataattattacataaataataattatttttaaatatataattatatattattttatatataataattatataattattatatattatatatctccatggcactacattcctattatttgggttgattaaagtttagtgtctatccatttgttttatggtattatgtgttttttttccccttaggacactgtctctggttatttttgtaagtgtgactcaggttggacaggtgtcaactgtacagaaaacatcaatgagtgtttgagcaacccctgtttgaatggaggaacttgtgttgatggcgttgattctttcagttgtgaatgcacacgtctctggactggagctctctgtcaggttcctcagcaaggtacagtcagcatttcttatgccacggatgctcacagcatagcagcagcatcctttagtgagtccctcaacagattcctctgctgaacccactttcttgtccagttgctcagatactgagaactaagtctttccttgcagaaatggtataaaattcacaagctaaatatttataaatctcactgtaagccaagaacttttcttccaaagaataaatacattagtatttgccattttcactatgtcctttttgaatataaaacatgctaaggtattgtcttttatggttttctaaagggaagttttctgaggagcagccacttaatttccctagagtactgcattgaatcaagtcactctccctttccaggatacacagtggcttcccgttgcctgttaaatagagactgggattaattttcaatgatcttctataaccaagtctcactcaatccatctaaccttttttttcactagttccctagaaataacttcactcaagcaagttttctttcgtcaccggaccccatgtaccaccatgagtattttccactgtgttcatttatttggaatgtttctcccgataaacctcctcacacatcttccttgtttctcatccagatgtgtctgtccctcaggagcacttccctctcaacttcttccataaagtcacttttgactcttctgcccctcacttaaactcctgatttggaatcaacacatttattgagaggttgttgttatatgtttaggacaatagtagaccctatggaaaaatatgaaagtgtaaaatactgtctccacttatgaactgctcaccttgcagctgaggagacaagaccaaccccaatgggagaacagatacaagagttaaagacatgagctatgttgtgtggggtgaaattgggtgtcacagggacacagagaatgggaatcagtgaaaacataagacatggcagttcatggagcaggtgatgaggcatcagctgagctttgaacaagaggtgggatttctatggaagttgacagaaaaagggcacagaggagagggaatggcagggcttttatctccaaccttcattactcaaattttctctaagtttatcagcagcagggttacagttgcccaacctcttccttttaggaacctctgaaaagcacagttcatcttttcctttgcagtttgtggagagtccctctcaggaataaatggaagcttcagctacaggagcccggatgttggttatgttcatgatgttaactgcttctgggttatcaaaactgaaatgggaaaggtaaatgtagtaactcttgcccaaatgcatattatatttgtatatataaatatggagtatgtgtatattttattacataaaatacatgcaatgataattcaactatcatatattgagtgcttactaagtacggagtgccattattttggctagacatatacctaccttttcataaccttacattaattgtttgaaataagtcacaggggctgggtgcagtagctcttgcctgtaatcccagcactttgagaggatgaggtgggtgcatcacctgaggtcaggagttccagaccagtctggtcaatatggcgaaaccctgtctctactaaaaataaaacaaataaaaaaaaattagccaggtgtagtggcacattcctgtaatcccagctactcgggaggctgaggcaggagaattgcttgaatccaggaggcggagtttgtagtgagcagagacagtgccactgtactccagcctggccaacagagtaagactccatctcacaaaaaaaaaaaaaaaaaaaaaaaaaaagagtaacaaggccaggcctggtggctcacgcctgtgatcctagtactttatgaggctgaggcgggcacattgcctgaggtcaggaattcaagaccagcctggccaacatggtgaaaatccagctctactaaaatgacaaaaattagccaggtatggtgatgggtgcctttaatctcaggtactcgggaggctgaggcaggagaatcacttgagctcaggaggcagaggttccagtgagctgagattgcaccactgcactccagcctgggtgacagagcaagactctgtctcaaaaataaataaataaataaataaataaataaataaataaataaataaataggaggatcctccttttatagatgaaataatgaaaagtaggtgaagctaaacattttttgttaacacttcttagcttgtaattgtaatagttgaatttcaaagtcaagtttgtctggttccaaagtccatgctttctccagcatgaatgattctctacactggttgactgactgcaagccactagttaatctgtaaaatcatgttgttactgagacagtattttagaagatggttgcttagttttatgttgattattgtgcaaaaatggccactgatattaagatagttttcttatcaaatgtctttgctctgccatgttctatactaagtgctccatatacattacagcattccatttttaactctcataaccctgaaagatagaaattattatcttcattttacacatgaggaaacagagcctagtgccattgagaagtgtgtccaggtgcatgtggttcgaaagtggcatgcagtgactcagacacaggccagtcacctccacagcctgtcactctgagccgctccgtgaacgctcttcaaattaagatccaagtccaaggtttttagtgctcttatacccgacattaattacccaggcatttctaaatattgtttctcaaccacctcctggattcataaaaataaaatggtatgtctgaatagataaaattttcccttgaaatcctattaactttttccagcaaactattacagagggcattgtacaagggtcaaaaaacatttttttttcctttgaggagggaggactatttgcgacctggtaacctcacactaaaataaactccaaaataaatttcccagtgggtatgctatgtgaatttccttccttccatttagttttcatgaattctatttcctggcattgaaaacattcttttgaaaaaaaaatattcttaggtgagaaacttgtaatactttcattaccaattcgcaagaaaattcatcttgtttttttcttgattattgtgatttcatatcttctcactcataatggacataatatggtagaaaatatatacaaatcaggatagttcaattagtgaacatttgagtttcatttaaactgttttaagaaagtcatgtagtaataggtaactgatcttaaaataccctagcacagaatttaaaaaattccttatattctttttcattaactgaatattgttgtgattttaggttctgatgaaaattaaattcgacagccttcttttgattgtttatctcaaatgaggttgtcagtacgttttataagttatattactatatttgaagtctgtattctaatccattcggacacatttttgtgtttattctcttctacttgtatgctcagtatttttcctgttattcttgtatgctcagtattcttcctctcattctctactcttggtattactcatcctttaattatatccagtccctgaagccgtccaggccttgcttgtctacatcccgcctactccgcccacacctgagcgtgtcggtctgggctggcgtcagaatcttagcccctctggaatcaacatccctggcgggcagtgatgaacgtctgtgtgtttgataacaggccacaggttattcagggaattagggtgtacattcttgtgaatggtaatattagccagttcaacttaattcaggtagattttcaaatctccaatttattttactgctttagaaacaatgtcagttatatatttgacataccttggtctggtggacttgacaagtttaatgaaattggggtaaatctatgttattaacattaagattttttgatatattttgatattagttgaagtttgtttttaacaatatttagcacaagttatttagtatatagattgccatatgtactggtggataattagggaatgataggtctagctcttgaaagtgcctcagtatgaatgctgcctaggaagtgggagaaatactttaaaatttacatggaagtaaaagataatatatgtggcctttgtatttttaggtcctgcgtatcactttcacttttttccggttagaatccatggacaactgtccacacgagtttcttcaggtttatgatggagattcctcttctgcttttcaacttggaagattttgtggctccagcctccctcatgaactcctcagcagtgacaatgctctctattttcatctctattctgaacatttaagaaatgggagaggctttacagtaagatgggaaacacagcaaccaggtatgtgtgaacctggagaaaaaagcaagcaaaattttgaggttattaagtgttcttaatcagtgttagacttttggatacatgagatgttttgggatctgaagatatataatatttttataatttattttattttattcatttatttattttgagacaaggtcttactctgttgcccaggctggagtgcagtggcctgatcacggctcactgaaacgtcgacctcctttgctcaagtgatcctcacacctcagccttctgagtagctgggactacaggtgtgcaccaccactccaggctaatgttttgtgtgttttttatagagatggagtttctctatgttgcccaggctggtctcaaactcctgggctcaagcaatccatctaatttggcctcccaaagtgctgggattacaggcatgagccactgtgaccaaccataattactttaaaatcaaatcaacctagaattaattagaatttattttgtgtctaaaggcaacaaaataagcatgaaatagaagggattaaaaaacatgagtcttagttggtcccttatcaaattactgaacagcctttttataagctctactagtagtttactgcaggaatattgaggacattgtccaccccttcatgtagtattccttcatcttaatgatcactcaataattttttctttttgttattattttgttttaattattctattttcttttaagtttttactatgcaagttttaaacaaataaaaagtaaagagatcagtataccatgcccccaattcattcatcaatacatctgtggatcaatttcagcattttctcatcttttttactggtgtttttatctatcctgatgctacctaggcttaacttctgatgcttgaaatctgagagtgtaatttcaactttgttcttttcaaagatgttggatattctgcatttccatataagtttttgaatcaacttgtcagttttcccaaagaattttatgggaattacattgaaactataattaactttggaagaaatgacatcttaaaaatattcagcctgccaatgcatgaacataaactatttttaaatttagttctcttttcatttatcctggcaatgttttatagctttcagtgtctaagtattccatatctttgttagatttatttacagatatttgatatattatgcttagtgaaatattaattttctaaaatttaatttttcacttgttatgtaaaaatatgtattttttaaatatttgattttgattccatatacattgttaaattcactcatcatgtctaattattttttgtagattcttttggattttttaaacgtacataattacatcatgtgtgaatgaaggatatttttcctcttcctttccagtctttgtaactattatttcttttccttgacttattgccctggctaggaccttcaataccaagccgaataaaagtggtgaaaaggaaatccttgtcttttccccagcagcatggggaaatgctcaatatttcattgttgaatatgatgttagctgtaagttttcacagataatttttatcagatgaagagtgttctttcctatgtcaactactattgctgtataactaatttcccacaaatttagtgttgtagaacattaatcatttgactttgtttctgattttgtgggccaggaatttggaaagaacctaacatgacagttgctacttgaaatctattcagcagttataagcgggtgtcagctgggactgtagctgtctaaaggctggactgggctgaatatccaagatggcctactccagtggctaccaattgatgctggctttcaatgagagttcaactaggctatggacctgagtgcctacatgtggctactctaaaaagtttgtcttagaatagtgaaactttcttcgtggcaattggcttctctcagagcaagcattacaacagaaccagacaggtgctgcgtgggaatttttcagcctatgtttggaagtcattgtgttatttctgccatactcaatgggttaacttagtcacaagctgacccaaattcaaggcgaggggacataggcccacttctaaatgggagaggtgtcagaatttataaagaattaaaaaaaaacccacaccttttgttcctagttaccaagaattttaaaaaatcatgaatgaatgttgaaacatataaaatactttttctgactctattcaggtgatcatatgttttttgtcctctattctgtaaatatagtgagttaaattgattgattttgaatggtgaatcaactttgcattcatcaaatattttccatttgttcatggcaagttatgctttttatacattgctagattttatttgctaatatgtatttttaggatttttatatctatatttgggtgatattcttttgtaattttgtcaagttacaggtaatgtcaatgttttaaaattaatagaaaagtgtcctctctttttatattctctggaaggatttgtgtaagattgacaatatttcttaaatgtttgaaataatttaccataaagttaattgagcctgcaggcttccttgtgagaaggctttaaattatgattcaatgtatttaatatagatctattcagagtttacatttcttcttttttcagttttggcaatttttttctcaagaaactcatctgtactttcagaatattttcttactatgttttagtgttcgtaggctctgtagtgatgtcgtctcttttcattcctgatattgataatttatgttatcttttttaccttgataagtcttaccaaggatttgttagttttactaatgttttcaaaattccaactattggctccgttaatgttttctgttgatttttatttcattgattttcctcatggttttatcattttcttcccttgtgttattttgcacctaatgtatggttactttaacaattttttcctagcttcttgacttggaagcattgacaaatgagtttgaacttcttagaatttctaatatatgcactaatactaatgcattttccttggagaacttttatttgcatcccacaggttttaatatgtatgttttcattagcattcggctgaaagtattttgtcatttttattttgaattctctgtgaccataggttttattaaaattatactgtttatttaccaatgtgatcactaatcatgcagtatattatttcaatctttaaaatttgttaagatttactttatagaccaaagtctattttggtgcatttattgtatggacaggaaagaatgtatattctgtaatggttagatgtagtcctctacctatattaacttagtcaagttggtaaatagtgtttttcaaatattaaatttctttactgatttaaaaaaatatttgctttattacttagtcagaaagttatagtaaaatctcaaactatgattctagatttgccagctttttgttctgaaacttttgctttatttattttcttacattatttttatcttcttttcccaatatttcaagcatttatgttttcccagctttattggagcttaactgacaaatgaaagttatatatatttaagatgtacaatgtaatgttttgatattttgatatatgtataacttgtgaaatgattaccacaatgtaactaatatatctatcatacatagttaccattttagtcaatatggtgaaaatatttaagatctactgtcagcagttttcaagtgtataatacaatattgttaatgatagtcaccatgctgtacattagatctctagaagctattcattccagagaacataaacgttttagcctttgaccaacatttccctattgcccccacctctcagctcctggccaccaccattctactttctgcttctatgagtttaactttttttagatttcacatataagcgagagcatgcagtgtttgtcctcctatgtctggcttatttcactcagcatgtctccctgtttcatccatgttgtcacaaatgacaggatttccttttctttttaaggataaataatatcccatttatgtctgtgtgtgtgtttttgtgtatttatatattgcactttttctttatccatttacctgttgatgagcacttagattgattccatatcttggctatggtgaatgtatgaatgtattgtgaataatgctgcaatgaacatgaaagtgcagatagctcttccagatatttatttaattttctgtggatatataaccagaagtgagattgctgaatcatgtggtagctctgtgtttaattttttgaggaacctccatattgttttaaatatggctgtaccagtatactttcaacaagggttcccttttctccacatctcatcaatacttgttgtcttttatcttctcgataatggccattctaacaagtatgaggtggcatcttattgtggttttgatttgcatttccatgatgattagtgatgttgagcattttctcatatatttgttgaccatttatatgttttctattcagaaatgtctatttggatcctttgcccatttttaagattgggttagtttgttttgttgatattgagttgagttttttatatatttcagttgtgcttttgtggtcatatccaaaaaaatcactactcagactaatgtcatagggcttttcctgtatgttttcctggattggttcttcagttttaggccttatgtttaagtctttaattttgagttgactttgtatgtggtgtgggataagggttcagtttcatttttctgcaaatggatatccagttttcttagcaccatttattatagactatcctttacatgttgtatgttcttgccatgtttgtcaaaaatcaattcagcataatatatggacttatttctgggctctctattctgttccataggtctagatatctgtttttaatgccaataccatactgttttgattactacagttttgtaatatattttaaaatcaagtagtgtatttttattttaaatgtatttttaaatcaggatgcctccaggtttcttctttttgctcaagattgctttagctatttggggtcttttgtggtttcatatgaattataggattctttttctattttgtgaaaaataccattggaattctgttagagatggcattgaactgtagactgctttgcatagtatggacattttaacagtattctttcaatttgtgaacaccaaatattttctttttttcattaatgtggtatagttttcaaaatacagatatttcactttcttggttaaatacattcctaagtatttaactttttgacactattgtaaatgggattttcttcttaatttcctttttgtacagttagttgttaatgtatagaaatgcaactaattttatatgttgattttatatcctgtaactttactgaattagtttgttcatttattagttctaaaagtattttagtggagtctttagggtattctatgtatgaaagatcatgccatttgcaaacagaccattttacattctaatgggatcatttttcttcagcctgaagaacatattttaatatttctcacagagcatgtctgttgaagacagattccctcagcttttgtttaagaatgcattttttaccttaatttttgaaggatattattacacatagaattttaggttgaccatttcctattagctctctaagaataccacatcagtgtcttgtcacttccataatttttttggggagaggaacctcagcagtaattcttgttgttctcctgaagataatgtgtctttttctccaccctcactgcttttattgtgtgtttatatttaattttccacaacttgattatggcgtatctagatctggttttctctgtgtttgtcctgcttgagagtcactgagagttttgaatctataggttgctttcttttatacaattttgagaaatttcagccaatattttttcaaatattgcattgccacttttttcctctttcttctccttctgagactcaaattacacatatgctgaaggttttgactgtttctaatagttcttatggttttatattcttgccttctttttttgctttgattccatttggttattttgttttggaaagtctgtaagtactgttgaaatgttcttcaactattttgtcaaccttttcctctaagttttatcataattattttggagtcattgtttggtagcctcagtatctggaatgtttctggctttgctgagattgcctgttttatttattattgggttttggttttttttttactacttcctcacaggcctagtcagtttttattgtgagcaggacattatacgtgatatgttgcaggggttctggattatattatcttcctctcagaagggttgggtttttttctagtaggcacttatgttcctggcagatcactttcattcaatcaaggcttgaatttacaggggacctatttcaaattttccatgaatcctggtggattgccatatttcctagaatatgaatcttactcctgtagcatacttttctcacgtttcaattcagttctcagggttttcataaaagtatctcctttctgactgaatgaggcaacacatcccttcagtatttattatgcagtctctcttcaattcttagcaacttccctcccctccgaaactgttctctgttagttagacctgctgtcttctctgtgcatttgcagcttgggaatgagctaaggacccaaggaaatgcctgtacatttttgaggtgccatttccatgcagctgctttccttatagtatgcagctccaaaaccgccagatgctttggtagccctaaatcgtgagttgtttgtttgccatagcaagggtattgctgtctccttgggcttcacttctttgaattcttgagtgtgtatgggacatactttatatgcttctcttttcagagattacagtcctttgctgtttgttctcaatgcctgaaaatgataaaaactaaaacaaacaaacaataattccttactattatcaatcattaatcattgttcattttttcttaagtgagagcaagtttattaagacagtaaagaaataaaagaatggctactccataagcagagcagtggcatggactgcttgactgagtatacttacagttattttgtgattatttgctaaacaaggagtgaattattcatcagttttctgggtaagaggtgggcaattcctggaactgagggttcctcttctttttagaccatgtggggtaacttcctgatgttaccatggcatttgtaaactgtcatggcactggtaggagtgtcttttagcatgctaatgcactataattagcatatagtgagcagtgaggacgaccagaggtcactttcctcaccatcttggttttggtggtgtttgactgccttctctactgcatcctgttttatcaacaaggtctttgcgacctgtatcttgtgccgacctcctatctcatcccgtgactatgaattccttaaactcctggaaatgcagtctagtaggtctcagccctattttatccagcccctattcaagatggagttgctctggtttgaatgcctatggtttattaccccactcccttttacaaggggacctttaatcctaagggttgtagagggatgtcagtccattttctgtaactccttcaggatgaataggggtgatgatattcctgcctaactattagggtctcttgtattcagggtagagaggagcttagtcagaaagcgtcagtatggtgagacccgttcataactctgataaaaggtgatatccacagtctgccagttggtgctacagtctgtttcctatgggtcaggggttttctccgtatcgtccctgtggggtttgccaggaagatgttaccagaaaggattcctgatctagaccccaagagagggttcttggacctttcacaagaaagaatatggggtgagtccatacagtaaagtgaaagcaagtttattaagaaagtgaaagaatgaagaatggctactccataggcagagtggcccattgttcaaatttatttgtgaaagaaatggattgtttgttctgtagatcatcccacatcttggattttgctgtttatattctacatgccatttgtcatgttgtttgtaaactggtgcttataccaaaaagtttggttaaatccagggggttttatgtggtaaaaaataatcttttcaggagatacatgaaatctgcttttctattatgaagttaacattggtcagagtgttctgatctcctcaggttgaacttcccattaaaagcctcttttgcactttctctaatggttttagcattctttaggttcagtatttagatgagttattcattgagacctacaacatgataatagtttgattttattatttcttctttatttatttattatttgaagttctttaatggaatagaagttactcatatcagctatttggttgctctcatacagagatcatgtaggaaaggtaggataaatgcttgattttctctctttttcttttttttaaaaagtattcaaattaataacttggttccttagcattcttcaaaatggtcacttattccattttattttgttttgttttcgatatctgtacatttatatattatatcacatttgatgtgctttaatcaattctaggcatttaaaaatgaaacacttttccgtgttttgtttgttgtgtttgttaataatttgttttcaaaactctggaaaattttccagttagtttctgaacttgttttaaccaaactccagttacctttgaaagctcctttgctttctggtcagaaaagatgttctaggctcttcctgcacattatttacctcaggactgaaaaccctgatttccctaaagagctctgactttttctgtgggaaatggtatttagatctcacaatctgggtgctacggatggctattggtactgggtgtgtcatcgtctctagacctttcagtggacagaattagaaaaaacttttttgttgttttttaaagaaaaaataccctatatattcatagtgatcttacactatattggaatattgagattatagagttgctttttttttttttttttactttacatttctacctcttctctcatacagtaaaaatcctggttcccaatgacatgaacatattatttatgtacttagtcctactgtacatattttcaaaataacaatactaatattattactaatggtatgataactggaaaccatttaagatttctttgttcttttttgtgtatttaaaatatgttttgcttgagcggtatagtcaaattacagtgtttaaggtcccttggaatatttctactctctatggttgtcagctcaatgcaattatttcaccagtttcacttcagttgtgattttaaatatttctttcatttttctcaaattttgctttataattatgtaaaatatatttatagttccaaagccaaatcaatgggcatggtagattatgagaggtctagcttttttttttcctgtcccttccactctgttctttctcccccattagagaacagtttttattagtttttgatttatccttctatttaaaaattaagcaaatgatctcatataattgtattttcctctttcttagataaaagggagcataatatacacactggtctatagttggctttttttcacatcatatatcctggagattactccataatcagagcatagtatgccgctatgtgatgtctcattttctgttcaatcaatactctattgacggacatttggcttgtttccagtcctttggccattttctttttagtcttttgttttttatttttgagacagggtgcgatcgtgtctcacagcaacctcaacctcccaggctcaagtgatcctccttcctcagtctccccagtagctgggactacagacacgcaccaccatacccagctaatttttatttttttattttttgtagcgatggctgcccaggccgttcttaaactgggctcaaatgatattcctgcctcagcctcccaaagtgctgggactacaagcatgagacatcacacccagtcttgtttccaatcttttggaattccaaatgttactgcaacaaaataccttattcacttgtcgtattgtatttttgccaatgtacctttgcgatatctttccaatggtagtattgtttggtcaaaagaaaatgaaatgcataggtttttgctaggtattgctatattctcttatgtagtgatcgtaccatcttgcattctctagcaatgtgtgagaatgtctatgtccccacagcctctccaataatttgttttcaaaactctgcatttttaacattctgaggggtaagaaatggcatctcaattaaggttttatttgctccttctttgtgatgagtgaggttgaacatcctttcatatgtttaagagacatctgaacttttttcagtgcactctattcatgtctctattctttttagaagttctttatattttaggataataactctttgttgcatattgcattttttcttattttgtcattaatcttttcctttgcttatgctattttatgcatttaaaactggtaacttttaaagtattacattgggaaatgcctctttttctgaagaactgagatgttttctcagtaggaacaatgagactcatggaactaatttgtttcattttttactttggcaggaaaatttttatttgaacaacctgtatagctatgtaaatttcatatcttacacatctaaaatgttacctatctcacttatttctaatgtctgtattactacagtctggatttttattatttagtgtttctgtcatttgatttacagtagcatttctcatagaaatctaagccactacagattctttgttaaataaatgtgggtattaatgaagagcaggttcttccagtcactagtcagcaacgttagggggccgatgtggtataatgaggatggtagtggggtcagcatcagaaagcctggctcagtccctcacttgctccattcttggaacagtggctcgatcactacagacatttgaattttttcatttattaaatgaatgttttaactatatgatagtattaagaaaccttctcaaatgaaaattatgtcacacttaaccattttaatatgcaaagtgatctggtttgctgaaacacacagaggttggcagaagttctggaattctttacaatttcacatacagaaattaatatcatcaaagtgaaaaagatgactctacaatcctggtattcatcgctcagatggttcagccctgtttaaatagtgtcagcatgtgatggctcacaagcacagagcttgacacatgggtgattcatttgtttatcaattgatacttctagacttgtaactttataaaactggaaaatgtaaatcttttttaatttatgagggtgtctaaaactgctcatagttatttaaacaaagtttggcttcttacgccaagggctctgatcattctccataaattatagcatctatacaaatgtaacattatttttccctcttattttagagtgtggaggtatcctgactggtccttacggttctattaagtctccggggtatcctggaaactatcccccaggaagagattgtgtctggattgttgtaactagtcctgacctcctggtaacatttacttttgggaccttgagcctcgagcaccatgatgactgcaacaaagattaccttgaggtaaataattatatttagatagaacatatcacaatatgattaggactcagggcactatggtctagccatgcccatggatgaccccaaaatattagctgtagttaggtgtgtttctcaatagtcagtcaatatctaactcttgcaaagtctctatttttaactgtgcctgtttgttgcttcttcttctgggttccatttgaatctgggaaacagattaccttgccctgctatggtgttacctggaagctcacacccctgccatgagaatgcagaatttatgaaataaacactcagtaatagccatctccttcaatgcagattcaaaccttcagttgtctgtggtaaactggcaaggtctttcacagcttaactgtagcattccacgaagaggccgggtgtggtggctcaagcctgaaatccctgcactttgggaggccaaggtgggcagatcacttgaggttaggagttggagacagcctggccaacatggtgaaaacccatctctattaaaaatacaaaaactagctgggcgaggtggcgggtgcctgtaaccccagctactcgtcagtctgaggcaggagaatcgtttggacccgggaggcggaggttgcagtgagctgagatcgtgccactgcactccagcctgggtgacagagtgaggctctgtctaaaaaaaaaaaaaaaaaaaaaagaaaaagaaaaataatagtgattgtgttgaactgggttaggttcctggaataaagtaatcattattactgagaggagaggtatcagccgaagctccttctgcctacccattagtaaaagattaaaatatggaggaggagaaaaggctcttatattcaaatgccgtttgtacgtaggtgcatcaaaaagtgttgctcttcatttgtagactgacaagataatggagaagattgagttcccaggttgtcctgtattttttatcaccataaatctcagccccttgcagcagtgtgaaaaagacaatacgcatttccaagtccattagagaggaatagagtcaatgcaattattcataaaggatagaaggatgtggtgtcaaaaaggggctctgcaagtaaaagtcattagtaattcagcaataatggatttgaaacctttgggaatgactggaagatctgtctctctctggaaaatttctgcaaaatggtcatttaaatgttgacagaaaagtgagttatcttgaaattaattttcaataaattccatcaagttaaaattagaggctttaaaaaattcctacacattcatttctggagaccatatggtagaaagtgtcaaccactctgacaatattgaaatgtctctcatttctctttaaactacagtatttcaaagaaccagttaaatattagaataaagttatgctgccatctaactttgatcccagtaagaaaagtaatttgaatagacaaaattgaccatattaaaatattctttagttcattgactcctcggtggtttatatagtatagaatttgcaattacaacaaaattatagagagattgacatgattacatcatagattaaaaaccaacaattagaaaaggatttctaaggtcacgtcattatcattgtagtacttacttactatcaaagttgcatttttaaattcactaacctgtctttctgttgtgtctaatctgatggcacttcctctctacctctgacccttctgaaaacctggaccaagttatgaatcagttggcatcaatggtgttccttcttctgttttctttgcttatattcattttcttctagatcactaagaatttataatgaaaaaaatcaaaagggaaagatctttgattagtaacatcatgacaaaaattctaactatatgtccagccttggaattgaaatccagtcacaggccaggcgcggtggctcatgcctgtaatcccagcactttgggaggccgagatggtcagatcatgaggtcaagagattgagaccatcctggccaacatggtgaaaccctgtctctactaaaaatacaacaaatagctgggcgtggtggcaggtgcctgtagtcccagctacttgggaggctgaggcaggagaattgcttgaacctgggaggtggaggttgcagtcagctgagatcgcaccactgcactccagcctggtgacagagcaagactccatctcaaaaaaaaaaaaaaaaaaattcagacagagagaaggcattggggtgatgggagaaggagacacactttgctgaacctcagccatgagttacatttggatgtgatggggaaacttccttgagcgatcacttttaaatgatagattttatgaagttaatatccaaagtgacctagtttgttaaaaatctgaccactttgagcttaatgattcatccttttgttttagattcgagatggtcctttgtatcaggacccccttcttgggaagttctgcaccactttctctgtcccaccgctccagactactggcccctttgccagaattcacttccattcagactcccagattagtgaccaaggcttccatatcacctacttaacatcaccttgtaagtaacctaccagttgggggcttaagagggatttgaaggccaatgctatgcttacatctgttttatattttaatgtgattcagaggatgactgactgtcttagaccaagaacatttctttataaatatttctctcatagcttcatattttttctttatcttcccaatgctctattattaatactgcaataccctttgatccctaaattatgggatccacatcatgataaagatgtatgaggcacccaaacttaaataattcagggcaccaggtccctcgtggtgtttgatgtttagttgtgagagaggtttgtgcatgcgagcagtgcagtctctctggattttatcctcgggtcaagtccagctgcacaggggctggggctggcttccagcatcacagtgtcccagactctagagcttcacttccagccaaatactattagctgttaggacctcagttgctttgataccttaaaacaaacaaacaacaaaacacaggaaatactctatgatttggatttttttagggaagtggaggattttgtttatgacatctattattgtgcccttaataaatgttctcagaaaaagtaccttttaagtttcaatatcaggaagagtaacaaagaacatctttacttgtcccctttcttcatttccttttctttccacggaatctggtgccaacctcctgttcccctttcaattgttttccgtgcaaatcaactccccctggctacatcttgctattctgtattcattttttctttaatctgcttcatgtatacagttatgtagtttattttgttacatgtttttaataaccatctcaaatcttattgaaatgaagcagagcattaatgtatttaaaaagcaacttatagaagagaatggcagattggaagctagatcacacatctctgcatctatttctttaagccactacagagatgtcccacaacacatcaaactgaaaatcttaaaattagaggcacaagcctatagagggtgaataaaatggatatgtgcttgtgtgtgtgtgtgtgtgggtaaatttttagaaattggatccaatgcctgcaagccagagcaatgccattgccatgacctgttcgtctcttccctgttcttagcggatctgcgttgtggtgggaactacacggacccagagggtgaactcttcttgcctgagttgtctgggcctttcactcacaccaggcaatgcgtctatatgatgaagcagccccagggagaacaaatacaaatcaacttcacccacgtggagctgcaatgccagagtgacagttctcagaattacattgaggtaactttcactactcaatcgcccttagatgacattcatcaacatttttatattctgcagagtggtggtcttcaaaagattgttgggccaccagcagccagaatacctgagagcttgttagaaatacaataataactaagctctaatgactaaggtgcaggcaaataaggctgataggatgtactaataagatacagatttattatctagaataattaatacaggaaagaactcaacccagggaagtgaagggatttgcccagatgacccagctagtcaagtggtaataaagtttaagtgttgaatgacccttgttttggaggttagggtttttccttcctttattctgcttgctctcctccagaaatctttaattttgatttaagtgtgggtaatgattgtaatacagggaatatttgaaacagagacaggctgtttttgtttgctgggcctggtatttcttatgctaaattattggtcaagccacaaattaaagtgttgagcaagataaaacattgtttttttgggcataatcattttacataaactagagaagaatttacaattttgtttgtttgtgcaagttaaatccatttattcatccaggaaaaacctatgtgacctcctgtcctcttctttctacatttagacagaggaaacagaactttagcataagatctagctagacttagttgaagtgcattgaccatagcactacagcagtatgtatgtatgtatgtatgtatgtatgtatttatttattttgagacggagtttcgctcttgttgcccaggctagagtacaatgtcatgatctcagctcaccacaacctctgcctcctgagttcaagcaattcttctgcctcagcctcctgagtagctgggattacaggcatgtgccaccacgcccggctaattttgcatttttagtagagatgagatttctccatgatgggcaggctggtctcaaactcccaacctcaggtgatcctccggcctcagcctcccaaagtgctgggattacaggcatgagctactgcaaccggcctgcattttttttaatccagaaatttttatttaagatcatttcagaatgggtatatttattcaatttaggttttctaaagtctcttataaagtatattaaagttttacactacggaagaatttcaaatatttttatgtaaatcaaaattaaattattaacccttttttttttaacttttgagaacagcaaaaatagctttcaattagagagtgcttcctgtactccaggcactattataagactttaaaatagtataacaaattaaatagataatgatcattgtcagcttactgcctgccatgtgtggtaagtgcttttcgtgagttatttcattgaatcctctcaacaaccattattatttctgttttaatcttaggaaactgtagcccagagaagttacttgtccatggttacatgtctagcaagtaatggagctgggattcaaatttaggagatctagttatacttatcttcagtaagaacagaaatgcaattgtgtgacgttgactacaagaggtgtctcatcttccatagggaggaaggtcttgtgaattacccaattccatacctggctctccgatcacgagactaaaacatgaagccgagcatcatgattttctcagatacgcaagaatgtaactataattttcagggaaatttggggccctttctgttaaagccttcatggtgattctctggttctaaagaactatcagtacctctgaatggttcatcctctcaggctttgcagaacactagaactgaatttcagtgagcggttccatgaactcctctgaattcttctgaaaagtttgcacaaaaaatcataaaactggctttggaagttttaatttcataaaccagaatggtggaatgttttgtagccagaaggggattaaagttagttcacctaacttcttattttagttcatttgtcagatgaccgtataaccttggacaattctttatctggatctttcagttcctacttcagtaagatgtcctatctatttctctaaactttgggggtagaatcaaggaaataaatgataaaaagaagcttgaagtgttaaaaaaaataatgcaaatgcaaggtttttctggaacaaagttttaactctagccttgaatttatcagttcagagacagccgatgtggctgtcacagttggccagcgaggtatctacattctgatgtaaccacatatcctcaaagtcttgaccaaatttccctcaaggattgttgatggaaaaaaaaactgtattattcagaaggagaggtcatgtacggtgatttaaatattaatagatagatttttatattatatctttgaccaaccaacctaaaggaatacaaccaacctgtagaattttggcatcagcaaggaccttaattttacaaatgagaaaattgaggctcacaaaggtcaaactctagttattgtcaaagtaaaacttagatgtacctctatgagattctagatggacgtacattgactttggttaaagctcttgtctttaaatcatctctatccattgggaaaatttgtgaactgaacccgttttctaaaaagtatattcacttctcttgttgttcttcagatagtggtcatacaagaaagtgatacaggaaccaaattctaatgacattattatgactcaatatattgttccctaaaatgatgtcttcattttttaaagctatctctaaaaaatgaaatatttatgaaaaagaattaaaaaaagaatgttggtatttcaaatactttggtggtttagaggggggttgactttgtcctttactgactccattgatgagtaaaagcagtccacccaaaattttagaaagagtggagaagagaaaagaaattctacagagatgtgggagaatgatcctaaggacatttactttgcatgtgaataggtgtacttttaagaatcctagatcttctctttgtgtggttttaggtgccttggttgccaggcaaacatatccttcaaatgaagattaaggtaccattgctgagtgtgtatctttcacagatactgtggttttgaaagacttacttttgctcagtaagagagttccataagcactcattaaagaatagattttaactgcaaaagataagaatgatattgacccagtgtagcatatctttctttttttttaacacaaggaacacacattaacatgttaattcttagatttatatatctctcttaagtgaagtttctacttttaaagatatacattacccatggaagatgtgacatggctacaaatgaatgaatacaagaacagatcaattgttagttcatctgtttttgtcgaagagagcttttaaattgtatagaatagttcaatgaaggtgatggaagcatctttccagaataaaaagcagcacctctcattaatatttcataagtgatttaagccatcagaactctgagtgaaggacacataggtagtaatgaaagtttaattttaaatcccagagaagggaagttgtaggctgaataataaattcagaaggctatacgatgttaaggtgaaggcttgaggtaggatacgaagggaaatgagtagaattgttcacccatcaaatctccttgaccaatcccaaagtatctgcctcctctccccagagacactgaggaaccagaaagggggctctacaagagacgcagggagagcgatgtgccttctggagaaagagaagggctttcgagaagttgttgtttcttagatgtggaaagcaaatacaaacagaaaagttgaaaaatataatcaataagacaggaaggagtaatttacattgaattttatttctgaaatctagggaatatacctgttctacaagtggcgttgaaccctaattcatcatattttagacctctatggcaatcccagtaaattaacaaagcagaaattgtacatctcttcacaatataacataacccaagattatttataaacattttaaaatgcccaagtgtgtggaagtatgtgaactctccaaaataatcattggcttgagaaagaaataaaaaatgaaagactacatagaaaatgacaaacaggaaatgctgtgtatcaaaacctgtgagatgtgatgaaactcaactccctggtaaaatctttaagatttaaaagaagagaaccaaaataattgggaaagcaggagagcagaagctgaggcaggaaggtctgtcctccgtctgaaccttttctttcaccaccttcccctgcatccttccctctacttctccctccccgctacactcctgcttcagcctaagcagccctcccgcatctcctgcatgtctttagatgaatgcaaattcacaaaggacctccttttgtgacttcttaggcattgagatgattccactatgagcttgggattgggtgggggagagccaggacttgtggaatgcatgaggcacttgcttccctcaagtggacctgctgctcagagtctcatggctgcaattcacagactacacacctaaatgtcagaaaaagaataaggcctggagcaagcaaacacaccacataggctgaatagtattgtgtttttcagttaagtacatattgaaattaattgtaggtcagaaaaatatctttctagagagggtaggataaagggaaaagggggagatcctcaagagtttgtactcttggccaggcatggtggctcatgcctgtaactccagcactttgggaggctgaggtgggtggatcacctgaggtcaggagtttgagaccagcctggccaacgtggtgtgaaaccccatctctactaaaaatacaaaaaagtagccaagtgtgatggtgggcacctgtaatcccagctacttgggaggctgaggcaggagaatcacttgaatccaagaggtggaggttgcagtgagctgaaatcacgccactatactccagcttgggtgacagagtgagactccatctaaaaaaaaaaaaaaaaaaagagtttgcattcttgagcatattggatttagggttttgacagagactaggaacatttggttagactctgagctctgttgttgtgagcacagtttttccacaactgctggaccatcgtgatgctttttagtgaaggaagaagataggccattcctctagtgaaataattctgtaggttggagtagtgggaggcaggaaacagactgagagatgatagaacacctaatttggagttgtgagaacttgtagagaatacatttttgctgtgtttgaaggagttgcatgctcatgtagaagctgcaaacccattgaacatgcgtgatgtagagcagtaagcaggaataagaggatatggatggaccattatcaagaacattacaaattcctaggtcaaatagagggtatggctggtacttttctgatataaaatggaaacaatattgcatggaaacatgataaaacccttcagctctctgtgttactaaaggcaagatacctgtaagccacagcttcctcatgtgtaatagggatagtactagtagtactagtagaaagagaccattcattcatttatctattcattctctaaatatttatcaaaccacttaggtttcagtcaccatgctagggaatgggtatgtaatatagatattaaataagtaagcacacactacataatttcaagaggagataagtatgggcaggaaagaaacagtactgtaagagaaaagaacagagctactgacttcagtggagcagtctgagtttgcttctcaagggtctttgtatggctagctcattctcatctgtagaccctgtatgtaggatctgcagatgaggagtgagcaatgcaaagaactgagagaaggaggactccaggtagtggtgctaacccagccctagagactgaagtcagaaaaaataaactaaaataattggaaatagaccagggtggctggaatcacacagggatggaaaagagaaatatgagttaggcaggagctagaccctgaagggtcttgtagaccgagataaagagcctgggttatattctatatgcaaggacaaacaattagaatgttccttgtcacattgtgcctgtcacacaatgaatgctcactaaagttaacatcatgatgataatgacgatgatgatgatgatgatggggaggagaagagagggcaggagaaggtgacctactggagtttgcaatcatgagggaaggcacttctaggtaaaacttattcatgtgttcttgattttagaatatcagatcttaaaagatcagattatatttattaatagagatgttagaagggacactttcacaaggcatgaaaaggtttaaaataccaactctaaaaatcatgaaacatactaataaagaacaaaggataataaccaaagtaaatgattttgagatcctaaatggcttctctcatctcttatcctcctcaccccttattctctcactgggggcagggcctcattcctctcctgctcacccagattagcccaaggctcctccctaaggtccagtctttacttagctaagatgtatgtcagcctgaagctcacttcacagaaagccacatgttaaacactaccatacggtgtggttctcttttcagctctcagatggactaagcgtaagtgccagcatatttgaattgctttgaattaaaatttaatgcttattattttagaaattatagtataaaaccaaatctggattcatagcagaggaagacaaatgagcgtgcgtattaagacatggctttgggacttgactcattccagatgttaaagctcacgactcactaggctcaaaagcccacatttaaaatttcatgtaaatggtgtttctcagcaaagtaaattttagttctctctatagaaaatcattcctttacaaaaactcgtttttttttatgagtagtttctcttctggaactagtttaatctgatgaatgtaaaaattggaagccatttggaatacaccatatgctgaacatcctgggacctgaaaccttcagtgtttcctggacgaataaggcaatccacaagaaatctgaacctggtccgtgaaacactagaattttgaattggttcttgttgtttccttgcaaatgcgattcactaaaaagaatgaattcactgtgactcctctgcaagtgatcacggcatggcttcacctgacttagaaaaattcagtttttctgcacaaaccagactcagatattggtcatctttctctaggttatgctgcaataacaaacaattagtagcaacaaccagaaaaatcaaaaacaataacaaaccaaaagcgtctgtggctttcaataacgtgtttattctttgctcacaatagcaggttagttttggatccattgcagttctgtttcctatgtcagtttcctgtgccttcaccgtcctgagacccaggctctagagcttgctgggggaaaagtaaaagatggttgaattatgcagtgacttccaaagcttctatgtggaaattggtgtatcacttttgctcacactctgttgggcaaagcaagtcctatggctaagcccatagtcaatgggaagattatgtattaattctccgtatggcagtattgcaagtcacatggcaaaaagcatagatagtcaatccttttacaggaagggaagtgaataactatgtaaaataatgccatccatcccagttcatgagcataaaggaaagaggtttttttttttttttttttggtgggggtgcaaatttatcaagtcctagattattgaacgcaatacatgcttcagaggtagctagggtcactttagaacatttgatgaattttattctagtgtctctttcaaaggagttgtagttaaagtattgccatgtctagaatccagggagaatacaggctttcagaattaataaggtttcatttccacagagagagagagaaacagagccaaaatcaattgcaccttctaggttcagggcccttgagccctatgagttcctcttaaaacatttggactacagctgcctttctccttgttaaaatccttgaatttcattagttggggcccaggggaatggcccactttagcttgcagtgatgctatttggctgttttttttccttcttgtcatcttctaatgggcgaaatagaaaagagagactacaatcttcgaagaagcaaatagaaccctggaggattagagagcaggaagataactttgtgtttcatgctttctagttttcaagaactgcagtatgtctgtatctctaacaaaaactgaaccatcatactgtaccttaaaattaatgaatcaacaagaatttgtcaaatacctatttgcaaagttttttttattagatgctgaagggcaaacagaaatttttcccttccctcagagacttactgtttggttagagataaatttagcatagctttactacaatatgtgaaatttgtgttacagatgttgtaagagctcagagaaaggaactagtatgagcctgagtcagtggagaggcatgtgatttttcatgtctgtgtcagactctatcatatggctgaatcattatttatttaatcacctcactattattaggcctttagaatggtttcaattattgttattatagagcagactttgatgtggatctgtatatgtcttttcctgcatcttgaatatccttgtgatacagtgttagaagtgaaatacccttaatacatattgtcagtttattttccagaactttatacttccaccagttatggatgagagtaactgtcgccacatccctaccaactttgaatatcatccttttaaaatctttcctttactggctaggcacggtggttcacatctgtaatcccagcactttaggaggccaaggcaggcagatcacctcaggtcaagagttcaagaccagcctggccaacatagtgaaaccccatctctactaaaaatacaaaaattagctgggcgtggtggcgtgcccttgcagtctcagctatttgggaggctgaggcaggagaattgcttgaatctgggaggcggaggttgcagtgatccgagatcgtgccactgcactccagcctaggtgacagagtgagacttcatctcaaaaaaaaaaaaaaaaaaaaaaaaaaaagaaaacaaagaaaaatcttctctttactacctgtttgccttggcctagataactcctactcagctttcaagtctccgcttaaatgttatttccactgagttttccataatcccctgggtgagttcagagtctttggttaacccagtggttctctacaatttaagactttttaatatcactccttgattattcagaaatgaaatacactgatttaaccccactagacacattatatttaaaaatatgtaaagttgtaagaataacattaagaaaaaatagagtaacagaataaaatcacatttatttcagtatctgaaaacctaggcaagctgtacttgaagacaaaataaagcagttgattgtctggaccccaaattgctatgaatatgacagtacaaatgcaggctgacacagttatgtgggttggtgactaatttttcagaaatagtgactaactcttgacagatttccaggagaaagaatcttcaatttacactctacttgtaatcctggaaaattcagtatgcattaaaattgcacaaaactactttgcgcttaatatgtaaaatagagcgagattttatacccaataacagaactttcacttatgtgaatgtcacacaggttcaggagaattcttgttgtgtgtgacgctcacatttcaggctgcctcgtgtctttggtcccttgctacttactaaatgccagtaatgccccatgattgctgtgataataattaacacaaaaccaaaaaggtactctcacacatttcccaaatgctagattgtggtccctgctgagaaccattggttaggtaacaatgaagtatcctgcgcttccccaaaaaccgcagtcatcatacttttcaaaaatgttcctgcctattgtaagttccttgtgagcagtgactgtttcatggtattgtcacctgcacagttcctggcatttattcatgccttgataatgttaatgaagtgaatgaattaatatttggatgtctgtatccttcagaataattgtactgaacagcggcggtatatatatccatcgaataattcctgctcatagtagcaagcctccagtgtttcacctccaaaaatgtccagaataacaacagctatccttagtcaacattttccattaccaaacatttggctaaggaattcacactattgtttcatctgtttgcttcaacaatcccatgagcttagatagagtaacttgctcaaggctattaagtgaggtggtttgtaagtgacagaggtaggttttgaacccaagtccatagactgtattcatggccactatactataagagctggctatttggccgggcgcagtggctcacgcgtgtaatcccagcactttgggagtccgaggtgggtggatcacctgagattgggagtttgagaccagcctgaccaacataaagaaaccccgtctctactaaaaatacaaaactagctgggcgtggtggcacatgcctgtaatcccagctacttgggaggctgaggcaggagaatcacttgaacccaggaggcagaggttgcggtgaactgagatcacgccattgcactccagcctgggtgacaagagcgaaactccatctcaaaaaaaaaaaaaaaaaaagagctggttattgatttaaaatcagtagtctattatatgaaggaaattccttttttttctaataaaacaggaatgctaacaatgttttttgaatttatggagttatcatatggcttatcttatctgatgtactgaggaagttaatttatagtttataatttctaacctttcttgcactattattattcccatatttgatctggtatataagctggcaatggactgtgaatttatttttctagaactgtgtttaggatttgtgtatctatattaataggtgacatcagtctatagtttttatttctataatctatgttgggatttggtaacagcgttctaacaaaaattatttggaaattattctatgtttgaggatggcttagaataaattatacatgggaattatctcttccttaaaagttttaaagaatgtactaagtagagcatcttatgggagatttttctttttgggggttgagggtgggatgggaataattatttgataatgttttcaattttatttatgacttatgtctgttcaaatcttatttttcttctccttcagataattttaatgttatactttttctgaaaataacccattaaaaacattcatagagttgtacatagatttcacatttaaaaaaatcttagtatctgtgtctttgtcattttcaattttgtatatttgtgcttatatatttattttctttttagacttgccagagatttgtcttttatatccccacccataaccttcctcaaaaaaacagttcttgaatgtatttatgaataccacatgattttgtatttcatttattaagttttgctcttctttttactgtattcttcctcattttaaggatttttttctaacttaaaaaaattgtacatagagctgggtctcactgtgttgcctaggctgtctccaattcctctcaccttggcctcccaaggtgctcagataataggtgtgtgccactgtccctggccttctttctaagtttttaagttgactccttacattcttttactttctctctctttcatcaacttttcttttttttccttttttctttcaatggcaaaagtagtttagtccataactttctttgattgcagatttggctaacacgtgtattttttcataggtaatattctcattttttattgttttccaagtagtctaaattgtgaatttatttcctctttgacattgtgaaaattattaggagaacattctttaaattcttgtgcttttggactttattggcttaggattttatcagcatttcatgttattgcattgtgcttaaaaatgacctactgctttagaaaataatagaaatatgtaactcaaattggattatcattcattttgaatctgccattttttcatctccaagtaacgccaccattgccgacgtaagtttctttatttgaattacatctctattttatttttctctttaggttcgagatggtgaaaccttacttggaaaagtctgtggcaacggaaccatctctcacattaaatccattactaatagtgtctggatcaggtttaaaatagatgcttctgttgaaaaagctagtttcagagctgtttatcaagtcggtaaggaaacatataatttttaaatgtctaatttgcctgattgtaatattttaattcttcaaaataatttagtcattttatgtcctcaagtgttaagtggaaaatattctcatagaaatgttatattcggttatctcctcaggcagtattagattttgcaataaaattgagataaaattattaatatctggacaagcactactataatttttatgcttacagcttgcggggatgaattaactggagaaggggtcattcgctcgcctttttttcctaacgtgtatcctggagaaagaacctgtaggtggaccatccaccagccccaaagccaagtcattctcctcaacttcactgtctttgaaattggaagttctgcccactgtgaaacagattatgttgaggtaagagggaaaaaatctttgaatttgtatttggttgtatattataaaaaatattatgggttgttgtcttcaaatctgttataggaaatgaaagtagtttatgtagaccaatatgtcttatggatacatatgtaaaaatcctcagcaaaatactggttcagtgaatctagcacaaaaagaggatttatataccatgattaagtgagatttgtcccgagaattctaggttgatataaaaccccagaatcagttaatgtgatacatggtaccaataaaataaagaacaaaaactccatgatcacctcaatagatgtgagatctggattttgctggatttgacaaaattcaacatcctttcatgatgaaacactcaacaaactaggagtagaaggaaccttccttaatctcataatggacattcatttaaaaactcacatctaacatcatatttaattatgaaacactaaatgctttgcccctatggtcacaaaaagacaagaacgtctgttctcactacttctattcagcattacactggaaattctagctagagcaattaagtaaggagaagagataaaatgcatccagaatgaaagggaacgagtaaaattctctctattcacagataacatgaccttgtatataggaaatcataaggaatccacacacataaaaaactattagaactaatccattcagcaagttgtgggttatgagatcaaaatatagaaatctttctttttctatacaccagcaatgaacaatttgaaaatgaaatcaaggaaacaattccatttacaatagcattaaaaaataataaacatgaaggaatacagttttaaaaataagtgtaaaacttgtcctctgagactataaaacgtccttgaaagaaatttaaaaagacctaaataaatggaaagacatttaatgttcatggattagaagacaatattgttaagatggcaatactccctaaagtgagctaaagattcaattcaatccccataaaaatcacagcgggctcttttaaaaaaatacataagctgatcgtaaaattcatatgaatatgcaagggaaccagaataaccaaaatgttcttgaaaaattacaaagttgaaggactcacacttcctgatttcaaaacttagaacaaagctacaataatcaagacagtatcttattgaagtaaggatataaatatagatctatggaacacaattgcaagtccagaagtgaacacatacttttatggccaattgatatatgaaaatgatgccaaaacatatcaatggagaaaaatcattttttcaacaaatggtgctcaatagccacatgcaaaattatggtgctggaccccttccttatagcatacacaaaaattaactaaaaatggattatagacctaaatgtcagagctaaaaccatgaaactcttaggagaaacctaggagtagtctctatgcccttcagtttaggcaaagccttcttaaatatgacacaaaaagtacaaacaaaaaaagaaaaaagaaaaataacttcctcaaaattaaaaacgaataacttgatttttaaaatgggcaaaggaggctgagcacagtggctcacacctcatcccagcactttaagaggtcaaggtggatgaattacttgagctcaggagttcgagaccagcctgggcaacatagtgagaccccatctctacaaaaaattttaaaaatagctgagtgtggtaatacacgcctgtagcctcagctactcagaaggctgtggtaggaggatcacttgagcctgggaggtagaggctgcagtgagctatgattgtgccattgcaccctagcctgggtaacagagtgagaccctgtatcaaaaaaaagaaatgccaaaaacaaaaggacacacccataggatagctataataaaaagagtcagataatggtgtggacaaggatgtggagaaattggaacctttatacactcctggtggagatgtaaactggtacagccaccttgaaaaacagttggcagttcctcaaaaagttaaacatagagatactatctgatccagcaattctacttttagatatattctcaaggggaatgaaaatatatgtccacacaaaaatttgtatgtgaatatatctacagtcatcatctataataacatatacaaatagcaaaatgcaatcattatttttaattttaaaagtagaaacaacttaagtgtccatcaactggtaaacggataaataaaatgtggtatatctttacagtggaatattacaaggcattaaaaaagaatgaaataatgatccatgctacaacgtggatgaactttgaaaatgttatacagtgtgaaagaagctaatcacaaaagaccccatattgtataatcccattttgtttgaaatgtccaaaatgggcaatctacagagacagaaagtagattagtggctgcctggggctgtggtttcaggggaatgaggagtgactgctaaaggatatgagtgttttttggggggtgactaaaatgtgctaaaattgattgtattctcaaattgatttgtactccattaaaaacatttcagaaataattattcttgaagcagttttcaaaattgatatacaacatatttgaacatatcttctctaattttagattggtagcagttccattttgggttctcctgaaaataaaaagtattgcggtacagacataccttcatttataacatctgtgtacaattttctttatgtcacattcgtgaaaagttcttctactgaaaaccatggtttcatggctaagttcagtgctgaggatttgggtaagagactgttcccttttttttttcctcctcttgggcttgtatcagaataagtgaatgatagaaataaattatatgaaaatcatctgtactgtgaaaaattttaaagtacactcaaagacaaagaatgtatattttctaatcaacatttatatcaaaagttaattgttacttattaataagagaaaaatcaggttatcttaagtggcaactaagaaacatttttccttttaatctttgaagaggttattatcagagccttttaatttgaaatccaggtagcttggttacttgctgcagtaattataatttttatttcaacagcatgtggagaaattcttacagaatcaacagggaccattcaaagtcctggccatccaaatgtctacccccacggtatcaactgtacttggcatatattagtccaacctaatcacctgattcatttaatgttcgaaacatttcatctggagtttcattacaattgcacaaacgactacttggaagtttatgacaccgactctgagacatcccttggaaggtaaggttatgtttgtttgtttgtttaacaataaaacttcactgatttcctgcttcagtgaaggatcttaaaattgaccacgttgtgttatgaaaaccaggtgagatcctcatgcttcttaatgaccatttctacataactactctgtagttgtggccttgtaggcattaagttttgacatctgtatatattcatgaagtcaaaaccaaaattaaaataatgcatatatccactacccacaaaactttcttcctttccgttataattccttgcttttgttcctcacccccacccacaggaaaccacaaatctactttctatctctgtagattcgtttgcatatcatctaaatggaatcatactatacgtactgaatgtttttctgactttcctcaattagcataatttttgttgagcttcttggatccgaagatttgtagttttatcaaattgaaacattcttggccactggttcttaaaatatttttctgtctttcctccccattagggactctgatttcatgtatattaggcacttgaaattgttctacaactctcttgatagtctgtttgatttcaagcctctgttctctgtgtgttttactttggaaagttcctattactatatattcaagttcactcatcttttcttatgcaatgtctaatctgctattaactttaccaagtgtatttttcatcttagatattgtagttttcattttagaagttcaatttgagtcattttatatgtagtccatgtctctactttacacatgaattttttttctctagcttaaaaaatctgtgagatatagttgtagctattttaatgactttatctactaattcagacatttggattgtttcctgctatggttttatagattgatttttcctctctttctgagttatactttcccacgtcttttcatgtctgggtaatattcagtgggataccagacattttcaattttatgtttttggctgctggacattgtcatattcctgtaagtattcatgagcgttgttctggaaagcagttaagctacttggaaacaggttgatccatttcagttttgcctttaaactcatttgtttcctgtctctgaaggtttgttgtcctacattgcttgatatccagtgttttgagagccattgttttatacgtttttgtccaggatttttgttgtttcaggtgcaaagttaaatctagcctgttattacatttctgttggaaatggaaatcttttgatattttaaaatgtctttatcttgcattttattttctttatttctcattcatgttttaaatatccttcttatcctaatctttcatctttttaactttcttctttttcttttttgggaaggtacttaacacatcaccactgcaaaatacagaacgtttgctgaatggcataaactataatgatcttccccaaatttcatatacatgggcatatacgaaggcatttaaaatatcaattagttcacctacctttattttgatgaagatattaaattttttttcacactgcaatggtattatacaccaaattttctttctttttctcctttagcaattgacgtatccatttcccgtactcaacatttcctctctttttggtttctatatttgttttctttatcatttcttttggttaattttaccaagtgtgctttgatttgagattcctattttattgtcacttcttcctacaggtatttctccagataaaagctcatggcattctgtcttttatcacaactctctttttaacattaatagaatagtttttctgagctaaactgcttttgttcagcagaaacatggcatggctgaatcatcactcttatctctttataagtgagctgtttaaggacaatagattccctctataggggttacgattgtaggcactgttctaagtgctttatatacagggtattaactcatcacattctcaaaacaactctatgaagtaggtactgtcatcattcccattttagggatgaggaaggcaaggcacagggattgagtgatctatgagtttagattagagagatgactctatgattttatgatatattgtttccctttgttgtataagtttattacatttctattaaaaagtgtattaatatgctatatggcaatctagtgtagcttttattaaacttctcatacatgacaactcacatagccagtcacatacctaaaaccatttcagggatataatcatgaacgggacaatctttcgtaagtttgcaaatcttttttgcctgaaatatatttgtgttttaaggttgatgagaggtagagaacaaaacctattattatatttacatgtccaaatttttgttacatcattttcagtataccaaactaaaatacacacatctgtcctttcttggtttggaatagatactgtggaaagtcgatcccgccatctctcacaagcagtggtaactcattgatgctggtgtttgtgactgactccgacctcgcttatgaaggcttcttaataaactatgaagcaatcagtgcagcaacaggtaacaaaacagcattgcatactcggttttattgactccattgcaaaacagtgctaatagctaaaacacaatgagaatacatcatccgcaaacctgtggcacacaatgagagctatatttagaataaagggtagtgacttaaataccttccttattaaaagtagtgactagataagaatattgtgtcaatattaaatcttctaatgttggtaattgtactgtggttttgttaaaagaacgttttttcttcccttaggaacaatacactgaagttttcagacggtaaagaaatataatgtctccaaagtactctgaattggctgagataataagtgtgaatatttgtgtgtctgtgcatgtgtgtgtggggggggggggagagagagagagaaatgataaagtaatgggagcagaatacaaatacataataaatctgggtaaaaagaattcaggagctcattcttgcatcttttaaaattctatcagaatgaaaagttaccaaagagactgaatacttatgttaagaaattagaaacagaataacaatgtataaaaattagagactaccgcatgaaattccagggaaaggaatggaagatttcttggcaaaatatgcatttctcaatttgacctaatgaagttaaacttttcagcatttattcctttcattgtatttttcctattacttaatttctcattattactatgccctttgcaaatgaagtataggaaacaaatcccttttgcaggcacagtctttgaggtaagatgtgaaccagagatgctcccagccccaagagcctgtgcatgggattgatgaaggagtcatatttcgttaggctcatgtttccctaggatgtgttgttttttagagactctgagctttccttttgcatcattgtattaaaggacccaaataacatccagcatagacccatagtaggcatatggtgaccatgcttccaagcatttctccgctttgggattaccccagcagcatggtacaattcactgagctccctccagaaagaactggtagcttttcctatgttgggacatgcaccctgtgacacactctggcatcctgagaaccccagatgcttatcttttaaagtccccactccctaaaataaataaaagtttaaacatctcccactcaaaatcttacccaatttcccatttatttctccttcagaggggctggccactactcttcatttcaggcaaaactctgcagcagttcaagttctatgttcaaaagcatggctttagatttgctccagaatcctgagtgtgagagaatcaatcaatacttttctcccaggtaggaacctctgcaggagcagttcattatccagctcaagtgcaagcacatgcgaaatggaatccctggcagttacaataggctatggtgtgtgattgacgtattcactggacttcattcaggtggttaacatccagtgaccaaaattggtttcttaagaaattatagggtgcacacaatttttcatgctgttgtagttttatctgtctggtatgtttggccccaaagcacactgaatattagatcaggatttggagcaagtcacttgaactctctaggccacagttttctcatctgtaaaattaaggaattggatttggtaatcttcgagagatgacttctggctttaatcatctatgaacataattttaatttggtgcatgaataaactggctgtatcttagataacatataatacaggcagggcctcctgaaaatgtggaaatctttgtaatgatatgcaaagtaagacatacctttgtaaaacaattctattaccatcctagcttgtaaggcaatattttgtgcagaaagaacccagagcagttaaaataattgggcagggaggatattagattttaattctaaaagttttcagaaagataagatacacgtaaaataaaaatgagtcaggaaaagagatagaagcaaactggacaggaaaggaaactataaagaaagagagaagaaaaagcaagcaataaaagtgaaggggagacgatgttttcatagaaactcaaaagattctccagctggcttccctgtgtgataatcattactttggcctctatttggtctgcataaggctgaaatcacagacgagggagtgtttgctttctgtccctgggctgagcccggctggtcactgtgcccgcttgttgttggatgaactcataggtctgactaacacagtcaagccattctaaatagcaatcagatgacgagatccaggaagacacaacacaccttctgtttataattctggagcctgtcacagtttcccatagatcaagacctgagagatcggctctcatgcattgctgagggggggtcctgcagcattttttagggaagggctggtgtcaggagactgagctggtgttgggctggtgacaccaggtggtgggctagtactttaaggcagtggctagacctagaaggcagccagagtcagagtgagctgctggtgtggaaacacagagatgctaggactcattcttttcaggtgtcatcgtatgttggatattttctgcagaataaaatagcatcagggaaaagcatcaagggaagctcagtcatttgccctcatcttactttattgttctaacagaagttatttccagagcagtaatgttggtatttggttgttgatttctagctcctcagcccaacaggtgtgagtttgcctgctgaagtctttcttgtcttcatctgataaaggttaagtttccggatttgagttcagatacttttccatctgtagtttgtgccatgtggctatgatgtcagccccaaaatatgtgtttgggagaaaaaagattggtttcttgtgattactgggacttcctcccttgttactttgtttctgcctttatccagatgtgcctgggaaaacagaaagaaaagaactaacaagtacaggtttaacaggttaaaactcttacgaagttcttagaaactacaagactaagctttaatttaacgtattagattttgctcattcaaactacaaaatatttgaatcctgagagactataattgactaatgttatcaatttaaagtaaaattttatattctattaacatgtattgcatatacattaatatataatcctgctaagagggaactttaaaagtataaacagggacagataaatgtaccggattcattttcaactttaatattagaggaaaacctatgtaacatctagtccagtgcttttcaaactgcaattcatgactcattcgtgagtcatgaaattaatttattcggttgctacttgtgattgctaaaagtatggagtaggatagaaaggaataggagagaaagtatcagagtttatcatacaaagtaaggtgccgcttcatgagaactgtttgtagtatctccgcgcatgggtggctaacgtaaatgtattttttagggtatgtcaagaaagtttgaagcacaaatctattccagttaccttaatttttaaatgagggagatagaagtctaggatgttgaatttatcctcccaagaatacatagctgattggtttgaaagtcagactaaacaactgagtcccgtcttagaatccattgcttttgccatgtctaggttagctcttagaaacgctctaaatgaactgcatataacagctagtaacatttaattcagggctatcatcaaactgtggtggatttttcatatttcctgcaaagcgaaaaccttcacaattgtccagggaaatggccaaggatgatcccaacaacaacaacacaggattagagatgagccctactgggctttcttggcctccctccttcccagggcagggttcccacctactcatcagtgggtggttagtgctgttttttatcagtgatcctggaatgagctcagaagaggcatctagcagtgcaaagttaagaaatgatgacaaacatgcccaaagaggccttctttacactaaacgggtaaagagagttctgtttctattttaaaacttcagtttgggagtgtagtgttctcaaattctagtgttcataaggaatttgagatgggggattttcttgctataaattcaggcatctgggccccacccagaaattctgattaaaataggtctagggtgcttgttcgccaagcaattcaaggggttctaatgaaactttgtagtttatcaaggactctgaaagtcaagccttagcatgtgaattgctgtagaattacaagggagatacaatagtggattggactgtaactgctcatgatggaaagtactattcatgacacagggaaaggggatgctgtagggaggtcagaagtcttggtcctactctcagccttgatactaattaggaatacttttgtttgtttgtttttgggttttttttgttgttgtttttgttgtttgttggtttgttttttgagatggagtttcactcttgttgcccaggctggagtgcaatggcaatatctcagctcactgcaacctctgcctcctaggttcaagtgattctcctgcctcagcctcccaagtagctgggattacaggcatggtcaccatgcctggctaattttgtatttttagtagagacagggtttcaccgtgttggtcaggctggtcctgaactcctgacctcaggtgatccccccgcctcagcctcccaaagtgctgttattacaggcatgagccaccgcacccagccataatttggaatactttggacaactcacaagcctctctgattatttctatcgaccttgaattctgtattctttgctatgagagattcagatattttccctctggaaaaggtgttgtagtaagtcgattcgtcttttaaagatttactttcttactggctagtgttttctcataattttgtatgtacaggtgtcccagcacttctctgctcagttcgtttatcttgtttgttatatttcttactccttagaataaaaatgcaacaaaatgcttaatcatgatattctgagttccctacttgtcttcatccttaaattgacatttcctgtgtagaaaaaccagggattgtggccaggcagggtggcttatgcctgtaatcccagcactttgggaggctgaggcagtcggatcacctgagatcgggagttcgagaccagcctgaccaacatggagaaacccagtttctactaaaaatacaaaattagccaggcgtggtggctcatgcctgtaatcccagccacttgggaggctgaggcaggagaattgcttgaacctgggaggcggaggttgcggtgagagaaaatcgcaccactgcactccagcctgggcaacaagagcgaaactccatgaaaaaaaaaagaaaaagaaaagaaaaaccagggattgttaaagagaataggatttggaaagagggaacttgggttcatattttatcttggccatgtctgaagttaagtgtcttttagaatttaatctccaggaacctgagatctctcatctacacctctctaaaaagtgtggtgataatgcctggctgttttgcaaagttgaggaagacaaaatgagacattcaatgtgaaaattacattagagttgtaaaggaccatgactttgccagatataaaatatgattctcaatatccaaggacaattttacaatagctactttgcttatttctatatgaatctgcactggtcatctgagagggaaaagaaaaagcaatgaccatgaccgcctagcagaaaattgtagcaaaatgttgagtttgattgagaaggcttcttctttcttaagggagaaactgaacctgtaattatatcttcccttgggtcttcactttgaaggatgctaaaccaaatatgtctgtggaagcagatgatggctcctgggttagctgtttatttagcacattcctagaatatcagaggtcatatggattcattcagaaaccaaacatttcataagtgatttcagaaagcatagcctaaagattgagcctcaatgtaattggatagtcacataaatcatcccataatgcaaagcaggaaggagctggagcagttccccataatctagagtctccctatgagatgcattcctctctccagaggatcagcttatcctatttctgtggctcaaattttatgggactgatatcattgttgctttgtggtttggaaggttatagatgtttctcattttcccctttgataatgagccaagtcctgtgttacaaaaacttatttgaaaatgtttagtgaaggcaaagatacattgtgagttttagaaaagtctagttttgtgatttttgtaatggtccacagaaggcatttgtatgttttttcatttctttctttacattttttttttttgaggttggtcagagagaaaaatatgtgagttttgccaacagttgtctttgatcctcagagatgtgcttttccattgctagttcagttgaatttaggggataggaaaaatgtactttcatttttcatttctttgtaaatgttcttagaccataataaaaggctaaactgatattggatatgaattttcctttggcaatacaagataaaataaaaggcatagatacatttttatctttgcattttgtattgatgtaataataagcatcatgccaacacataaatatccttgtatggaaacacattctaatttaatcatttgtgctttgttgaaaatcacaagaggaaaccaaaacttagtattgatatttttcagtattactattattctagaaggagccatttatattgtcaagggaagaaatgtaaacatctatagagttcagtgatagttaagaggggtttttaatctttcaagaaatagatgcattaagttcagagaatagtaatttttctctctatgaaatttgaatctcataaaactaccatcaggttttaagattaaatatcctattgtttaatacgtgtagcaggggtcccttcaaatatgatgttttatttctctatttcaattttatgtattctttattagatatctgaattatttattggactttctctagagagtgcaacctgtctgtgcacagaactttcaagcttttaacataatatggatttttccctgtaatttcagtaaatttatccataattttcagaattgtgtacacccatttaactacctctccattcaagctatcgaatacttctgtccctccagaagggatcctcgtgttccttttattagtttcctcaacaacctctatgtcagcaaacacacacctggtttctaccaatatagaatagttttaactgtgcaaaaggcagctgtgaacaggaatacatagtatgtattcttttgtgtctggcttcttttttttttgagacggagtctctctgtcacccaggctggagtgcagtggcgcgatctcagctcactgctacctccgcctcccaggttcaagcgattctcttgcctcagcctgcccagtagctgggattacaggtgcgcgccaccatgcccggctaattttttgtatttttagtagagacaggttttcatcatgttgaccaggctggtcttgaactcctgacttcttgatctgcccaaattggcctcccaaagtgctgggattacaggcgtgagccaccgcacccggcttggcttctttcatttggcataatgtgtctggaaatttttcatgttgctgtattcatgtgtttttttctttctattgctgactagccttccattgcatcgatatatcataatttgattatctgttcacctgttgttagatagttgagcttttttttcccagtttttagctattacaaaaaaagctaccatgaacattgacttgcaggttttttgtggacgtattcattctcttgcgtaaaatacctaggagtagaacttctgggtctcatatggtaatgatatgtttaactttataagaaagtgccaaattgttttccaaagtggttatgccattttatattcccacctatatgattgacaattctgaaataggagttggggctccacaccagaccagatggaagactggctaaaacagggaagagacagaagcacctctgcataagacatgcccaacagcgccatgacagtgtgccattgccatgacaacacccagaagttaccatcctttttctagacatttccaaataactcaccccttaatttgcatgtgggtgtaaatatgactgcacaactgcgccaagctgctaccctcaacacgttgcctatggggtagccctgctctgcaggagcagtcacggagctggaacactgatacctcagtgaagctgattttttctaccaccagctcacccttgaattctttcctggccaaagcccaaaaccttcctgggtggagtcccaatatgggggcttgcctgccttgcagcagttcttttctccatctttcccaatccttaatattgccaatcttttcatttttagccactggcagttgcatagcagtatctgatggttttattttgcatttccctgatgactaatagtgctgagtccttttcacgtgctttttgacaattcatttattttcttttgtgaggtgttcattaaaaccatatggttcatttttgtttgtttcttattaatgagtcatatgttgtatattctgcatacaaatacgtcctttgccagataaatgtattgcaagtattttcttccagtgtgtggctaaacttttcttttccttatggtatcctttgaagaacagaagttcaatatatccttttatcccttttatggttagtgcattttgtatcttgtctgagaaatatttcactaccgaagttatcaggatctcccacgtgcatccttctagaagttgttttttttttgagacggagtctcactctgtcgcccaggctggagtccggtggtgcgatctcggctcactgcaagctccgactcccgggttcacgccattctcttgcctcagcctcccgagtagctgggactgcaggcgcccgccaccatgcccaggtaattttttgtatttttagtagagacgggtttcaccgtgttagccaagatggtctcgatatcctgaccttgtgatccgcccgcctcgtcttcccaaagtgctggaattacaggcgtgagccaccgcacccggctccttctagaagttttatagtttgagattttatacgtgttctatgatccattttgcatcaatttttctatatggtgtgagttatgtgtccaagtgtgtttagcaaatggtatttaattgttcaagcaccatttattgaaaagattctccttcacccccactcccactgaattgcttttgcatttttgttgaaaatcacctgcctgtgttcatgtgtaggtctgcttctggaatctctatttcatcacactgctgtacatatttacccctttaacaatagaacattatattacttaatgttacataatttcatattgtatattaaaatctggaagtataaaacctctagattggtacttatttttcaaaattgtttgggctatcctagattttttgtgtctccatattcattttagaatcagcttttcaatatataaaaaaacttgagaatttgattgagattgcattgaatttacagaccaatttggggataaaggtcatcttaaattcagccttccaatccatgaacatattttacctctccatttattcagatcttccttcatttccttcagcaataaagttttcagtgtagagtttgtgcatgtttctattaaacttgttatcaagtgtttcgtgtttttatgctattataaaatgacatgccatattatatatgctattttaaaattttactttctggttgtttggctgatatatgcaacataaatggatttttgtatacatatcttgtattctgcagtcttgtttaactcagttattagttctaatgacttaaataaatcctttagtatatactacatagatgacaataactgtgaataagttaaataagttttattttttcccttctctctctctgtccctctttctctgtgtatgtgtattgctgtgatggctagaactttctgtgcattcttgaacagaaagggtgaggttggaatgttggcctttttcttaatcttgacaggaaagcgtttagtcctttaccacttaagtatgatgttagctttggattttccatagatgccattcatcagtttgtggagttcccttctgggcatacttgctgagtttttatcctggataggtgttgaatttttctgcatcttttggtatctttcaaagcttttctttttttattctgtttaggtggtaaattatgttgatttagttttctactgtcaaaccaatcttgtgtaatacatcagaactccacctggttctgatctattataacttttacgtgtattcagaattgttatgctaaaattttcttatggatttttgcatcagtgtaagacatactgaactgtaatcttcctgaatttctttgtctggtttggtataggagtaatattggtcttgttagttagaaaatatcttctcctctattttctgagtttgtggaatataaacaatttcttaattgtttgatacaattccaccagtgaaattatttgagcctgtagttttctttgtaggaaggttttatattacaaatttaatttcttcaattaatagagactattaaagctttctatttcattttgagtcagttatgggaattttgaaagaattcatctattttatgtatgttgtcaaatatatttgcacagttttttgtaatggtgtctttctattattttaatgtctgaagattctatagtgacatcccctcttcattcctgaaaatggtaatttgtgttttttttcttttttctttgatcagttttggtagaattctatcaattttaataattttctcaaagaaccaatttttgacattgtttattttctctattgctattgcattttccatttaattgatttctgttcttatattatttcatttaattcttgccttagttagcttttctctagtttctttagataaaaattaactacagatagatagatatagatatagcctttaagcactacttcacttcacctccccagttttttttttttttttgagacggagtttcactctcgttgcccaggctggagtgcagtggtgcgatctcagctcactgcaacctccgcctcctggtttcaagtgattctcctgcctcagcctcccaagtagctgggattacaggcgctcgccaccatgcctggttaatttttgtatttttggtagagacggggtttcaccatattggtcaccctggtcttgaactcctgaccacgtaatctgcccaccttggcctcccaaagtgctaggattacaggagtgagccactgcgcccagccacctcccaaattttaatgttttattttcagtaacttccagttcaaaatattttccaattatcttgtgatttcttctttgttctatggattatttgcaaatgtattatttaactttcaaatatttgcaggttttctagatgtcttattgatttataatttcagttttattgtggttaaatgatatactttctaagttttcaattgtttaaaatttatggagaattgtgttacagccctgcatgtggtctatgctgctgaatgtttcatgtatgcttgaaaaactgtgttgtctgcagttattaagtgtagtgctctctgtcaattggctttaagtcggctgagtgttggtcagattttctatacccctattcatctttatctgtttcattttcggttactgagagaaaggtgttaaaatcttcaactctaatcatggttttatttttttctttaatttttgccttttcactttccttcgtgtattttgaaactattacttcatgcatgcacatttaggattattatgttttactgataaattgtcccctttgtcattatgaaatgtctttctataaatctaataatattatccttcttgaagtcacttttgtttgatattatttcagtgatttcagctttcttatatttactgttcatatggtatatcttttttcattcttttagttacaacttagtttcaccattatatataatggcatcattatatataatgtgcatgcatagtaaaaaacatataattgggtcctgctttttctgtgttttagttgaagtatttagaccatttacaactaatgtaattatttttatggttgaatttaacataccattatggtagttgttttccattcatctctttttgtgttgccattattctgtcttcattttggtttacagaatattattagtattccattctatttccttcattgtctttttaatgatacctttttttttgtatttttacattaggtctaaaaatatactccttaacttataagcaagttttcttagagttaatatgcagctgctttacatttcataccttccaattcatacctgacacttcatattacacaaattcccctttatacttcacaagtgaaatactgtcatactagtgtaattccatgtgcctatccttctgtgtgctgttttagttatatcttttacttctctctgtgttataaattcaccttactattatttttgctttaaatcactaattctctctctctctctctcttttttttttttttttttttttttttttgagactgagtctcagtctgttgcccaggctggagtgcagtggcaagctcccagctcactgcaacctccaccttccgggtttcagcaattctcgtgcctcagcctcccgagtagctgggactacaggcatgcaccagcacgcctggctaatttttgtattttttttagtagagacagggtttcaccatgttggccaggctggtctcggactcctgacctcaggtgatctgcccacctcggcctcccaaagtgctgggattgcaggcatgagccaccgcacccagcctacttctctctatattataaattcaccttactattatttttgctttaaatcactaattctcttttaaggagataatgaaaagaaagcctatcatttatatttatacaatgatttatcatttccagtgttcttcattccttcttggagatattttctgtttggtatcattttcctttggcccaatggatattattatttcatacagtacaagtcttccagtgacaaattatgtcagcttctgtttgtctaaaaatgttacactctcgttttttaaaaaagtagttttgctggatatttaaacctgttttccccatctcaacattttaaagatgtattccattttcttcttgcctccattgcttctgtttagaagccagctgtcatccttatcatgatgtccctgtatgtgatgtggcttcccccccgccccaactggcttctgtgttttccttgtttctgttttctaatagattcactctgacatgtccaagtgtagttttcttttatttctcctgtttagtattgactgaactcctatatcttactagacatttttcataaaatttaggagaattttagccgctatttccttctccttttttggcccatttttattaccttcttcttctggttctctaattgtatgtgtgttaacctatttgttgttttttctttgtttttttaaatatctgtccattttcctggagttcttttttctttgttctttagattaaattatgtctattaatacatattaaagtttactgacctttttttcttctgcctacagtttactgttaaacttgtcatgaagttttaatttgaattagtgtaattttaagttatataattttcatggttccttttaataattttctccctttttgggccaaaatttcatatctgtttactttttaaggctttttctttaagtctttgcacatatttttaatggctgctttaaagtctttctcttttaaatctaacacctggatcatctttgaatcacaagatgacattttttttctcaactatgaccacatttttcttgactactgatgacatttcttttcttgatttgattcatattttctcattttttgttttgtttttttaagacggactctcactctgtcgccaggctggagtgcagtggcatgatctcggctcaccgcaagctccacctcccaggttcaagcgatcctcctgccttagcctcctgagtagctgggactacaggcgcccaccaccacacccagctaattttttgtatttttagtagagatggtgtttcaccatgttggccaggatggtcttgatctcttgacctcatgatccacctgccttgacctcctaaagtgctgggattacaggtgtgagccactgcacctggcccatattttctctctttttttttaatatttgtaatagttttgggttttatagtggacatgatagattgggacatgatatgggggtcccatatcatgtgggtaaattatgtgttgtagacactctgtattatcttatcttcctctgaagctagtttgatatctagctgattactttgtatctgcataggtttatatctgtacttgctaaagaatatttgtgaacatccctgtttctcgagcccctctaacttgctaggtctctacctccaacttctatgattcctgcaggtcttgttaagacttatcctttggcccggaagttctagagagccctactcttggccatggtcttcacttgtaagatatggccttttaggtgtctcatttgaatgcctgaggtgttaaggaggtatccccattctggaatgggagagaactctaaatgatcttgtttccgcttccagcctagtagcagctcctgtctgacatgctttctgaagtctcaccttatgtattctcagcccaggcttagctaagaatccatgggaagccctactcagatgcccggctttcctctctatatacttcttcttctctgtagaatttccatatagttccagctgctttggcaactctaatctttgcatcatcagctcagtaggactgtcattcactacttggacttcagctcccttctgtggtcaggaaattctgcacaggtagaaagccaaggaaatcaagagtcgtacatcatgagtttcctttctgtcaagaatcacaatcttgtactgcagattgtccaatattttgttcagttttacagttcttaaggagagcagctagtttagtacagttgcttgtcatagctggaattaaaaaaatattaaagaacctcagccaaccaggatagagtacaggaagaagagagagagaggaaaaatgaggtgagaaaaatagaagtcgtaggattggagtttaggggtagtttgaaagagaagaactgaatggagtagggagagtgggaggaacttagatgcatgtaccagtccccttcgtttccaacacatcatgtaataatatttcaacaactacttactgggacctcatctgggccaggtactacagtgatagtaaataatggttaataaagtcttagtcatatcccaaggtttagtaaggtaaatatactcacataaaaacaattacaaaatatgtttggggttcaaattgctatttgcataaaattttattatgctaaataaattaattctgcttggttgggaaaggtttcagccaaccttaaatgatgggtaagagtgtatatgttaaactgtgtattggcaggggttgttgggtggcgggttaggtaaagggtaaagcatttcagacaaagtgaatggtgtaaatatcattggaacacatcaagaactgtagtttacttttgtgccagcaacagaaaagaagcttggtgagtaaatcaaaatttcagtacagattaacagactcccaccagttgttccagaataatcacattcatgtaagcaagataaagggaaactacccatcattattgccccaaaatgtcattaattcaggttcctccacctgagacctaatcacacttaacattctcccacagacaagttgcattagagatatgcaagacaattgtatttcccctccaggagtacagtgagtaagcaagaacaagtgacgacagataatttcctctaaatatttgatttactggccaaagctctctgtgtgtgggtcaatgagtctgtctgttctgtcaactcagggatactgggtcattgctttcatttgatgtcctttttttagcttagtaagtttcattactgggtctgaaatattaatagaccaatgctatactcctccccgctctctttatccctcttttctgcctttcctgttgtctcccttctgtctgtcttattcccttcctctctaccttcctttccacttgtggaaatattttggcagactacagagaagcatacttttctatacttttggagttaaacataatctttggtgttaaatgtcactgtgaattccttcaataaagtaaagccttgattgcttgctgtttaaaatagagtaaaatcaaatatctggcgaatgcccattcctttgagagctacacacagatagtagaacctataatatgttctatgcatctctatgttttcaataccaatgattcttcttttctgagcttggggattatatagcagcaactagggaaacagcataactaaacatccttattattattattattattttgactcacaatgaaacacaatagtttattgtatccaaaacctttcagtaggagacctctgtctactcctataccctagatttaggttatggctggatgcaattggaaatacattaaaaatgcatttatttgctgggcatggtggtgcatgcttgtagtcccagctgctggggaggctgagacaggagaattgcttgaactcggggggcagaggttgcagtgagccaagatcccgccactccactccagccttggcaacagagcaagaccctgtctcaaaagcaaaaacaaaaacaaaagcattcaaaccagattttctttgtaaaatatttcagatttggagggcataggagattgagtgggtggtaataaacacagaatcgactgaataggtaacgttaaaactgttaaactagaaaagtttttaaagaagatatttatttaggacttcaaaattgtccaggtactatgctaaatgttttataaatgacctaatgtcttccttataaagtaaatgaccaccatttactgagtgcatatcatgggctaagcccttgtaatgcattatctttaactcttaaaccttcagtcaaaggtagcaatcctcttcatttgcgagatgtgagaactaaggcttagagaagtacagtaactctcccaaggctgcagagcttgacagtgtttgagagggttttcattcgagatcactctgatccttgagcctgggcccttattcttcaccccgtggtggaggtacctgctttgtcatttctcataaatgcatgctttggtgaaaaccactttaaagggagcttatgaaaaggcaagactgaattatttctaggccctcctgcagtggatcctaatttttaatgtttatggtaatttgcaaggattagaaaaacgtaacactttcaagacttaaagggttgtttactcaagatatatataacaatttcctctccatagcttagatttagtgttggtaattattttgtctttaagattacaaaaactttgtttcagaatgaagtctttatttgcacattccagaatggcttattgaaaatcaagtataggcacaaattaatgaaatacatattactggatgtattataaacatatcaatattttctattttctctcttatggtctgtttctgttcacagcatgtttgcaagactacacagatgatttggggacattcacttctccaaacttccccaataattatcccaacaactgggaatgcatttatcggatcacagtgagaactggccaactgattgcagtgcacttcacaaacttctccttggaggaagccattggaaactattatacagattttctggaaatcaggtcagcacttttatttatttcattataatcttttcattatttattctcattaataatctttcctaggaagattaaggaaaaaaatatggaaattctctgcaaagctccctgctgtgcactttcttgcaagaaataaagtttgtcatttggagcctgacttaggagaaatacaggaattgcataagattctgtggttattttgaagtgattattttattggaaatacttgaaaataaactccagattttatgtgggcaaagaaacagatgtgctactactctgaaatgatgtaacttgctactgttgaatacctactttaattatgtaaaatcgatgtaaattttaggctgtttgctgttcatttaatctaattatattataaaatgatggcaggatagcaatcttaaagttttcacaaagttttcatgttcaggtaataaaagtctaggcttgtgaatttcagtacaaggcattattctttcattatcatcattttgaaagaatgtgtttaaaaagttatatttgcagtaaaagtaagttagcttatatgttactatctctccatgccactactttgagttaaattaggctaatcattctggtgggcatctatatcaaatgttttatttgggattttaaatctggaatcttatgtattataaatgttattctataatataaagtaaggtattaaaataataaatcataattggaccctatcgtgctaaaatgacataattttcttaatttacagcagttactcactggactttgatgttgaataaatcccttttttgttgtttgtttcaaaaagctacagattataaactagaattaaggccccagaagtttttaggaaaatgctatttccagaattttgctaagtatatcaaatatgatatattacatttcaaaaatttccaaatcagaaggaaaacgttgaaagattctctgtaaaatacagcagtatgtttatatagttaatagtatagtttctttatcgtgttttctctgacacatttgccagaggctttattcgaaagggtgaagattaaacatattctctcagtttgtgattggttatataaaacaccataccagctatgaatgatggttattctttgttaagtcattcaaatatgatttttaaaaatttaaaagtgaaaatcgtgttttttagagtaagtgtagtgtttgagagaaattacttcatccaataaactgctaatgtttgcaatcccaaagttcaaattatgttaaatgtttatacagtaatattgtcagtaacccaataaattttaatttctgtattctgccagagatggaggctatgaaaaatcaccattgctgggaatattctatggctcaaatctacccccaacaatcatctctcatagtaacaaactatggttaaaatttaagagtgaccaaatagacacaaggtctggattctcagcttactgggatgggtcatcaacaggtaaatagcaaagagctgtcttttactggagaagccaatctgattggtttcttgattctgggattgtcatgctctgtccctcacttgtccatgtttgcccagctgtatttaaacttcaatattgcaaataattttaaattaacagcagccatttctttttaacagacaaagggagaaagttctagtttctttttatcaataaataagaatcctggttagaataaggaaattgcattaatggaaattggggctgggtgctgtggctcactcctgtactcacaaacactttgggaggccgaggcagggggatcacctgaggtcaggagtttgaaaccagcctggccaacatagtctctactaaacatagtctctactggccaaccccgtctctactaaaaatacaaaaattagctggacgtggtggcaggtgcctataatctcagctactagggaggctgaggcaggagaatcgcttgaacctaggaggtggaaattgcagtgagtcaagatcatgccgttgcattccagcctgagtgacccagtgagactccatctcaaaaaaaaaaaaaaaaatagaaaaaaataaaaattggatttttaggctataactactctttcatgatgccattttgctgtgcaatttgatttaaaggatagtagaatggcaccagtttaatgcagacaaaaagattcaatttccccagaaggaaaggggtgtgtgtcattccacttctttctcctgtaggttgcgggggtaatctcaccacttcaagcggcacgttcatatctcccaactacccgatgccctattaccacagctctgaatgctactggtggttgaaatctagccacggcagcgcatttgaactggaattcaaagactttcacttggagcatcatccaaactgcactttagattacctggctgtatgtataatgtttccatcatattgttccctgctcccatctcacccaacgcacaatgcacttatttttattttcgagattcaggaaaggggagcatctaaaccgaacatccatataaaaattcaaacaaaataaaaacataaaagaaatttggtgaaagtgaccatcttcgaagtactcaatggctcgatacactaagtatttaaaatatattgatagactattaagatatggtgaaaatctcctgaaagggattacaggatttattataatcattatttatgtttttccacatatgcattgaaaaatcacaatttagaagacagttttggcgaagtagagaagataatatgagtcattccactaggatttttcacagtacagcaattcaccattgttcatttgttaaaaatctaaataaaaatgtattgaagtgtcatgaatcataaactatggaatcaaaaaacaaggaggacagttgacatcagctgtggcattacaatatgtattgggctttcattttcaatattcagccttcagtgtaagctcacacgcttattactgctgcacatgtccacagcttaattgcctgagtttatggcctgagtttataaatacctaaatataatttataaggttattttatttcatggctattcttttgtgatgtcatatatataacaaaaaatatatatttattatatataaagatatatttattttatatatatttatgtttacatataaatatttaatacatatataaatatatgtatttaatgcaaatataaacatatgtgttgaatacatatataaaaatatatgtattaaataaatttattttataaatatattatatataatgaatatttataatattttatatataattacatatatttatttataatatatatacataataaatatatatattttttcttcctcacttcttctggattatagtcctttacataatgtttatagtctcaaccatctaacattcaaaatattttcttaaaggtatatgatggcccaagtagcaactctcatctgctaactcagctttgtggggatgagaaaccccctcttattcgttctagtggagacagcatgtttataaaactgaggacagatgaaggtcagcaaggacgtggcttcaaggctgaataccggcagagtaagtgtgaataccggcagagtaagtgtgtatactggcagagtaagtgtgaataccagcagagtaagtgtgaatactggcagagtaagtatgtatactcgctgttcagtgcctagagtgggccttcaaattcttgaaacaaactgaaataagtgtaacgcattggtgtgagcaattgaacttcatcttagtttcttctgtgaatcgtttaactccatttgagggagaaatacgtattaaatttaatctcatataactaaaacatctggcaaactatagaaacttagaagagtatttaatatgctgagagagttgcaattcagtgaaagatcagtgtaccagactaatgactaatagcttttcatttgcctcacacattgcaatcttgcagtgtacattatattattccaatgtacatagtattctatcacactagtctctaccttaaaaagtaccttaattttattagggaaagctgtggtccatgtgagtcatgcatggaataagcatgttctttacagtagaaaaatctggccattgtacagatgccattttaaatctacttttcccagatagcaacatgatggaattaaaggaacactgagcaaaatgtcaaggggcctggggtttgttctggctcctaacccttgagaaagtcacttttctttgtggtcccatggtttcttcttttagaaaaggagattaaattagatggtctctaaacctgccttctagctctagaattaaatgctttttgaagttagttccaaaatggacattcaagaaaacaatattttcttgaatttgttatttgatagagacttttactttatcaaagtaaagtctaggttttggaaacataattctactgaatcaaaatttatccataattttacacaattatcttttcccacagaatcaaaatttatccataattttatgtaattatctgaaagtggaattaaaagtcacaaaattattaactgtatacacaatatcccttgaattaactgaaagagtaataacatttaaccttgattatgtatgaattttaagattcacattgatttatatctggggattaggctgaatcctagatagttttgaatattaagttttaatatatagctttgttcttcagaaatgtatcactagtacataaaaaggtctcctaagttctatcagagatacatctgtttgactatgtaatcatttatctaattttattactgctgtgctaatctatttctggttataatcagattgtttaagggtttcttttttttcttttcatttctgagatatttttctgtcataatttcagaatcctgaaagtgtaaatgagtgcacataagaggcaaaatcagagcaaactagtgagattatctgtaaaatttgccatgggaaattggagatttacaaatagtgtaaggtctgagtgctgagagtggcccatgtggtttactggaatgtattttcctgggccctgtgttgcccctagtcatcgaggcacgtgatgcctatctgcctaataggtgtaccttctcacagtcttctaaaacaataagattattctttaaaaatcctttatggacaaaactgtgacctaaagattttcaaacagaatgggtttaagtattctccctgctccaacaaagcaatattttgaagagccacaaatgtacacttttttaaaccaaagttataaatggtgttctacccaccttcagaaagcatatcgtagtaggaatacatctatgaatcacactttcagagacagctcattccatataatgtttatttcccgttctcttttattgcacatcatagagataatatattccttgtttaagtcattaggattggctgaactgggcacccaggattagacatacttagaggtatctggtttggttttgttgaaaactcagctcaagaaaatgccaccattggattgaagactttttttctgtaatttcacattttcctttcttctttaaatcctttctactctatctattcgcttggtacttcctgatgactaactagagggagaacggagcctttattgtgaatttcatgcagacttttgaatgttcaacaaagccatgttgttactggtttttagcattcccataggattttgggtttttaaactgttgaatttaaaagtcagaatttctgtcccttccacgtgttaacattaaaaaaacagcagcacagaacgtcgaatgcgcttctctaacaaacaaatcagactgatccctgaatataaccaagttattctgctctccacaaattcaagggaatttgatgcctattttaacatgactatttaattttcatgactctttagtttgaattcacttcagtattatttcacatttcttctaaatggaaatcctttcactatgaaaatactgcaccaaatatatatgtgtgtgtgtctctgtgtgtgtatatatacacacacatatatacacatcatatatgtgtgtgtgtacatacacagatgatttttatttattttttttaaaggaaaatctcatcttggagcacttatgaagtatataatagtggttcttaacagtcatttctttttccagcatgtgagaatgtggtaatagtcaatcaaacctatggcatcttagagagtatagggtatccgaatccttattctgaaaatcagcattgcaactggaccatccgggcaacaacaggcaacactgtgaactacacatttttagcatttgacttggaacatcacataaactgctccacagattatttagaggtatgtattataaagcttgattgatcactgctttttcagatcaagggagatgtgtcaagttagaatccatcatgctttttagaataaaatccctaactctgccccacgcatctataacacaccaaccacccatggtatttgaacaggtatatttcatatttaatgtattaaattgtgaatacagagaactatctatgtttttaggtttcagtgtaacttctggactcattgacctcatattacttaacttacatggaaggagagtaataacctctattttttgttggttgtttttatgtttgttctctgtgtataagagatcagaaaatgtttgggtatcttggatttatttaagatgtcatttttctagtatgaggtatcatggttttaattgttgtttttatttttaaatgtaagttcatttcagtatatttttatttttgtaaaattgaagtttcaattgttataatcatgaccactagtaacatttattcaactgtctgtatgcaatttcaggcaataaatcttgcttaaatattaggcaaccttgaatataaggtaatatgttatttttgcaataagaaattttaacttaaaaagctttttgataacttgcatatgtaacttttagggctacaaattgggaggttattttggcatctacgtttcatcatcagtaaaataactttttgagtcatctaaggcattatctttatttctgtctatattgttaatatataatacttcaaaaaatccacatataatgttttcactagataccctttctgaagtgataagtacttgctctgataacaggacattttttttcccacctgccctcctacctgcagcctagtgacttaaggtagttgtttttaaggtggtcagtgatttttagaagtcttacttacaaagacttcaacatccattgctggcaactctggggtcatattcccaggaaaaaatatgttattcttgtaaaatgttcttaattgtgtttttacaagttgtataggaaaactagcattggttgaggttggttgaggttaacatatattttccaaatagcacttttgtttatgaaaacaaagagtgacaacaaagcattctgcactttgagagactctgtgaggtcctaactataaggagattcccttgtttttcagagataattttttgggaaaaaattttgccttatatttacaaaagtacaatattacagaaatattagccatagtgtttacccattagaaagttttgtttaccagtattctaagaaaatatgacacaacatgaaacaaacttacaagcacgtacttggcaatggttttaaagtccaccttccttgacctggagttcaactggtcttcacaagcttaatgataccaggatggtatcattaagatactactagaataggcatccatttcttcacatggtgagaccttgtttgtgttttagaaaaagcagaaaagttgctttcaaagccctttgtttataccgtgaacacagcagttggtcatacctccttttaccagttaggactattctgattcccactggactgtgggcttctcgaaggtctgtgctgtctcctactaactttgtaacccaggcacttattatacaggtgggacattacaggagttcagtaagttcaagttgaattgaatatcacagccatattttagtatcagtctaatgataactactaatgaatgagaaagattgaattccaaactggcgtttttgtacgacctcctacacacgcagtgcaatcctacaaattggagcacaaaccaaaataggactcatgatcttgccgagcgttgcacgtataacagtgtgctgggcaccataatcgtgatttggtaaagcgtaatggagaaagccacagaaaggaggatgcttttgaattgggctttaaaggaggctttggcagaaagaggggggaggaaagagatgaaacatttccaggacctgaactccatttctttcgactcatttgaggatgaaatggcaacaaaaaggtgtttaaaaactcaaattaaaaaatgcttgttccagcaactgcagagtagctcattagagccccttatggatgacgtgtctgtcatgttatggtcatgccatttctcttgtgcaacattgacggtgaaagagcaaaaatacaaaatgagaaccagaagttcagaaaggccttccaaaaaaacggcgctgttgccagagggaggagattgttttccatctctgtgagccaagaggccagaccagagcaatagctgcaatagctggtctatgatggaaattttaacacacaaacaaccatttacagagagaaaactcacacacacagaaatctagcttccattattttaatcgcttctgggttttttcagctgacttccccaaatcccaactggatgcctgttactagagccagaatttagttattctgaattaataaaatggaaactacaaaaagacttaattacgtgctggtcagacactatcccgccttgatgagaggaatgggtttgaaaagatcccattggaaaccaaatgcatcctttattatttcaccctctgggcaaaacaaaatatttcagatctggaaataaaatatacagtgggagaagggaccatttgcttaaaggagtgagaccatttgcccgtgcaaacatggggaatcaacctgaagagttctggctgtattttacaacttgatttcagtcttccatttttattttgagtctgagtctccatgcagaaaaggagatttcaaacgagtgattgaatatagaaatggaaatgatagatttgggagaaatcaacatggagatgtataggaagcccagggtatttgttaagtcaacagggagcatgtgtgtagtgagaagaggaagtaggaacactaagaggtgattgtggctgggcacggtggctcaggcctataatctcagctactcaggaggctgaggcaggagaatcactagaacccgggaggcggagtttgcagtgagctgggatcgcaccattgcattccagcctgggtgacgaagtgagaccctgtctaaaaaaaaaaaaaaaggtgactgtgtcatgggagccaagggaagagcagtcgagagaggttgtggttcagaagggtcccttggagatcaatgtgactctggtcagagcagtgtttgtggggcgagagcaggaaccagacagtgtaaagaggtacaaagaggagagtgagtgtagactgaagtctaggtccctgaattctgaggctctctgtaacaaaccagagtaagtgatggcttcttttctccaatccttatccttcatttccctaactggtcctcatctagttcacgtgtgtgggacacactcctttgcatgttctcttgtatgtcagtgcctctttaaatgtggccccagaattggatgcaacagttcaactaaacctggctaggcccaagtaggttggaaccgtattatccagttcatatatttctggtggtctatgctgaagttaaatggggtttattgtagctaagtcatgatattggcctatatcaagatttataatctccatatcacttttacatgaattattatgaatttatgattatatgatttttaagaatctaaacagagatatttttcctaataaatcagatttgattttgtctgagaatcccaacacatcatgacctccctaaatcttcattcattgcttttcagagcattattcatttgcatacagactcattggccactgacctagtacttcttcaaaaataattgataaaaatgtcaaacaagattgcatctatttcaaatactcttaaatgataagttcttttggttaaaattgatctattattaagtgcttttggaatagcactattcaaactactaggtaataaaagctaatatttattcagcatgtattatttgccaggtaattctcacagcaaccctgtattataagaaatattatccccattcgttaggtgagaaaagtgaggcagatataggttgttcatattcagaaagattataagtgtcaaggccggctttctagcaggcactgtaactccacaccgatgctctcagccataacaccacataccccgggagcactctcacagtgtcctgtcaccctcacagggatcatggggaagtgttcctgctgcccccaagtctaccattctattgacactgccgcaaagagaaatcaatgttttgcatgactccatagataagcaggtgccatttattataatcacctctttctttgcttcatgttgacaaattatttttagtgtctaatttagaatttttccaaaaattactgttaatcttactgatctacgagattctagaatgaatctttccccatcttggaagctggaacgttttcccttcagccccctggcagccctgctggttctccttgtctgggctcgcactcttggtggtggcaccgaaacacaatctgagccacatgaagaggacaggcgcatgtgacaggctggttactttgagaaggctcacacctccccacacacaggagaggctgagaagcctggagaaggtgggaagccaagagagtgaggcagattctccactcccacttcctaaggctctgctcctgctccctgactgttcccatccattcccatccctctccccaaaggcttcctctgagtttcagcaacctcggaattttagcttcaacaacatgaccaccccagccttgaccctacaggatcatttacctcaagtgcttgcatacaaccagactttcccttggtgacaaatccccagcacagggagctcatgtgtttgagctcgacagcaaatgcatgggtctagcctgcctatggacgatactcattagggcagtgtagccaagccctctagccggtgatgttcacagattatgttctgggcagaagcagaacttgtgagcaggggcatagattccgctggaatgctaaaactttttttttttaatttaactttcaagttcagggtatgtgcactaccctgatagtagtacacataccctgaacttatttattatgtaggtaaacttgtgtcatgggtgtttgttgcacagatcatttcatcacctaggtattaagcctagttctcattatttttttggatcctctccctcctcccaccctccaccctcaggtaggccccagtgcctgctgtttccctgtcctgtgtccatgtgttctcagcacttagctcccacatataagtgagaacatgcagtacttggttttctgtttcctgcattagtttgctgaggaaaatggcctccagctccattcacattcttgcaaaggacctgatcttgctcttttttatggctgcgttgaaaacattaaccatgaactatgcacccatgaattcaccaagattacaaaatcagctctgtaatcactatacctttcagtgctgtggcatataattcccttaagcctggaaaagttcattgaaaagagttgactcttttatcttctaaactggaattccatgtctcttcttccagtttcaaaatcaaactaggcatgtttctacctcctcttcattgacatcacactctcttctgaaagcatccatgccatccgtgtttccctctttcatttgccctagtcacagccttaaaattagacattttttctaatgttcaacaatatttttctgtgccatttcccaaagtttagctagttcgtatgtgtacccataaaatggtcagaaagttccatggagcctcttggatttctgcttagattgatttctttagagggttctccttttttgcaccccccaaaattattcctgattttgtagtgagaatttagtttttcagaatttgccaattttctagaatgttctttcctttttcaattgcgttttcatttgtttattttttttttttatccataggtttatatcttgttttgaagtttgaatccccaaaaccttagtccggttaagtggtcagccatcacaggctctaagttaaggcaaggtgatcactgtctcctattgtcttggtgacttccatattaacaaccacttctttgctagccagaattagtccagagttgcacttctcttcactgtctcctttatatgaagagagcatataaagaattcaacaaatgctacattttttgggggaacaagacatctcataggtgtccagattgttgaaacagtctccccgtcgccactcctgtagatctcttttggtacattagtgtttatagatttcctttacaaaagattgcagtctctactgaaaagaagctgaggtgggaggataaagtccttataactggctaccaaatctggctgcattccagaatcatctggggatcttgttagaaaaatttattcctagtcctcatcccagacttaaccaaatccttgaggattccccaagagcaagctttgcacaagcccctggtccagcacttgagaccactgttcatagcccacttccaccaagatagcctgttttatcctcacttcaatgctctctcctggggagggaaaagtatcttaataggcatcttgttaacatacatttgcctgctattaaatgttactttccagtgaggacttactcttccattgctatggctgagttatgtattttatctcaccaaggcctggtcatacagttgatattatgtttacctcattatattaaaaatgtcagattcactttacagtttttgtattctgattctaaactttctcccccttttccttatcgggcaccttgaccactatcatcttccattaaatcatttccttattccttccccttttccactaaagtccatttcaagtcctcgtgatagtgtgggggacttcagtcaaaggcatttccctccagtctttataacatgcatttcatctcttgccaaatccttgctgatgtcatcctgttcaccccagatgcttatatcacagtttgttgcactcccgtatcctcctttcagttgcaaaataatgcattccaagaggaagaatggataaaaaacatcaccagtatccctgaatcttgcagtgtcacatccatattctccatgtctacagcctaaacaacattttccatataccacgactgagaaacatcgggctcatgggatattgtcaatacttaaagtgatgctagctgttatggagaactcatacattctcagttgcttactgcaacacaggttatttctaatcacatcagagtaaaaggcaggtgttcctggcttccatgtggtagttcatgaaaccaaaggaaggggaagtcaatttgcagaagccacataactgtctctgccacaaatgttggtagatgtttcacaaatagagacctatattctaataaatctgcgatatgccaaattaaaacacaattaagcagggtttgttgttttgttttgcgtttgctgtggtatttcctcaggctgtcactatcctaaatatgcattcttcattcctttatccatgtatccagtcagtaggatatattttagacacttaggctatggacatgtgactgttttagcatcagttttccttgtcatgatggaggaaacacaccttaatcaatttatcacacaataaaaatttaaccacaggcagcgttaagtgctgggagggacaattatagtgcacccagaaggcatgagatgggaactgagctcctttgtgggtcaggaaaggcctccctgaggatgaataacacaccaggtgccaggaggcttgagatgtgagggactggaaggagagcagtgtgaggctctcaggtggacagggacctggcctgcagagcagggtgggcacattaagagtttcagagacctcctggagagcagcaggaggtctttcaaggatgtggtcagatctgcacttttaaaacaatcactctggctaccagaataaactggagggaggtaagagtaacggtggagacccagtaaggggattgctataggccaagggagagagaactccaggtcttcaccattgctggggaggaagcatgagatcgaatgatttcagagcacttaggaggtacaattgacagagatggataacaacaggatgaaggaaagggagacatcagaatatagcctgatagatagaactggacgcagggaaaaccaccaggggagattagtcccaaagagattatccttgcccagaagtctgattaatgaacatctattggacatttgtattccatagaacattctgaggaaaacattattctagagatattttccaagtttatttcattttcccctcatacaaacaagcaaactttgaagttcatgaggcattagagagttattcgcatctcagatgttattttgagaattacagtaatatttgtcattaatggaatgcccatcatgtgctagacactactaccaatactttgatagatataattgtctgtcctcatagtagtccagtaactgagtataagtatgctcacaggagaacagggattgagatggggaaccatactcagtgcaggaagtgtcatcactacatgaagtgatgaaactacgttcacactcagtgctgcacgaatacagtgtgggctctggagtccacctggctccaaagctctttaccagctgtgatcttgggcaaggaatttaacgtctggctgctttggttctctcgtgtgtaaaatgaagataataatccacacacctggaaaatattgagtcctcaggaaatgcttattactcccctccacgccccttctggagagagcccagctcctgcctggtcattcagcttcttcctgggacacttcaggaaatggtttctcacccttacaccagctgacctccatctcttgcaaatgccatctccattccttgtgccctgccagttaggagcagtggctcctccctggcgaggtctatcttcctctccaggcagagttcacattttgttttctttctcttccgagttccctaactcgatccatggacttctccataagggctttgctttctctctgtgctctccgaatctgtttaaaggcaaatttcttctgtccttggaaagaccttgcatccgctctaataagtgaagcgtaaatcagtgtttgtgtttgcagtgcacgtcactgctggtcacatgatggcataacagattccaaacaggtgccaaggatgattcttcaatttccaaattgcttggtttaaaggtaaacgccagtctttagctccctattgaaaacagctccaggcactgtgctttctattgttctagaggggagtcactggaattagaactgcctcagccagcactcttctatctggtgactaccatgggatgctaatgacaaagatgtagtaagtcctctagcactcgttcgcaagagaatgtcttctaggcacccagacatatgatagaatgtgctgaattggtagtctctgtacctgcttcagagtgaagcaggtaacttcagaatgaagtttaaacccaaactccactacttagtagctaggtgaccttgggcaagttccttagtgtctatgtgcctcactttccctttctgtaaaacggagtaataagagtcaatgaatccatatatgtaaagagccaaaacaaggtctggcaaatagagaacaaatctataaatgttcactgttattatttgcactgatgctgatgtaagagaaacatctcagtaaggtatagagaaattcacaaatagagagccttcaattctttaggttgagatataattaatgattcatttctcaagacatttaattttcctcttgttttctgcctgcagcctgcatggttaatgcattttgacacttctcactaaggataaatgacaaatgataaaaccaacaatttttgtccacttattttactcaaagctccgttaagaaaaataatgaaaaaaattttaatttcagtgactaacaggagtgttcgtattgtccctatcattttaaaaattgttttggttactctctattattacagagaataaagactttctgtatcctggagtttaacaactcttattttattttattttatttttgagacagagtcttactctgtcgcccgggctggagtgcagtggcgtaatcttggctcactgcaacctgtgcctcccgggttccaatgattctcctgcctcagcctcccgagtagctggggccacaggcacccaccaccacacctggctaatttttgtatttttagtagaaatggggtttcaccatgttggtcaggctggtctcgaactgccgacctcaggtgatccacacacctcggcttcccaaagtgcagggattacaggcatgagccaccacgcccgaccaacaatgcttattcttaagaaaagaactgccacagaaggaaataggaaaaattcttcttcagtagttgatgcctttcaaaatattaaattactaaacctctacctacctcagtttccagaactctaaaatgaagataacaatactacctgcattacagagctgctaggatttttaaattagaataatgaccagcatggaataagtgctaatacatattatctatggttattttaacataaacatagtctcatggattatttttttgtgctctgaagcaggagaccccaatctttttggcaccagggactgtttttgtggaagacagtttttccacggaccgggggtggggtgggagggtggtttcaggatgattcaagtgcattgtatttattgtgcattttatttccattagtcttacattgtaatatatagtgaaataattatacaagtcaccatcatgtagaatcagtgggagccctgagcttggtttcctgcattagacagtaccactggggggtgatgggaaacaatgacagattatcaggcattcgattctcataaggagcacgcaacctagatccctcgcgtgtgcagttcacaatagggttcatgctcctatgagagtttgatgccaccagtactggtctggggactggggctcttgctctatagcattttgtggtaaataaatctgtggtttccagagcagccttcccagttgtaattaacatcaattggccccactgtgttgaaagcagtgctgcttctcctgcctcccagttttcctacaaaagccactgggattgtagataaaatcctgttttccagttggcgagatgcagagaagcagatgagattttgtctgagcagcggtggatctgagccgactttgattatggctccaccgccaacgcttcctgggcagatgagtcatgcttcctggaactgtctgtcagaggaagtttgcttctgggacttttgcattttgcttagagcttagagataagctattacaattctaagttcagctgctattcaaaaacatgcataaaagctgggaagagtttaccaaacatttcaatttataacttgataccagatatgagtctagcaccgtactaagcatgatacctggattcaaaaaaagtttagaatgaagtatatccattagttagcgaagccagatgctttgtagtgtcgttgagtttagcatgaggcattttagaagaaattttggttttaagattgcctgagtaaaatgtgattttttagttataaaaaattgaaagaagaaatgttatttcagtgtgatcagaatccctttccttaaaaagaaatgctgatcttttctgaccatctttcacaatgaaggattttcgtatgattgcattaatttgcagcagttaatgaaccaacgttccaaccttcaaaagagcctctgctctcagattcaaaagaaactctgcgtgtttcctctcttcaaacatgaaggacagaattaggatgaataataatcaaacctaaaataatttctgaactaccctgaagcagtaaaaattccattagatgctcagaacttgaattgtcctatgcacactgcctttcctggttgacctcaggttgctctgctcctcagactggcgaaaggcagggcaaccgaaaggtctcttccactatcagacaggctcatggtatgaataagcatgcattgagcaaaatgctaaattttaaacactggtaatcacagttgtgggtttcagttaactatattgactttctactttttaaaatgggaaagatttccaattgcaacattacagaattttgtttaaacacgtctttaccctgcagttcctacattggctctttatttatttatttattattttttctttctttctttctttttttttttgagacagagtctcactctgttgcccaggcttgagtgcagtgttgcattctcagttcactgcaacctccgcctcccagattcaagtcattctcctccctcagcctcctgagtagctgggattacatgcgcccaccaccacgcctggcgaatttttgtatttttagtagagacagggtttcgccttgatggccagtgtggtctcgggctcctggcctcacgtgatccacccacttcggcctcccaaagtgctgggattacaggcgtgaaccatcgcacccggcaggctctttatttaatagactttcttttcctgatctcactgtcttcagggagagcccggatggcagtcctctggcttcttccagctcaaaggtctatgatttcacgttgttctatgaaccaggttcttctctgttcctgagaccatctgcagcaggtggtgagaattttaagaggcataataataataataataataataataataataataaatgtttagtgttttactgtagcaggataattggcagagggaaggctgaggtttatggaattaaattttcatgtatacacaggagagtatgcttagctttcaaagcatttcacttaccactagggagggatttaggagcccttgctccatcagtgactatcgaaacatatgtttacatgaaaccgtcagtccctgaacatctgaagacattattatttttaaaatttttaatttttgtgggtaattaataggtgtatatattatggggtacatggtgtgttttgatacaggcgtgcaatgtgtgatagtcacatcatgggaataaagaaataattttttgtaaataattagcctaattaataataaaaatctagttatgataaaaggaagcattataggcaaaatatgattttaaattaatgctggagcagattaccttacatggtaacatttcagtggattaatttttacatataaccttgagatacttaagaaaagattatggagatagacaatttaatatttttagtaggccaggtgtttatttgacagtctaaaagggtatgaaattctgagattggagaagcattactaatgcatatctctactgccatgtcaataggtccccaaagatattgctttaaaaataaatttatcagatcacaaaggaatttatagtcattataggaaattgggaaaatgtagaaaaagctagattaaaaaatcctaaagtatatcattattactaatatttggtggtattgatttcctgtcatcgctccttgtatatttattttattttaatattcgaaggagattattcagtacatactaacccataatgacttttttcacctaacaatagcttgtgactatttccccatgttatttattatgtcattttcaacattgctcatcccatcatcacaatacagccaccaattcctgttgtgaaacacttagaatcttttcaaatcttcaccattagaaacagttctgagataagtatctttgtagttaaatgttttcccacacccatgattggacaatgatttaaaaaataaaaagactcaaattgtggcttctaataggagtaatatatagaaagcagaataaaaatgtaaattctagtaagagcagacagcaactagccaccacatagaaaggaaacgctggtttttatatgagacagacctgtaactcagggtgacaccaagtaactcaaaatgtggtatttcgatgggttttttgctctcatgcaaagcccaacattatgagtaattgttacttttagatgatatttcatatttcctgccccaccctgtcagcacatggcaaggcggctttttctgtgcctatgtcagggagcatgctatgagtggccatgtgccttatggaggggacttagcctcccaagggccatcttggagtcggctgggatcaaccatgctctgcttatcagccttcctctacatttgcctcatttatccaccatgatttgattttgcatttgcccccttgggctttgcttatccacaatggaagcgctgtatctcctctgtgattcttattatttatttatttatttttttttttgagagaatcttgctctgtttcccaggctggagtgcagtggtgcgatctcggctcactgcaagctccacctcctggggttcaagtgattctcctgcctcagtcttccaagtagctgggactacaggcgtacgccaccacacccggctaattttttatatttttagtagagacagggttttgccatgttgcccaggctggtcttgaactcctggcctcaagtgatcacccgcttcggcttccctaagggctgggattacaggcgtgagccaccacaaccagcctctgtgattcttgctttgcaatttctactgttgttacaggaacatttcaaagcccttcaaatttaaagtaacctgaacttggataaagttccaagtttttccaggagatgtgagtgcaaacctcagcaacaacatttttaacaatcaccctaatgaggcctctccacagatcctgctgtggtggttgtttggggtggggaacatctgagcagatgccctgagaattccctaggtcccatccttctggatctccagtgattcagcagcaggaactacagggctgggtaggacccaaaggggaagggaggctgcaacaggaagagatgctgctcacttttagcatgagagccactttgcttgccagtggactctatccacctcaccgtggcagccttaacagcctctggtttcctaactctctttgctgctgtcccctgcatgatctgtcctcccgcaatcccttccacacacacagcatgcttatctccaccccacacaggatgattcgccttggtttctgcatggctgtccgggatgcctcagtctccacaatgcccaagttgtcatagcaacacactgcgaggattggcctccacctcctcactgaattcatcacttccccatctgccctaccagtgacgatttctgtgaactcttttatgtgagtcagctcctgttctctaatccccaacatctttcttttctcatagctattttgggtggtttctctggaaaaaaatgttgattccctttgcctctgacaaagagttagagtaacaatttgagcacattccacatgccaggcctcatagcaaaccttttacgtggtttatctcatttgctgttggcaacaatattatgagataagtaccattatggtgccagatttatagataaagacattttagcttgaagaagttcaataattttcacaaaattgtgttctctaaattttagagctgggctatgaacacagagcctggctctggccacattgacattagtcaagtacattctacaataaaattgctttcctgcttgtgattgaaatataatcttctattagtgacactcacttcaaaatgccactctataaactgattgagtatagttctcaaaaattgaacgatcatcttttcattgagtagaatttttattctatagaaagaataggggattctctactacacccaaaatttctcctcacagcagatgaattatttcaattacatattaagctctaaagaatagaggttttatggaatttgcaaagatttataattggaaatggaccaaattattctccagaagtttctccatgttttaatgatatcatcctaaagaaactcttgagttgctttttctacatgaactatatttaattaattcttaaaattgatctcctataaaaaagaattttcttccagaagaccttccaggaaataaaagaaacaacatttacaaacagtatgaattagatgtcaatctaaaacagaaagggctgagttttaattgtcactcactgtgattctaaaatgagtttggggctgggcatggtggctcgcacttgtaatctcagctctttgggaagccgaggtgggcagattgcttgagcccaggagttcgagaccagcctgggcaacatggcgaaactctgtctctacaaaaaatacaaaaaaagtagctgggcatggtactgcatgcctgtagtttcagccatcaggaggcttaggcaggaggattgcttgagcctgggagggtgaggctacagttaaccttattgcaccactgcactccagcctgtgcaacagagcaagatcctgtctcaaacaaacaaaaaaatagttaagaaaaaaagttaatctctacatcccaagctcatatatataagataattacttgtaattttaatttattacagttttaaatttttagccatgaaacaatttagcaagcaaggcacttgaaagacatatttttgttcttggagatcctgcagttcataaagttgatttctactgaggggacaggtggggtgtctgggtctctgctcacttagaacttgactttcagtgactcctaagtaccctcaatcttacaaaaaaattggatctctatcagtgattgaccacacgtggtgtctttagtgttatatcctcccctttgttatgggtccttcctatttagaagtccacggatcacttcctattgcaactggagtctgaattcactaatggtattgtaaagtatgtgccaaattatcaaacccgcacaaaggaagtagaaactggtaagtatggctaaggcaagagatttccttcctctctgagtgtgtcaagaggagttgagatatttgggggtagggtgggggtggggggacctaagccacgaaaatcctaaatgaataatctctttaagagaataacaaaagatttcacagaggaaggttttgtaatatacacatctccgcatctgaagatatatttaatggccaatttgaaaatgtaagcattattttagtaatttagaaaaatacccctaaacacagttatagaaattagatctgcatattcaaggtgagaatcgcaatctttcttagtttttactagtttcctttctgtaactcaattagaacttcaagtattgttcactctgagtagatcttcaggctctctaaaagcagggccactccagcttgcttgtcagtagttgcaatgagtcacagctggaacgtcctgtggttaacattctgctctgaaaacagaatcagaatcagtgagacggctttccatggtaacctgtatttgtatactttgaaaaatgactgttcctttttgtgtggttttgggtggtcaatttgcgcgggaatgaattgtagaggtgacgttacccatctgtgtgaatataaacaaaaaacctgattttattaacggcaaactttaaaaaacgaggtatgagtttttttttttttccttttcgagacattgttctacacatttattactagattggacattatatttaagcattttcataaatgtctatttgatgcttattttaatgcataattttctccccccaaaggcaaaaagaaactaattgtcattcatcagtgttgccccccaaacctactgcctagcccctccacccccacccagtacttttacaatgtgttattaaagaccactgaacagctgagatccaggggtctccttcaatgcgtaatcccatccagaaggaaggaaaaaaaagaaatctctttaagtcacgtgaaaatgccacatttcttaatcttgcagagctgacaggcaaaaatgctatgctgttcatgaccttgtgcaggattgaaatataattccgcaacatgctgcgacctagtattccgtaagacacatcgagcttagggtgattatagttatggagaaatcttacctatgttttgttggataagggttatgatgacttagcctgggctcagaggcctgacagaaatgaaataatttatgctttggtcactaaattacaatccaaaggttaagatttggggagtgaaagatggtagagcatttgcttgctaattactccactacttgggagcagtatgtttgtttctgtgctaattagtttagaactgtacttcatgccctagaattaagaaaaactctaaagctgagatgaatctcctgcagggaagcagggatttagaagcacaggctgcaaggttggcctctcgccctccggtttctccgcctgcaggagagggtgggactgaacgctaaggtgaaaagcttctgttccgtttcgtttccctcttcattttctgttgctttattcttctcttattctcccctattcattataggggaggcttctgataaatgtgtagaatattagaaacttgataataaatatacacattcaaagcagcagtacgaaaaacagaaaaaaaggaagctacagcagtaagcctgaaaaataaaactcatctttattcatttgcttaaaatgcttaggtttagtgctttggggtgaatgacataataggcttctgagcttgtctttttaaaaatatctgctgaccttccctgaaatctcacaagcacttatgatgagcagccgatttgagaactcagcgagacaggccaaggtttaaaaatctgcgatttatcataaccttaaacaaggccctcacctggttctcccttctacggagtggcacaaagggtccaaatcctttatggtctaagaggagcctgttgaaattgaggattgtatggcactactacctatctaactgtacagagtgcaaataatcgtgcagattgggtcctaagtaaaataaatacagctggcgggggaaatcactgcgttcattcattggagatgcatggggaacctgcctttatcaaagccctgctctgggcagtgaggggaaggccagaggtggtctgtgctttaaggcgactcacaatcagtaggggaggtaagacacacaagcccataacaagaatgcctggggatgtgatcatttccacaaaagaagcacagatgaaaagcaagggctttcaaaggcagactaatttatgcctgactgcagggattaggggcggctccatggaggtgctttgtaacatttggtggtaaagttctccacactcaaatcaatatgtttcaaacaatatttcatgtcataacattttttttcaatgaaaataatttgatcagtctggaattcattgaatccagattatacatttatgcacggacacgtgcaaacacacagacactcacacatactcttaagtagatgtactctccaagggcatcctcgaggaaatccatgagtccattaccaggtattttatgtttcgttgtcatgggcagcttatcccaagggtaactggaacaaagtgtttaaagggaacatgaaggcgattaggtgaaaatgtaatggccttagtcctgaggaagccagtcttgttggattgccattatctttctcaagtgaagagatatagtagagagatttttgtgttttttaatttttatttttcagtttggagatatacagctgataaaatcattaaatgaggtaggttaaggggacacaaccttgcaccctccatttctccttgaagatgtataaatacctcaatggaaaaatggacgaagacatcagtaaacaatttacaagagaagaaatctaaatgcccctaaacatgaaaaaaaaaatccttcaatgtcaaagtaattaaaataacacaagttaagacaattacaaaaaggcagtttttcactgtcagtactagtttaaaacatgatcgtcatcataattgacaaagctccactgaaagaaacacctctgttaactgcttgtgggaggataggttggtataaactttctggtaagaaatttaataatattttataaagagccatatgattatactgtttgttattccctttctaggaatcttttaaaagaaacatttgaagtatcaaacagctatttatatcagcaaaagattggaaatatcttaaatgaaacaacaatagaattataatataaatacattatatttgtggcattttacaccaaggtttacacaattaagtgatatgttcaatgaaaaacaagaaacacaattaaatacatagctcaaatgtataaacacatatatacacctgcacaaataggtatattacacatatatacaaatgaaaaaagtatcaagagaaatttttggatttaatgaaatattaacagtgtttgtctttagtcgaatcaatatttgtattttcctttttcatatatttctaaaatgtctgattattttacaggtagcatttattttaaaaattacctcttgaagggatggctaccccattttctatgatgtgattattatacattgcatgcctgtgtcaaagtatctcatgtaccctataaatatatacacctactatgtacccataaacatttaaaaatatttttaaattatatcttacaattataatagctgctattcattgagcccccctatgtgttgttaatatgtgaatgcctactatttccgtattctgagcctgaattatactttggacttgctaggttgacataaaaccaaaagttactagttgggtttccaaatttattgggcttaggaatcagatccatctctaataccctctctatgcaattatcaatttttaattcttatgttgagttctgtgtactcaacccacctcagcagatttacctctaacttttgaaccaaggaacagcttttgctacttgtgtagacttggatttttccatcccacaaaccatgtgtttttatatgggaaagtttctcttcaatttcagctctatgatggaccacggcagatgggacgctactgtggagtagacctgccccctccagggagtactacaagctccaagcttcaagtgctgctccttacagatggggttggccgccgtgagaaaggatttcagatgcagtggtttgtttacggtaagccaggtgctgatctcagttgtatttgcagttgctatttggccaagaattttttctttttcagttccaaacttagaaacaataccatgaacaaataatggaacccaggtagtaatctcatgcaagggtttaagaaatatacttagatattggtggaacttggagagttaagtctgttaggattaagagaggaagtgacatcaaagtggaaagaatttggttaattgtaggtgtagtaataaattgccttagataaagaaagaagcagaatgaagtttctagggatgaagagttgaacctgggtatagcaagctaactgcaagttggggtgggagtatctcaggtgcaatggaatagaatgagacttaaggctcaccttgacgttaagcagagaaagggtagggatagactagaaagaatgaaagtcagacagggatggggaaaaggaaggggtagggttggcctgagaggaggagaatttgagctgcgatgcacaaagccaggggcatgtgttgtacttgtcaaacaggaaggggcacatctggatcccacctacgaattggtggttcaggaagcaggtagggatcatcattcctctgaagatgaaaggtcttctttaacaagagatctgaaatgtcttcaaatctcaggtgggccaatctgcaagtggagagccccagagcagtggttcccaaaatgtggtccctagagagcagcgtcagcattacctggaacctgttagaaattcaaattcttgggccccatcccaggcctacagaatcacaaactttgaagtggagcccagtaatctgtgtcttaactggtctccctggtgattaaagtttggaaactactgagaggtgaagccggctgagcttctgggtcaggtggggacttggagaacttttctgtctagctaaaggtttgtaaatgcaccaatcagcgctctgtgtctagctaaaggtttgtaaatgcaccaatcagcactctgtaaaaacccaccaatcagcgctctgtgtctagctaaaggtttgtaaatgtaccaatcagcggtctgtaaaaacggaccaatcagtgctctgtaaaatgtatgaatcagtgctctgtaaaatggaccaatcagtgctctgtaaaatggaccaatcagcaggacgtgggcagggccaaataagggaataaaagctggccaccctagccagcagcggcaacccactcgggtccccttccacactgtggaagctttgttctttcactcttcacaatgaatcttgctgctgctcactctttgggtccacactaccttaatgagctgtagcactcactgcgaaggtctgcggcttcattcctgaagtcagcgagaccatgaacccaccggaaggaaaaaactgtggacgcatctgaacatctgaacaaacaaaatccggacacaccatctttaagaactataacactcaccacgagggtccgcagcttcattcttgaagtcagcgagaccaagaacccactggaaggaataaattccggacacattttggtgacccagatgggacaatcaccaagcggtgagtaccactggacccctttcgcttgctattctgtcctatttttccttagaatttgggggctatataccgggcacctcttggccagttaaaagtgactagcatggccgccagactaaagacacgggtgtcaggctttctgggaaacggctctctaacaacccccaactcttcggagttgggagcgttggttggcctggaaccagcttccgcttttcctgtacttctgggctgagctgagggttgacagagaggaaagccattcagctctggggtcccaacaacaagttggttggccctgcagccatgagtaaaactctcaaagtcatgtcacccaagcaagacttgcccatctatcctatctatcctgacccttgcctcctgggtcctaatgcctgtcagacaaatttcctctcgcctctcttctctgaggctagtcccgcttctaaaaaccactccctgtctctgttgcttttctaggttctcctgtaagaatgatttctaatataaactccaggactctgttaccttctttaggcacctgggttcaccaatcagaaagacataatctttgcccaaagccccattgtagggggtactatctggaattttaggatccctcctcagacaagcaggcctatcaatagctattcctgaagctaggatatgggtagcatcagaaattgtatccttcctattcatataagtgaggacaaaaggcatcactcttccaactctggagatcccttcccttcctcaggatatggccctctgcttcatttttggggcataacacctttatacgatgcgggtaaggtcccagtactaacaagagaatgcttaggactctaacaggttttcaagaatgtgtcagtaagggccactaaatccaatttttcttggtcctccttgtggtctaggaggacaggcaagggtgcaggttttggagaatacattgataagggccactaaatctgaccttcctcagtcctccttgtggtctaggaggaaaactagtgtttctgctgctgcgttggtgagtgcaactattctgatcagcagggtccagggactgttgcgggttcttgggcagagggagaaacaaaacaaaccaaaagcacgggcagttttgtctttcagatgggaaacactcaggcatcaacaggctcacccttgaaatgtgtcctaagccattgggaccaatttgacccgcaaaccctgaaaaagaggtggctcatttttttctgcactatggcctggccccaatattctctctctgatggggataaatggccacctgagggaagtataaattacaatactatcctgcagcttggccttttctgtaagagggaaggcaaatggagtgaaataccttatgtccaagctttcttttcattgaaggtgaatacacaactatgcaaagcttgcaatttacatcccacaggaggacctttcagcttacccccatatcctagcctccctatagctccgctccctattaatgataagcctcctctaatctcccccacccagaaggaaataagcaaagaaatctccaagggaccacaaaaacccccgggatattggttatgtacccttcaagctgtaggggaaggagaatttggcccaacccaggtacatgtccccttctccctctctgatttaaagcagatcaacgcagacctggggaagttttcagatgatcctgataggtacatagatgtcctacagggtctagggcaaacctttgatctcacttgaagagatatcttgctattgttagatcaaaccctggcctttaatgaaaagaatgtggctttagctgcagcccaagagtttggagatacctggtgtcttagtgaagtaaatgataggatgacagctgaagaaagggacaaattctctactggtcaaaaagccttccccagtatggatccccactgggacctcgactcagattatggggactggagttgtaaacatccaatgacctgtgctctagaaggactaaggagaattaggaaaaagcccatgaattattcaatgatgtccaccataactcagggaaaggaagaaaatccttctgccttcctcaagtggctatgggaggccttaagaaaatatactcccctgtcacctgactcactcgagggtcaattgatcctaaaagataagtttattacccaatcagctgcagatatcaggagagggctccagaagcgagccctgggtcctgaacaaaatctggaggcattattaaacctggtaacctcggtgttctataatagggatcaagaggaacagacccaaaaggaaaagtgagatcagagaaaggccacagccttagtcatggtcctcagacaaacaaaccttggtggttcagaaaggacaaaaaatggagcaggccaatcacctgggagggcttgttatcagtgtggtttacaaggacactttaaaaaagattgtccagtgagaaacaagccgccccctcgtccatgtccactatgctgaggcaatcactggaaggtgcactgcccctgagtgcagtggttctctgggcaagaagtccccaaccagatgatccaacaacaggactgagggtgcccagggcaagtgccagctcatgttatgacccttattgagccccggttacatttaaccattgagggccaggaaattgacttcctcctggacactggcatggccttctcagtgttaatctcttgtcctggatgactgtcctcaaggttttaccatccaaggaatcctgggacatcctgtaaccaggtatttctcctacctcctcagttgtaattgggagactttgctcttttcacatgccttcttgttatgcctgaaagtcccacacccttattagggaggaatatattagccaaagctggagctattatctacatgaatatggggaacaatttacccatttgttttcccctacttgaggagggaatcaaccctggagtctggacactggaaggacaatttggaagggtaaaaaatgcccacccagtccaaatcaggctaaaagaccccaccacttttccttatcaaaggcaatatccctcaaggcctgaagctcataaaggattacaggatattgttaaacatttaaaagctcaaggcttagtaaggaaatgcagcagtccctgcaacaccccaattctaggagtacaataatcaaaaggtcattggagactagtgcaggatcttggactcatcaatgaggtggtggttcctctatgtccagttgtactgaacccctgtaccctgctctctcaaatgccaagggaggcagattggtttgctgttctggacctcaaggatgccttcttctgtattctcctgcactctgactcccagtttctctttgcctttgaggataccacagaccacacgtcccaacttacatggatagttgtgccccaagggtttagggatagccttcatctgtttgctcaggcactggcccaagatctaggtaacttctcaagtccaggcactctggtccttcaatatgtggatgatttacttttggctacctgtttggaagcctcatcccagcaggcgactctagatctcttgaaatttctagctaatcaagggtacaaggcatctaggtcgaagacccagctttgcctacagcaggccaaatatctaggcctaatcttagccagagggaccagggccctcagcaaggaacgaaagcagcctacactggattatgctcaccctaagacattaaaacagttgtgggggttccttggaatcatcggcttttgctgactgtggatccccagatacaaggagatagccaggcccctctatactctaatcaaggagacccagagggcaaatactcatctagtagaatgggaaccaggggcagaaacagccttcaaaaccttaaagcagaccctagtaaaagctccagctttaagctttcccacaggacaaaacttttctttatacatcacagagagagcaggaatagctcttggggtccttagactcatgggacaaccccacaaccagtggcatacctaagtaagaaaattgatatagtagcaatagtcagaggctatcaaaataatacaaggaaaggatctcactgtctggactactcatgatgtaaatggcatactaggtgccaaaggaagtttatggctatcagacaaccgcctacttagataccaggtgctactccttgagggaccagtgcttcagatacgtacatgcacggccctcaaccctgccacttttctcccagaggatggggaaccaattgagcatgactgccaacaaattatagtccagatttatgcagcctgagatgatcttttacaagtccccttagctaatcctgaccttaacctatatactgatgaaagttcatttgtggaaaatgggatacaaaaggcaggttgtgccatagttagtgatgtaaccatactgaagtaagcctcttcccccagggaccagcaactagttagcagaactagtggcacttactcgagccttagaactgggaaagggaaaaagaataaatgtgtatacagatagcaagtatgcttatctaatcctacatgcccgtgctgcaatatggaaagaaagggagttcctaacctctgggggatcccctattaaataccacaaggaaatcatggagttattgcactcagtgccaaaacccaaggaggtggcagtcttacactgctgaagccatcaaaaaggggaaggagagaggagaacagcagcataagtggctggcagaggcagggaaagaccagcagaaaggaaagaaagagacagaaagtcagacagagagacagagagaggaagagagagacaaagagggagtcagagagaaagagaaagaaagagaaggagacagagagatagaaagtcagagagtgagagagaagaagagacagagagacagagagagaaagagaaagataggaagtcaaaagaaggagacaggaagagacagagagaaagtcagagagagagagaggaagagacagacaaagtcagagaaggaaagagaggaagagacaaaggagtcaaagagagagaaagggatagaagtagtaaagaaaaaacagtgtaccctattcctttaaaagccagggtaaatttaaaacctataatagataattgaaggtcttctctgtaactctgtaacactccaataccaccttgttgtcagtgtaaacaagggcataacctgaaagcactgaggccactgacaacccatagcattcctatcaaacatccttaacccagcaagtttcctaacaggggatctaaatcttaattaccatacaaaggtcccaccagacataggaggagctcccttcaggacaggatatagatggttcctcccaggtgattaaggaaaaagacacaatgggtattcaggaaactcttatggaagcagagttaggaaaattgcccaataattggtctgctcaaatgtgcaagttgttttcactcagccaaatcttaaagtacttacagaatcaggaaggagccatctataccaattctaagttaatatggatggaatgaggttttattaatagcaaagaaaaattaaaatcccaaacttacaaggttttctactaacgtagagtttgctaaaagttaacagtgtaacatgcattatcctactaccacacactctcaaagcatttctcagacagtttgcaagaaataacaaaatctgtccagtaaggatagtaactacaatcccaaatagactcttcggcagcagtgactctccaaaactgctgaggcctagaccctcctcactgctgagaaaggaggactttgcaccttctttgggaaagagtgttgcttttacactaaccagtcagggatagtacgagatgccacgcagcatttacaggaaaaagcttctgatatcagacaatgcctttcaaactcttataccaacctctggagttgggcaatatggcttctcccctttctaggtcccatggcagccatcttgctattacttgccttcgggccctgtatttttaacctccttgtcaaatttgtttcctctagaatcaaggccatcaggctacagatggtcttacaaatggaaccccaaatgagctcaactaacaacttctatcaaggacccctggaccgacccactggccctttcattagcctaaagagttcccctctggaggacactacaacttcagggccccttctttgcccctatccagcgggaagtagctagagtggtcatcacccaattcccagcagcagttggggtgtcctgtttagaggggggattaagaggtgaagccagctgagcttctgggtcaggtggggacttggagaacttttctgtctagctaaaggtttgtaaatgcaccaatcagcgctctgtgtctagctaaaggtttgtaaatgcaccaatcagcactttgtaaaaacacaccaatctgcgctctgtgtctaactaaaggtttgtaaacgcaccgatcagcactctgtaaaaatggaccaatctgcgctctgtaaaatggaccaatcagtgctctgtaaaatggaccaatcagcaggacgtgggcagggccaaataagggaataaaagctggccacccgagctagcagcggcaacctgctcgggtccccttccacgctgtggaagctttgttctctcactcttcacaataaatcttgctgctgctcactctgggttcacactacctttatgagctgtaacactcactgtgaaggtttgcggcttcattcctgaagtcagcaagaccacgaacccaccgggaggaacaaataactccgcactacctttaagggccgtaacactcatggtgaaggtctgcagcttcactcctaaagtcagcgagaccacgaacccactggaaggacgaaactgcggacacatctgaacatctgaacaaactctggacacaccatctttaagaactgtaacactcactgtgagggtccgtggcttcattcttgaaatcagcgagaccaagaacccaccagaaggaataaattccagacacactactgtcttagagtgatctagccctggaacatgtagtgcttgtgggtctcatagcagtagttctcaaccatgatgctagagctcattggtgtatttcaatcaactggaaagagaagtggagttccaagattataccaggaaccaagcatagacatctaagctgtggccctgctgtcaaaatcagggctgagctctagctgagcacacatgaatgtgtgcagtggttgactcttaacattgttcacattctggtgcactcattataggaatgtcagagctacttataactgaatagccctattatacacttaggagtgctaggcgttctgagattataaactgggctctgagtgtatgtctgttaaaatatgtatggggctttcagtatttaaaaatagtcagtggtcatccacagagctacttgcagcttgaaacgtacattaggaattcccaaagtaaatgagttgtgataactaagcttgtagaagttctggaccttcctcttcatcaagtgagtagatatttatatatttatttatttatttatcaagataggatcttgctctgtcatccaaactggagtgcagtgtcctggtcatagctcactggagccttgagctctgaggcttaagtgattctctcacttcagcctcttgagtagctgagactacaggtgtgtaccactgcacctggcatttttttttttttagtagagttgaggtcttgctatgttgcccagtctgatcttgaacttctgagctcaagcagtcctcctgccttggcctcccaaagtgatgggattacaggtgtgagccactgcacctggcccaagtgggtagattcaacctaagtcaactcatggatccgttaaatgcagggattggattgattcatctctataatacagatgatctgtagtattccgtgattctgaaacacatgattctaactagagacagtgtgaaaagagacagaaaggtcaggagaatcctgggaaatggcccagaatttcaagggctggggcattctccagagcatacgtgctacccagatgctcctgtgcacatgaaccctggggatcttgttggatagaggatggggtctggggcaaggcccgtgaatctgcatttctaacaagctcccgggtaatgctgctggtgctgctctatggaccgctctgaggaacaaggtgagagcaagtgttgagactggagaaatgagatggtagaaagacagtatccctagagactggagaatccttctgagatgttgaaagggcacattgtactgtttgttttaatgacagtaggataatagcaagatctaaagcagagagaactttcccccagggacagaagtgtagaaggtaagaaatgttaaccaggaagcctgggctcagggccctggagagtgttctcagtcctagatgcaccattggaattgcctgggagttttaaaaagtgcccatgcctgggttccaatatccagagacaggattcagttggtctgcagtggggccctgactattgctaatttctaaatgctccttaagtgattcatccgtacagtcaggatggagagtttgggagggcagtgattttgctgattactttctcctaagtggctgcttcctctcccctccaggctgttctagccttactagcccaaggccactctaaggagcttgattgaacggtcatggcaggctgtgcccagattactgtatcaatgggctcttccagccaatgtgctgaatattctggtgaaatctctgagttttatgttgggaacatttttttctaccagttctacttggaatctgtcttcctttgggagagtcaaaggcaccctctgtctattctgctttcctgtttactatttcaaaactttctcccagttgctggaaacttggagccagagttatgcaacaaaatgttgccagctgggaccagaaccgaaatataaaattgttttttaactctgtgctgctcacaatatgtaaattatacttgggaggaaacttctggaaaggaatttttagtcatttagatctgtgcaaaattgactatcatattctacaggtatgcaatgccacaggtacacagagttcaatactctgcatctgaagtaggtctttagtttgagataacctgagaaggggagcccacagagagggcgagctcttccatgggagaggtcccgccatttttgatccattggagttaaatgcaagacgtaaatcatgatgtatcattcacgcatttgttcattccacagacactaaggatgtcttttgtgccaggtactgtgctgagacgggggacacagagtgactcagaccagcaggcctggtttctactctacagagctaggctaggtgggagaagcagacatcacgcaaaaacacacttaaataaatagaaaatcaaaaccatgagtagtgccaagcgggcacacacagggcatctgacttgggcccagcaggaggtcagggatgatctccacgcaaatgagacctctgaaccaaaacctaaaaaataagcaggagttaactaggcaagcaggataaggaaaaggattccaggtagaagaaagaccctgtgataggagggagtggggagagcccgagggacctgagaagtcaagaggatggaactgagtcgaagagaaacagcgctgccaaggtggctgcagagctaagcacataatgtggctaagcgcgcacacacacacacacacacacacacacacacacacgagcagggattctgcagccatggggccaaaataaatttaaaaattactctcaatgctcaagacacacacacacaccacacacacacacacacacggggagggactctacagccacaggactaaataaatgtaaaaattactctcagtgctcaagagacacaccacacacacacacacacacacacacacaccacacacgggcagggactctacagccatggggctaaataaatgtaaaaattactctcaatgctcaagtgtaattgtaattttttttttgagacgaggtgtcattctatttcccaggctagagtgcagtggcgcaatctcagctcactgcagcctcagccttttgataaggtgatcctcccacctcatcctcttgagtagctgggactacaggggtgcaccacttcacccagttaacttttgtattttttgtagagatagggtttctctgttttccaggctggtctcaaactcctgagctaagcaatttgcttgcttcggcctctcaaaatgctgggattacaggcatgagccactgagctggtcataacattcttaaatgcatttgtgtgagtgtgtgtaacatatcagaaggaaaataattagaaaggcttctccttgcacagccccgcaagggatgttctcagaatcaggtggagggctcaggacagccccgctaacgctggtcctggagttgctcttcgtgccctggccaggtcaagtggctttaaactcctagcctcttttcctcagaatcctatcaccttgcaatcccttccccctgccccaccctccccactggactcttttctaaactgtgcagtacgatctccaaacaccaagcagagagttcaaacttggcagcgacatcatttcctgagcactgcttctgaggaagagttcctacacacttcattcatttccccagttcatacacaaacgcatttacaaaatatgcttctttgtgaacgacacaaaccttctattggctttaagaaaacggatctacaacgaggctttatctgtgggctctttctgaacatggccatgcagacatgagacaaagtaacattgcagggccttttatgcgggtcctcaaagagggccccaccctggaaataaagaaatggccacagttgccctgtctctaatcggttcatggtattcagccttgacagcattgtccagcggctgaattcagccttggaggcctccatctgggttgcagggggagggggtgggggataggggtggggaatacagaagtttccgcaggctgtgtgaaaagtggcctcccaaccagctgcacagaccccctcgcctcttctggtcgttgctcccagaagccttctttcacttagtgatggaatccagcatacaaacaaggtcaaggagctttgtgagcgagagagtgacatttgcaaagggagcgaacccttcagctgggagcttgcaggagcagggctaaggggcatgtgatcaggaggtgatgtcacccaggatttccacaaaggaaaaagtggccttttctttgggaagatagatgacatcagcctctcaaatgggggctgggtccattttatcttccttttagctattaaggagatttctcaagccttgagaagtttcagaaattagaagagaacattttaaaaaccgtgtcaacatcttttatgactggctcggtttggatgtaagccagtgccttcttgactacctgtgggcatgaggcactgtaccaaagggcttttaaaaaacatctttagagcactggcagaaaaccgccatgaggtcggcagtgtttctcttaaagttagatctttgctccaggtctctttctctcgagtggtctttcattagcctttgtttatcactggtctttcgggggaattccttctcattcaaaaattttattccttttgtgacttagagtacatgtagtacgatttctgggaggttcaccctttaaagacaaaggttttatcttttgtaattctgttatccacttgtcttgtgtgagagaaaatgccttagggtgtgagggtgagtaagctgggctctaggagaagatctgctggacccagcctataatgaacaggcagctacaactgtgaatcatgttaattacatgattatttacatgtcaattacacataacctctgccagcagatattttttgagaagaagtttttcattcattcaaccaaccatccagcacatattttgggcttgttgtctaaatatagagagtattaatttgcttgggctgtcgtaacaaaaatgccacagattgggaggcttaagcagcagaagtgtgctgtctcctggaggctggaagtccaaggtcaaggtgtcggcagggttggtttctcctgaggcctctctccttggcttgcggatgctgccttttccctgtgtcctcacatggtgttttctctgtgtgtgttcatcctgatagctctgtgtgtccaaatttgctccttataaggacaccagtcagattggattacagtccattcagcttcattttaacttaattgcctctttttaaaggccctatccccgaggacagtcacattctgaggtctgggagttagaacttcaacatatgaattttggcagagatacaattcagcccataccagaaaggaaggagatcacattcttgactttggggagttagtcatagagtaggcaaggcaggtaaaccaagtgtagaaatatatacataatccaggacgccatgggaacacagaaaaaaatagctaggacagcctgcggaagttcaaagagacctccaggcagctttgacatttgaactgagttttaaagaatgggcaagaattgatcagacaaatatctgggagaggaaggcttttctaagtagaagcagcaaggtgtgagggcacaaaagttttgcaaagagcaagtccttcagctagaccacacattctctgcattctccattggggcagtatcaactccaaggaggtaaaattggctcttggtagggggattaagaaattcttactctttaatgtataaagcataaagatatacagtacataacagatatgcaatatacttgtggtattaaattttcatggttgagaatttggaaaaaaatgtccgaacaatctccttagggggctgataatgaacaaaaggtgagaaacactagggaaagggagtgatagaagttgacgcaggacacgttatcagaaaccaactgataggaaacatcacaagaatttggattttatcctgccatcagggaaagaccaccaatggatttttaagtgggaaatttagtgatgcaaacagaagtacactttagaataagagttctggcaagtagagggatgcccaagaagaggaagagactgagagtttggtgactagtcagagcagggagaaaggaaatgagtagtgggtgaggcagcgtattaaagagctgtttagggctgggtgcagtggctcacacctataatcccagcacttcgggaggccaaggcaggtggaccatgaggtcaggagtttgagactggcctggcccaccccatctctactaaaaattcaaaaattagccagctgtggtggtgcgtgcctgtaatcctagctactcaggaggctgaggcaggagaatagcttgaaactgggaggcagaggttgcagtgagccaagatggcaccactgcgctccagcctgggcaatagagtgagattctgctaaaaaaaaaaaaaaagagctatttagaaggtaggatgggcagatctgatggtggagtagatgtgtgtcaatctgggagacagaagaaggaatcatggatagctcccgttttcctgcggtgtatgatttggtgcatggtggtgccattattcatagataggaaatcccagataaagaccatgtttgggggaaaattgtgagcttctatttgaacatgctgaatttgagatgttcaggggatgtatcctttcagcaattgctggtgtcagtataaaaattaggtgaggttttgggccagagaaagagactttggaataaactacatgttggtgaatttggagttgtgagcatgatgaaatatatatccaaaactgtgcaaggtatttttaggcatatgaaagaaataccacgttagtctttgtcttcaagctgagcatgatcagttaggaagcaggtgtagaaaactaacagaagtgctgaactgtgaggtgcctattgcaaggctagtaaggaggctggaagtcattggggaaaatcttcacggactctgtgagattttagagcccttgaagaatgatcaggacaagaaatgacagatggtgcctggataagcatgagccaagaaagagagagaaacaagcctgatgtaatgaagacagtgggatatgaggcttcgtagacctcctgggctagattctttagaattctcaaagccagctagactagtgtgaacttaacgtagtaaggaaaagggaaccactgttgttttagacaatggagtgggaaatgtcaagggaggagattacaactggagacatcatagatcacagtgacagaggcaaccccaggggaccattctgggtcctggttactaagagcgaggaatagcggtctgcagagacaagacaactgatgatccaaggtgagtaacattctgatgaatcctcagcaaagacactcaagggctatgtggccagtgctgtgataaatcctggcacagaaaatattagatcaattgccgcattctctcttcctaataatttcttcaaagttataactttgaaatacagactcatgattacctaagttttccagtttgaaaatgattttagggctcttttttgttattgaacaaaaaacttttgttgaacgaaaaaattttattgaacaaaaaatgttcaatttaaaatttttattattgtgtgtccttgctgccacgtggtgaaaaaattcacaacaatctggaagtatgatgttggcaatgaaagtgatttatgaattgtggtcagcaaagattctagcgcaggttcacagggctgggctgtgaatcacactgtctggttctaatctcaggcgcagaccttctctccgttggtaatggaattgctttcacagtgtcgcttcctgctaggctgtgatagacataatgtcacacagagagaaatggtaaagcacccatccatccgcctccaaagtaacctcaagaatttgatgtcagataaggaaatcctgcttggttttggtagaaatttaagtaaaagagaagcttttaaaaacaactagctctgtttaagttaagagatatttccctaaatgctgactattctttctctcacatttatacatgctatatcccatcctgtttatgatggctttttcagcctatttgatattttgggcttttgtctttgtgatactcttaaaatatttttaagcatggagactggaaatgagttccttcttagtgtggaaccaaagcacaggtttctgcatcgtgatactgagtctgatttgtatttatgacaaattttcacttatatcttttctgcaaagaaattcttaatggacgatgctcatttctaagaaatctgtttctaaataactccttgttgtaaagttgggatagtgactaagaaaatcccacagctcttttggccttgacttcagagtttctccagcaaggtcccaatgatcagaggcagcattaaagctgtgcatatgcagacctttcagaatgagtggaaaagctcactcctgacatttctgcctccttgacgacagcagtaaatacacatccacacagttgaccttcatctcatgttggctctgagtctcttcaccagcaagggcctctcaggagtctcgcctccccattcccatgtcgccactgtttgaaaaagttggagttctatttctattgccactctttgaaacagttataaaaagaaaaaaaaataaccctcaaaccaccatgaccttcccaaatcacagattgcacaatttgtaataacagtccttgagatctgggccaaagaaagggctttctcgaaacttctgtttgtgttctggttccctggcaacaatatccccaatagaggaatgcatgtactttgcaggggattccacactttttcgtatgacacaaaaaccaaaaccacacttttttttttcagtttcaaatatcatagcagccaaaaatgaagtgtagaaacttgagttctaagccaactcagaacaaatgtgacgttcagcgtagaacctgaatttttgtccccagaggtttctcttttcgaccattgacttaaatgttgccatatttgtttcaaacattacatatccaaggacttgttttgtgtgaatgcactgtgtactcagaggaacagaggaagcagtgccaggtggcagcagcattgtctcacaaacagaacaaatctggtggaggacagtaactaccacttataagagttagtagaatttgataatctgtagatcagtaatgacaataatatactctgtccctgatttttttctcctcctagttccacaggctactcaaatatagactattttgaccctgtgtaccaaaataatgaaattgaaggaatgcaggataaataatatagattttaccacctaaatgtaatcttaaatttgtctgaagatattatgataaaaataaactatcttgccatgtaaagagtgaatgaaaatatgattaaacgcttagtgcattggtttaattgacatctcattcactattactgttgttgatgttatcattttaaaacatgactcaacatgtgtaatttaaaaatatgatcttgagaagtgaagccagctggacttcctgggtccagtggggactcggagaacttttctgtctagcttgaagcattgtaaatgcgccagtcggcgctctgtggctagctaaaagtttgtaaatgcaccaatcagcactctgtaaaaacagaccaatcagcaccctgtaaaacggaccaatcagcactctgtaaagtggaccaaccagcgctctgtaaaatggaccaatcagcaggatgtgggcggggccaaataagggaataaaagctggcctcctgcgcaccagtggcaatccactggggttgccctgcacgctgtggaagctttgttcttttgctcttcacaataaatcttgctgctgctcactctttgggtccgcactacgtttatgagctgtaacactcactccaaaggtctccaccttcactcctgaagccagcgagaccagaaacccaccgggaagaatgaacaactctgcacacaccacctttaagagctgtaacactcactgtgaaggtctgcagcttgacacctgaagtcagcaagatcacgaacgcaccagaaggaagaaactccggacacatctgaacatttgaaggagcaaactccggacacaccatctttaagaactgtaacactcactgttcaggtccgtggcttcattcttgaagtcagcgagaccaagaacccaccggaagaaaccaattccgaacacaatctcatgtctcatcccaataattttcttaaatgagcattatcattcccttattatggatgagaaaactgaggaagaagcctgagacaagttaagtgatgtgtccaaacttacacatccactaagcaatggaatcagaacacaaaactcagtgtgtgatgtcaaactcaaaggccgtgcaataagtagcacgatggtgcctgaaagcaaatattttttccccacagcttttcattgcaaaaaaaggtcaaatgatattgcaatgcaaagaaggtcagagcttatagtaggtaattttataaattcccgtaataataaatgtttttaaaaagatgtgtgcaatcttacccaagtaaatggtgatccagtttcaaaggcttcccactaagtgacacaattcattctttctttaggttcaagtagcaataatatgtgggttggggcggaggggcgcattgctaggcaaaagacaagttcgaaatagctgatgttatttgcaatccttaaacacaatttctgctttattactcatttataaagtgctgttctggagctgctatatatgttgctgatggaatccaccgatctgggagaaaccacggagatcatctggtcagttgccaaggtttagttatacaaactcgcttacaagagggagaagttatattaaagtgaagagtaaaagggtagctgctcccagaacaacttggccgggctagagtggaccatgggaatggggtggagcatgtgaggatttgggtaatttagttgtttttcttcccctaagctaaggacccaggctggctggatgcaggatttgccctgcgaggggcctgcagcatgggatgttgtaatcagagaaaacaaccttgaggctcagatttggacagagtttaaagggtcacagaacaccactgccatggacgtggtgctgcccacctgtgtccatttctccgggtggagtcctctccctgcagagggaaggttagaggttggaggaggtgagggaaggaatcagggagaggcctgcaatgtaggtccctggaggctctttgagcttttccctgcaagagccctgtgtaccaaaataatgaaattgaaggaatgcaggtttgaataatatttctaaatagaagtatgactgttgaacttggaaactgcctacagagaacatgttttctctgtctttgtttgtttgagggatttcataaagaagctttcagtagccttaggcatgactgcttatttcagggaaggttagtacagttatcttagtctcatttctttccttgtacctttttatactaaactttgtttagaagtcttcaatcatttcaaaaacatccaaggagagggaaaagagattgatcaaatgattgatttctcctgaagaattgtaagcaagggatttctactgggaaaccattttttaatttgattgaaattagtagcttaaaaggaaactgataaagttaatcaaagtgaaaagatgacaagattggctaacttctctaggttaagacgaaagatagtatccttttgtatacaggaaattaaaatttatattacacagaaactccaaaattatggcttctttggatttctttctctttgatgatgtactaaagggaaacacatcagtatttagatctaggccatcttagatagtcagatggctatgacagtcttaactttgagtatttatatgacatcttgaataggaatgtaaaggtcattatatagcggtccacagcattgatttctaagcttcttgtatctgttttccaagtcactgacttcatgcaataacttattctttcactgttttttattgtatctctaccattgaaacccgatgctctactttatatccactgctgtatagaaattagtcgaataaaatggattatcacaaaatatggggcaaggatgaagtctccatggaacatgaaactttctaaacgttcattgactctccaacactaaaaatcgttatgacttaactccctggttcttgggtttacctgtttcttcctgatgtgatacctggccctgtatttgctgctagttttctcaacaatagaccttttctgttttcatgaaaatcttacccttgaccaaccatcctctaaacctcaagatgacaaataggaagtaataattacaagatggaatacagaaagtttacaaatgtgcactccttgaataccacacaaatagttgttaccattttgtacctacctgggagtttggccacctcaattatcagggaaagaatgaggatacattagcttcttagggctactgtaactaagtaccacaaactgggtggcatgggacaacagaaatttgttctctttattctggaggctggaattccaaagtcaaggtgttggcagggtcatccctctgacggctctagggaagacccttccttgctgcttctagcttctgttgattgatggctgtctttggctttctaagccttgtagatgcataactccaatttctgcctctatccacacatgaccttcttccttcttggtgtctgggaccaaatttccctcttcgtataaggataccaagaatattggatttcagttccaccccaatccagtatgatctcattttaacttgactgcatctgccaaggccctttcctccaaaaaggtcacagtcacaggttcctggtaggcataagtctcgggggacagtgttcaacccaatacagggacaactctctcctctcctggagtcacgatgttttgtcctcttcttccttttcactctcttctttcttccttcttttttctcaaggaaattttatgttccttggcctttatattacttgattttcttctttgatttcatctcgtgatcactccagtttgtgtccccttcctcacagaatacatgctatctgactaaatccctcagaaaaatccatctgcacatgcttcatgtccttatgaatttgaggagctccacccttggccttgtgttcagagaggactagtgaccctagtaggacagatgcctatcacttggccacatacctgtgaaatgttggggaattaactggtaacatcaaaccaggaattactgactttttgtggttctcattacatgccagtcacctttggacaactttggccattttaaggagcacatattcctgtccacttccccaccctccctgacctgaaagtttctgttcaaaatccttgtaattacgtttttttatgtttcatagatgtatcggaagtgaggcctgtatactcactccaggaaatagttcactttgccttgggttgggccttccccagattctgagctcttagttaccaattcacatcacacctgccttaccaaaagggtccttgctggcagtttctcttctgtgtcctcccttcctccacaagctgcctttttttttttttttttagatggagtctcactctgttgccaggctggagtgcagtggtgtgatctcagctcactgcaacctccacttcttgggttcaagtgattctcctgcctcagcctcctgagtagctgggactacaggtgcctgccaccacgcccagctaattttttatatttttaatagagacagggtttcaccatgtttgccaggatggtctcgatctccagaccttgtgatcggcctgcctttgcctccctaagtgctgggattacaggcatgagccactgcgcccagcccacaagccgcctttttacacaatgaaggcaaactggccttgccaatgaagcacatctcaaggtcttatagagcagaaagagtttttattgttaagttatagaaaaaaagctattaaaatataaattgagcattttaatgaagcacgtgaacatcctcactaattacttttaaaatttaattctctttcactgtgccttggcttttggcttcgttttaacagcaactgttgatttcccaggcatttcctttaggaatgaagggataagggtgggagggtgtcggtgatgaatcacttctctcttccttttctgccatcctctttgggctttagccatgtgtatttcaagatgttattcctcctgatgccatcagtttatggcatatagtttcaggaaaatgccagccagcaaagcgctgactgcatttgagcagtcgccgggcaatacagcagttactttttaaattttgtgccttggattccatttagctgtttcattactggtttgcttttattaaagctcttattaaaaacacacagatacgaacttaaagatagtacctacataggagattattattaaatgtttcagtactggaattttataactcatggcttgttttggacaaaaaccaaaacaatattagtgaagttcttttatgaaggtattttaagttatctacacaagtaagcaggtttagcaacagcttgtaactcttggttgttatgagttcagcagatcaatgtgcttcctgcagataaagcaagcacttcctttcggcagatgagtgagagtttggaggaaaatcaaggcaaacagatgatcagtcaccagctctaaaacttttataaagattaactctttaaaactgaaaaacataggcttctcttcagggcattattttattccagttcagctgatgtctaatgatgtattctgttagattttgcctcaaagtcaattaaaagatttttgctttgtttacgttttccaggttgctatggtgattgtcttcagtggagggacaggacagtaatgagggcagcattcaacattgttagttccgtgcctttgagctgaagttctcggcaaggcatgggggagagagaacacagaagtggaggtcaggatcggggagggtgggtgtcacaatagggttttgtacccacatctgccattcactaagtgatatgagcatgttccacagctttcttgaacctcactttgctcacctctacaatgggcctgacatcattgttacctgcctcccgttgtcatgattaatttcaaataaaataatgcatttcaaataaaaataattcaaataaaataaaagcacttgagaactgaactaccataaaaatatggattgtcttttaaaaaatttttgtgcaccttaatgaaaaaccaatttcttacctcttctctagctattcatgatagctttttaaccagtaattcctcttctagctccaagtctttgtctcaaatctggggataaagtcttgtgaggatacaaaacacggccaggtgtggtggctcatacctgtaatcccagcactttgggagggaaaggtggatcacttgagcctaggagttcaagaccagcctgggcaatatagcaagatcctgtttcaaaagaaaagagtaaaaaaaaaatgtaaagatagaatacacagcatgtgtgaaaggattatgatatgcacaacatttagctaaaaactttggattgtttcattcattctatgtaacaaccctatgaagtaagtattcatacagctatagatgaaagaaaggttagattacttacctaggaactatcacagccagtttaggaacccatttgtctgaactacagcccatgcttcctctgttacactataatgtttccaaaagttttgcaatctaacatgccaattaagcagttctaaaatcgtgtctactccatgaaaactttctcttaccaaagtgacaaagagccactgtgtctatttctctcaaaactctttattcctcatgtcactgttcctttcttggttggtattttcatctttttcatttttgagacggggtcttgctctgtcgcccaggctggagagcagtgctgtgatctcggctcaatgcgacttccacctcctgggttcaagcaattctcctgcctcagtctcctgaatagttgagattacaggcgcataccaccacgcccagctaatttttgcatttttagtagagacagggtttcaccatgttgggacaggctggtctcgaactcatgacctcaggtgatctgcccaccttggtctcctaaagtgttgggattacaggtgtgaactaccacgcctggctggtattttcatcttttaaattatcttcttttatcttcttttgaaaggcttttctaaatcattgtcatctattttagattatgaatgaccggtgttaaaaacttctgtatttcttttacattttattgttcattcaaccagacaggtaaccggatgacgacaaggatgttggtggtctaaacatccctgcctgtgttatttcctgatgggtattggtttatataacttctttcctctccagacttgtgtattctccatctctttttcccttccctgtttgttatccctttgtcatgcatccagagtcgcaaatatgactggtaatggcaggatgagttatttattcttatttgtaacttaccagtgattaacatgtaaaggatagaatagtattcaggttgttttcttcaaataaaaacttattgaaattactcttagtaaactgaaggagaagcaaaaagggtttaataacttgcaagaagacatgtgggcaataacactttttatgtctataaatgtctttctttttttcaagagatattaaatatgcttggcttctatagcactgcttgtattatgggcagatgctcaataaacacttatgagtgaatgaaggaataaataaatggaattgggaagctattttacctctttcaaattttagaaatacgaagacagttaagtttctaccgtaattaccagaattacaacgtgcaggtttgttacatatgtatgcatatgccatgttggtgtgctgcaccctcctagtactgtataattttgaccagaaagtaccactaaattaatctatcctattttgcatttgctgtgaacttttaattcaaatgtttccttttgatatgttaatcctcagaggtagtgagagcatgaaggagaaaaagaaaacttcagagatttcaagccctaactgtttctttccctctttctcatgatcatacaatatttttcctgacagagtatcacttataaaattgaaatttctcagctgggcatggtggctcacacctgtaatcccagcactttgggaggccaaggcgggtggatcacctaaggtcaggagttcgagacaagcctggccaacatggtgatgaaaccccatctctactaaaaaaaaaaaaagaaaagaaaaagaaatttttctttaagaagcatacatatatgtgctattaacaagatatacttaaaagtaaaattttgctctttttattaaagaaaaccttgtggattatttgctttaaatactaggaaaaaagacattgtgggtccatataactatactgtaatttttttaaagcaatactgaatgccccgaatctgtattaccattccagtttacagcgacaatttaagggtattagtatcctgttatttgcgaaggaattcacaaggaaatgtaaaacaattggaaaagacaatggaaaaatgttacacagagttttatgtgaatcaactaagataaaaaaattgaatcagattggctgatgaacgaatgctaaataaaaatgcagaaatgagctatctaaactttcatttccttcttatcttttatatcatgtggccataaagttattttcctctagattttttccattggataatttatttgatactactgatagaaagaaccatctgagctgaaaatgcaagttgagaaaaaaatttcagtaacaggctttgcttacctgtaatgtattttagtaaaaggtggtacatcttaacacgagttacatgaggcactgtgttgtaccactccggaagcatcctgttatagaatgtcctgtgagcggtgctccctggagttgggcattggtacaggagatacggacaatctgtgatgattttggcttcaggaatatttgccatgtgttgttgtagtcggacaaatattttctcatcttttacggtacttgtgtttttttaagattcatcatagtctctaaacaatgtcagcacatctaattttaaacagctttttcgtaggctttagaaataaaagccggaactttttaggacacaggaaagatattgctctgtgcaatacatttaaagtctgaaaacgcagaggttttcaagtgaaaggagactgagaagtcaagaagatagtagtgctttgagctagagtcagatttctctgccgaatcaagattcttagaattctcagtgcttctcagtgcagtggggaattctgcacggagattttttttttaactccttaacttttaaaagcttttcttctaactcactgtacaggaggaatttgcatagagtggacagtagacaagatctcagacttggtgtcttactttagaagccatggtagtttaatgttatgtgaaaaatgcacgtttactcataatggagtgaggaggcactgttacttttattttattttttattattatactttaagttctagggtacatgtgcacaatgtgcaggtttgtcacatatgtatgcatgtgccatgttggtgtgctgcacccattaactcgtcatttacattaggtattcctcctaatgctatccctccccccttcccccaccccatgacagaccttggtgtgtgatgttccccaccctgtgtccaagtgttctcattgttgaattcccacctatgagtgagaacatgtggtgtttggttttctgtccttgtgacagtttgctcagaatgatggtttccagcttcatccatgtccctaaaaaggatatgaactcatcattttttatggctgcatagtattccatggtgtatatgtgccacattttcttaatccagtctatcattgttggacatttgggttggttccaagtctttgctcttgtgaatagtgccggaataaacatacatgtgcatgtgtctttatagcagcatgatttatattcctttgggtatatacccagtaatgggatggctgggtcaaatggtatttgtagttctagatccctgaggaattgccacactgacttccacaatggttgaactagtttacagtcccaccaacagtgtaaaagtgttcctatttctccacatcctctccagcacttgttgtttcctgactttttgatgatcgcacataaaaagccttgatgaagaataagagaaggtaattggaagaatttaccaaccaataaagaatatttaaaaaaaaaaaaaaacagaaaaagaggcccagaaatgttaagagcaaaaaatgttttgttaatcaccaaaaattgctgttggaaaacaagataatttcttttctaattgtgtctctcataagccttcctcaaattttacctcttctgcaaagttttctcttcctctccatactgaaatctctgtctgaattcctgcaaacgatttgagagcctgtgcggtatagtaatgaagtattaagatacaaccagatcacctcagttagtatcctagcatcaattaaccttggaaaatccacaccacctctgtttgcactgatttgctcatttaagaattggatcctaacagtacctacctcatgtggtccttatgagtacggaaacagaaaacacatggaaagcccatatgaggactcaatgaaaggtggcattattctactgtgtgccgcaggctacagcatttgattatttgttgtcatggtctgcctgaatggctttctaaggcatgacatatcaagattctgaaacacatgctgttgtctttttccttggttggatttttctatatccattgtattttttttaatgtaaatttgctgagttaggaactatataatttacttgtttatttcttacagtctttggtacaaagctaaggatttttagcccttaaaattctagttcttagatctgcacgggactgcagaataatgtattagctacaaggacactgaaggcccagggacctgaagttcacgaccacggctcacacggtccattgtacttccgactatgttatgtaattcttaccttattataataaagaaaatctaaaattagaatgacttttttttaaagtacgaaggtttgatatggtaagaaaaaggatcgagcattattgtactaaattatatataatccagtgtttttgaaaggataaacttaataagttgtagccatgatttttttctcattgttttataactgcataattataactttattgtaacttaacggttttctcctaaattaagcattgtatatttttgatggcctttcggtgagttgaatttggaattattttccatgtgctgttgcccactttgaactgactgaacctttctgttttaacaggttgtggtggagagctgtctggggccacaggctccttcagcagccccgggttccccaacaggtatccaccaaacaaggagtgtatctggtacattaggacggaccccgggagtagcattcagctcaccatccatgacttcgatgtggagtatcattcaaggtgcaactttgatgtcttggaggtaggaagtgagatggttttttcagcacattccaaagtttggggtagaacaggaaatcactctgccaagattccgaattctttccagtagtcagcagtgttctattcttagacattttaatgagcatcagcccttcggtgatcatttggtagacatgggattaatgtgtggtttgggttttcctgaagcaatgcctgagggccttgcagcagctgagttaggaggtaatgccaggaagccggagcccaggacgagtgagtgaaggaaaggaggagggggaaccagcagagggagcccctgggggcaacttgggctccatccgctgggaccttctgaaggaccacagtggaggcactggtccgccaactctggttcccattggtaaggactgcacttgggatggctaacacctcacacttgcagtctgagaaagctcccccagaaagagcattcgtgtggcggagcatagagactgggcactgccaacaagcacagggatggcctaccagggctgccgctgctcttcaaggggccgccagggccatctgccgcagagcgcttttgtaaaaaaatggccacctaggtagcatgaggcatttgaagatgaaaattttcccagcacttctgcgaagggtgtgtcttggatcattaaaacagtctttgagaatcttgagcccaaaagtttattataatcaatgtttaattgcaggaatttagtcattagaatatgtgtgtgtgtgtgtatatatatatattttaaatatatagctttaaaatattttgttgtagtttataaaattatataattcattataattatataacgtactatatagttacattatttatgtaatattcttatataattttataacatatatagatatgtcccagatatatgtaatatattatgtagtatattatatacttacactataaattataataattaataattacaataattaatatttattataacagattattatattatatattttaatgtaagtatataatacactacatattatgtaatatgttatatatagttacatgtatgtaacacatttattatgtatactttgaactttgacctgtctgcaaactttaatatcttccaaatacacacaaaaatcctgtgacctcagctctagggactgctgtagcacagcatgacaaggattctatatccagtagaacctaaattccatgaggctagatgtttgtttgctttgttttactgctatattcccagctccacagagtacctggcaaagagtaaacactcaatagatgtttgtggaatgaatgaaagcatcaacgtctctgattgtcacaccataataatgcacatttagggcactgtacagaggaatttttacctccatgttctcatttaaacattaaatcgttccatgaggtaagaggggaattttattcccattttacagtggtcaaaactaacgctcaaaaagattaatgggcttttccatgaccacatggaaggggagtggaagagctaataactgaagccagtcactgctcaacactccagtaaatcctgagaccatagatgggtgcagggtgcaaggggtcgatatgaatagtatggacgttacaggaaactttaacaaaaactttaattataaaacaagttcttaccttgaaaagaaatggaattatcccctcagtgagagtcactaggaattacttttagtaattcatcacttttagtaatttagtaaagtcatccttctcagtgagagtcacaaggaattacttttagtggctctaaaagacttaccatttctatctctgatttcatttactgtagctctacagacaatttactattgtaattgtaaatgaaatcagatagaactggaaagtcttcacggaaggactgttgccaagtcatgactccatctcagaggagaaacaaggtgcctcctgaaattcacactcacagcacaaagtaggactagcatccatgtgcagaatgttcagatggcctcgctcgcctgcaaggatattgcttggttgcataagaccccttatcacttacaaagggctggaggtggatcttccacagctatgtgcaatgttccaaaccctttattttcatactccaaagtgcatgtgattgttgcccacttggcaaattataaatgggccaattgtgtttcgggttgtgtcatacccattacgggagaaagtagagacaggggctgttccctacaagcaggcctggggcctcagggacgaaatcagggactccaggcagaagcggctttcaaggagagccctatgcctgacagaaatggctgtgagaagacgcacagtctgcttggggcttatttttattatgacaagctgacattgcagtggcctcccgtgttccaccaaaagcagggtttgggggactgttctgaggctcttaaatatttggggaaagtttttttctgaaagctaaaaggagcaaccctctgacattttgttcaaaagccttgttttgcttttctgcaaatgttcatttggaaaacgctgtaataaaattgggctaatggtggtggaatggtttttttcacccctccctagctgctgataacatgttagtagtgggtttaaaagtttgttacccatgatgggcatgtgatctaaaaactttgctgactttctcagcctgcatgtgagtgtagtcaagtggggccttacagccactaagtattgggcttacctgggtttcacaaaatttattcagaagccatttttcccttgaaaaatcagagtccggaaagtggcccattgcaaaaagcagcagctgtttggttactcataaccccggaatgctgacttgattgtaacaataaatggagctaacagagcagaaagaaatgttcaaaacagattaaaaccataggctttgaaatgtcctccatcctgagcatttgctaaaacacatttttaaatctctgatcatcagaccacttctttttcccccaaagtttagtcatatgctgtagttgaatgaaccatgccctgaaattctttccatctttttcttcttttgaagagtcatgtactatcggttttatttgtggaagccagaaggaccattgtttcggtcatggaaacactctgcctgattttactttaatctctgagaaagtctttagagagattctgaactggcattaggcagaaaaggaaatccactccttggagcagtaaaccaggacaattgcttggtgtggacagttacctcagtctggcctctctgcgataggcttttgtgagctcagccttgcaagaagggaagtaaataatgtccaaagtggcagtgtttattcttctagaggcttctgggtccagccaactcatacccattatgtttgtgatctcaaggggatgtttgagcagagaaaacaaagaatattttgccgacgtgcgagttttctttgttagaacttaacacttggcgttcagtggtctttccaaatatgtgctgttgattgggcttgggtgattgggagcacatgctgtcagtttcatgctgtggggactgtgccctaggcgagggggtagggagatcttgaaaatgggaaagaaagctggctctacacaccatgcaagcttgcttctgccatttgcatatgtgtacgtgtcaggggccacacagggctcttcctaaagccctgcttttgatgggacttggggggagtgcacaaacatcagctcctcctaataaaaataagcctgaagcagtcggtatgcttcattcctttgcaattactgtccttgtgctcagccctctgtgtaacagccgtttcattcattttggcctttaccggatggctggggggaattaatcagacaaagaaatcattatagattcaaatcacacactcctccccaaagtaggcttcttgttctcactccctctccccagagaacacttgagtgattttcctatcagtcagcagtgggtcctgagggtgggcaagggccgggggtgctgaggaatgggggcagagtgtcccgaggtgggggaaaggcacagagggagggtgggagggcgctgtgcccagatccccctgagagccgccttcctggctctggtcctgagtgcctgtacatggatggctgcagttgcagttatgaaggtctcagataccaactctttgaaaactgtctcccaaagatggtctttcttttacaaatcgaagtttgaaaagacctgaagatgaggagtcagcatcttctatttgattcccatcctgccttcgccaccctccccagccccacacatacacacaggagataaacaggacccagaggagactgagaaacctgtctgtgaggcctcctggaggcctggcctaggctatccttgcctgcaagatgccctccgtgagcccaaggagactctttccagaggactatgtcactggggtattggattccagtcagacagacagtttgggagatttggaggagcctacgtggtctgaagtcatgtgtgatagatctagaagtgaaacaagagagttccctgaccaccccgtcgcaggacctgtgacaggggtgtggcacatctgttcggctgtggtgccctcaaaccccttatgggagggggagcatgcagattggcaggtgcaggaacccaggcaagatgctacccacagtacggtctagtggtgggtgcctgtgactctcaaagccctcatgggcaggctacagtattcttttagctctgccatccacagagggctcaagtgttaaccagctcagtgactcttggtacccgacttcctgtctggcatccaggaagaatcaggtcacacacggacttgaaggatggtgaatgtggggattttattgggcgatggaggtagctgtcattggaatggatggggaactggaaaggggatggagtgtgaagatgatcttccccatagagtttcgctgtgctgtggatgatcaactgtctgaccatccccggccaaactcctctcaacgttcagatgctccttctctctccttctctgccacgttgttcttctcctcctctgctcttctattcatctgcccatctgctcgtggagcctggagttggaggtttatatgggtacaggagatggggacgtggcaggccaaaaggcaacatctgggtgtggaaacaagaatgcctgttcccgtttagggccgtgggtttccaggcttggggatggggcctttgccagggaacctccctcttctacccagtgtttccctgtctgctgtctatatcagaaggagccatctggagactaaggcagagtctagggcaatccctgagcagaaaagtgggatgcacttagtcaggttcctgggcatgggcgtgctgggagcaggcacagggagggtgcatagcatccccttccttaggctccaaaacacacccagagagctggtatttccactcctcctaaagaagcatacgtgttatattcaatgtgtggtcttagaaaacattcagtttgcagggtaggtggaaattcctaaaaatataactgggatattggtagccttcagtgaactcaactttcataacaaaatggctttatgctaagactaatcatatgtgccagagttagaaaatcagacatttctttttttaaaggtccccctaaaattcagaaaatcgacttaatattgtatgatctgtaatgtttctgctagagaaagcaggaaagcccacaaagacatgaaaaagacaaaaagaggagatagggaagattctggaataatctactccgtcctcctctgcaattctggctgatgaaacaagcaggcattttatgggtgattgaacttgtgtgttcctaaggcacagggagtgcctttgaaaactcagctcaagtttatagtgcatccccacccagggaggctgagatttcaatctctaataatcatagaacccaaggagccgggggtcaaaatgagccagagcaagggcctgtaattgcttaaaatattttttaaagtcttttttcctacatcccatgttagatctatggaggccccgatttccactctcccagaatagcccaactgtgtacccagagatcacctgagaaccccatgcaggtctccagcactggaaatgagctagcaattcgattcaagaccgacttgtccataaatgggagaggcttcaatgcgtcatggcaagcagtcactggaggtgagtgagaaaaggaggtttcctaaagtacttaagccgagccctcgttaaatttcatgaaatgcttgggaaaacgtatgaaggctacacacttataacttagtgacatcccaaagggcagcctactgagacctgacatatacccttccctaaaatacgtgataaagtttaacttcctaagggtcaccacatatgtgaaagcaagaatgtaagtgtgtaagtccatggtgagagcagaactagggtgataggccagacccactctccaagggctcgtacctcttaaccagcctccatacctcatgccatagtacagacctttagattcttggcaaatatcaaacttgcaaacattaaatttgtgaatcccaaggaattactgtgtgttctatggtgactttctgcccaagattttaggcagtctaaataaattgcctattgtatatttttaaactatagcaaaaatctatggcacaaaatagtgtaacagatgttagcatatgcaactactagagatagccacatttgcagaatgcttactgtgtactaggcacttttctaactattttatgaggattatctctagtccttacaaccaccctgtgagggaagtccgcttcatatcctcatcttaccagtgtggacactgaagcttagaaaggttagtgtcttgcccaaagttccacagctagaaaacgtcaaagcacatatgtgattccagactaccttatggccacacttcttcaactctatcataaccaaggtatctatataagagctctcccctaaagttaattatgtaggaatttaaataaacacacacacacacacagacacacacatttagtgtttagattacccctgaatgattctccattattagaaaatagtgccaaagttttctattattggcttatattatcataaatccaagaaatggtgggtcatagagaagacattgaactaacaggtatttgataacatcaaaggaattttaaaaaacctaagtaactgtactatatccgaatattaaatttttaaagggtagatattaaattatttttaaatgcatgcactactagattatcacaattcttggaaggaaacatgttattcttccagtatgctatatttttagaggacagtgaagaagcagcattccatggctttgtgaaaacgtgatttcatttgcgtttccttttaattatttttaaaataaattttggcatctgtatttaaagtgtttgaagtattttcttagtatcatccatgtcatcccttcttattctgttgggataaatggcttaatgtggatatcaaattcttcagtgtttttagcatcgactaactgattcaagcaaagtaatgtattgatctatacaaccaggtaatggattattttcgagcatccatgattcctctcatgaaataattgtgttccccacttccaggttgtggtgggattttccaggctcccagtggagagattcattctccaaattaccccagtccttataggagcaacacagactgttcttgggtcattcgggttgacagaaatcatcgtgttctcttgaacttcactgactttgatcttgaaccacaagactcttgtattatggtaagtgacataaatttcaagcattgtctccagtcaaacctcggtcaaaacactgccatataagcatatttagtgaatgtattacttatgggtgtttttaatgtcgattcataggaaaccaaactattggcaacttaaaatataaggacatttattttttacctaaaaacaaatcaggaagtagataatctctaggttttttagcaagtcagtttctgcgctaccattattagcctgttggcttttcattttgttgttacttcattgtcaaaaaatggctgcagtggtttttatctgaatgtcctacctgagtctacctctgaaaaaaggaagaagcaatagtgttaactatttctgttttgtttgtgtttcttttaataaggaaagcaaattttccaaaaaagcccctgatatatcattagccagaactgactacaaaagagatccagaaagtatcatggaatagatttatcataaatgttttagatcaattattattattaagcatctgggattttcacaggattctgcttctcttgagacaaggatatcttgatttgctacttgaacaaatccatgttctgatagaacaggttgggagatgggagtggaggagaaggaatatggctatgaattggtcagatgacaaaaagagtttctgctactgagatgggagggtttccttgactcctttacaggacttgcgaagggggtggcttatttgcttggctgcctcgctgaattcaggagggagcacacgaatagacgaatgcaggaaccggggtgaacgaaccctagaactggctggtccctcatctctggtgggagcaggctctgtgcacggcccacggcagcgtccaagcttgttacaatgctcttttagctctgccatctcggagagggtgtctgcgaccccaaaagccccaaagggcatgtgttgcaatcagtgctcttttagcatttgccgtccatggacagctaagtgttaaccagctcagtggagggtcagggtgacagccttttacaccctgacctcttggtacccaagttcttgtccagtgtccaggaagaatcaggtcacacgaacaaattgaagggtggtgaatgtggataactttattaagaggtagaagtggctctcagcaggaaggcgagcttgaaagaggttggaggaagtgggttgcaggagtctggccttccttggctgaactcctctctgaccatagtctccgatgtccagctccttcttctcctcttgacgttcagacacttctctcttctgtgtgtgtgtgtgtgtgtgtgtgtctgctgagtctggggcttggagttcttatgggcaccagatgggcgcagggcaggccaaaaggcaacatttgggtgggaaaacagggatggttctcactttgagtggcagatccaggcttgagggtggagcactcaccagggacctcaacctcttctaccaagcattttcctgccttctggcccatcactactaccaacacttttaatgcattcctacctgaaactaatgctttgcgcttcatataagagtgaatgaagttctattttgaagggttttttttttctttctgtttttaaattttttggctacctaattttcttttattattgttattattattatactttaagttctgggatacatgtgtagaagctgcaggtttgttatataggtatacacgtgccatggtggtttgctgcactcatcaacccgtcatctacataaggtatttctcctaatgctatccctcccttagccccccacccctcgacaggcaccggtgtgtgatgttcccctccctgtgtccatgcgttctcattgttcaactcccacttacgagtgagaatatgcggtgtttggttttttgttcctgtgttagtttgctgagaatgatggtttccagcttcatccatgtcccttcaaagtacatgaactcatccttttttatggctacaaagtattccatggtgtataggtgccacattttctttatccagcctatcattgatgcacatttgggttggttccaagtctttgccattgtgaatagtgctgcagtaaacatacgtgtgcatctctctttatagtagaatgatttataatcctttggttatatacccagtaatgggattgctgagtcaaatggtattactggttctagatccttgaggaattgccacattgtcttccacaatggttgaactaatttacactcccaccaacgagtaaaaacgttcctatttctccacatccttgccagcatctgttgtttcctgactttttaataattgccattctaactggcgtgagatggtatctcattgtggttttgatttacatttctctaaggaccagtgatggtgaactttttttttcatatgtttgttggctgcataaatgtcttcttttaagtgtctgttcatatcctttgcccactttttgatgaggttgtttatttttttcttgtaaatttgtttaagtttcttgtagattctggatattagccctttgtcagctggatagattgcaaaaattttctcctattctgtagattgcctgttcactctggtgatagtttcttttgctatgaagaagctctttagtttaattagatcccatttgttaattttggcttttgttaccattgctcttggtgtttaaatcatgaagtctttgcccatgcctatgtcctgaatggtattgcctgggttttcttctagggtttttatgattttaggttttacatttaagtctttaatccatcttgagttaatttttgtataaggtgtaaggaaggggtccaatttcagttttctgcatatggctagccagttttcccaacaccatttattaaatagggaatcctttcctcattgcttgtttttgtcaggtttgttaaagatcagatggttgtagatgtgtggcgttatttctgaggcctttcttctgttccattggtctgtatatctcttttggtaccagtaccatgctgttttggttactgtaggcttgtagtatagtttgaagtcaggtaacgttatgtctccagctttgttctttttgcttaggattgtcttggctgtacaggctctttttttgttccacatgaaatttagagttttttttctaattccgtgaagaaagtcaatggtagcttgatggatatagcattgaatctataaattactttggacattatggccattttcatgatattaattcttcctatccacgagcatggaatgtttttccatttgtttgtgtcctctcttatttccttgagcagtggtttataattctccttgaagagatccttcacatcccttgtaagttgtattcctaggtattttattctctttgtagcaattgtgaatgggagttcactcatgatttggctttctgtttggctattactggtgtataggaatgcttgtgatttttgcacattgattttgtgtcctgagactttgctgaagttgcctctgtctcagcttaagaagattttgggctgcgacgatggggttttctaaatatacaatcatgtcatctgcaacagagacaatttgacttcctctctatttgaatatgctttgtttctttctcttgcctgattgctgtgacctgaacttccaatactatgttgaataggagtggttagagagggcacccttgtcttgttccgggctacctgattttctaacaaaaagtttttcatctttcatttgtgtatatcaacatttcattcaaatacaaaccagattctcttggttactggatctttcaatgttagtgtcctgatagtttcctacacaagatccaactggctagcttctttcaaatttaacccaagaaaactcaaaggtttgtttacatttttccaagtagtccattttaatggtatgatttcaatattattttacaagattaggttattaatgaaagttaagtttatttatcactgtatattaaccatccaaatgagtcttcagagtctaagttggctaagcatcatgcagactgaaagcgtagaacatccagctactctcctgacaaagaccattttgaaattttggatgacatttacaaacatctttctaaaagtagccaatggttcatgaggtagtgtgaagtttctgagtgaatatctgagagaggtgtgagtccagtctttgggaccattttttcctgcagggcctttactgatccacaaaggtttagcagctcttctgagagcctctcaggacaaagaggaccaaagtttgagtccagagctttgttagagtggcagtcttggtaagccattcgtatcttaggtaaaatgaaaggaaaacagccttcactgagactgcattcaatatttgagttacctgagtgaatccccaaaatctgaagccatgaaataatgagagtgaatcttgtatttctcgtgcatctaggcactggacatccagcaaaagcaatttaaaatcttcttcaaagagagatattaacattctagacatcatttctacctataatttttcatgtgtaatagccgattaaataagagagttccctgacctccgttacaggacattcaacaggggtgtgtctcatctgttcaagtgctgcaggttcaaaccccttatgggcagggaaacatgcagacaggggtgcaggagccggggagagtgcttctggactccgggccccatggtagcatctaggggtgggtgcctacaactcccagagccctagtgggcatgctacagtgctcttttagctctgccatcctcagatggcttaagttttaaccagctcagtgtcctcttggtacccatcttcttgtttggtgtccaggaagaatcaggtcacacatggacttgaaggatggtgaatgcaggggttttactggatgatggagacagctcccagtgggatggatggggagctggaaagggggtggaaagggaagatgatcctccccctggagttcactgtcccatggccgatttcttctttgactgaccctggctgaactcctctcaatgttcagatgctccttctcttctctctttctctgctgtactgctcttctgctcctctgctcttctatttatctgctcatctgcttgtctacttttgaagcctgggtttaggggtttatatgaatacaggataagggggtgtggcaggccaaaaggcaaaatttgggtgtggaaacaggaatgcctgttcccatttagggccatgggtttccaggcttgagagtggggcctttgctggggaactgccctcttctacctagtatttccctgtatcctgtgtgtatcaccaacacactatcaaagatagtcatgtacttgaggggacaatataacaaaaatgagatgtaatatgagtaagagacaatagaaacaaatccactaatatgccagatagtaaagttacctggcacacttgctatacaactgtgattactcaactcatggaaataaaagtcaaactgagaactttcagcaaggaactgcatactatagaaagtgacattgcaatatgaagaagacccaactacaaatttgagaactgataaataccatagctaaaattaacacctcagcagaaggctttttggggggactaggcagagatgaagagataaatagtgactacagagaaacagtgaactggaagataagtcaagaatctactcagaaaaaagtatggataaaaaaaggatgaaaaatatataagagaggttaagacacatagaggacactcagaaaatatataacacacacttaattggagtctcacaaggaaaagagagatatatggaacagaagcaaactttgaagagctactgactaaaatttttccaaaactggtggaagtcatcattaaaaaaatagaatctcaaggaacccaaacagcaaagcaggataaatagaatgacgtacttttctaaaaaaaaaataataataacaaagataaagagaaaatgttacagtcagctagaggagtaggtaggtggggaacagattgcttgttagaaagtagagactaaatgctgacttttcaaccaggattggaagtaaaaaaaatttttttaaagacaatagactgatatattcagattaaagaaaaaaaagtaactaccggccaggaactctatgctctcctaaaattcctttaagaatgaaggtgaggatgtgtatggtagatcacacctgtaatttcagcactttgggagcatgaggcaagaggatcacttgagcccaggagtttgagaccagcctgggcaatgtagtgagaccctgtctctacaaaacagttaaaaaattagccaagcatggtggcacagacctgtaatcccagctacttgggaggctgaggtgaaaggatcacttgagggtggaaggcaggagttgcagtgagcacagatcttgccactgcacttcagcctaggcaacaagcaagaccctgtctgttaaaaaaaaaaaaaaaaaggaataaaggtgaaataaatattgaagcaaaagaagggtcttggcctggcgtggtggctcacaactgtaatcccagcactttgggaggcctaggcaggcagatcatgaagtcaggaggtcgagaccatcctggccaacatggtgaaaccccatctctattaaaaatacaaaaactagctgggtgtggtggtgtgtgcttgtaatcccagcgacttgggaggctgaggcatgagaatcgcttgaacccaggaggtggaggttgcagtgagccaagattgcaccactgcactccagcctggcgacacagcgagactccttctcaaaaaaaaaaaaaaaaaaaaaaaaagaaggtctttaagagaagtttgaatgggccagagacaaagctacttatagttttgaccatggtgggtattgctctaccccttgtttcctccctcgtctgcatggtgttcttttctttgatacagtgcagaatccatggaatttaacatacaaagtgtgtcaccaaaccaaagcctaggtcaacagcatgccagcatggctaggattttccctcttgtggtcatgaggagggttttccacctacatgggacataaacacacagacaaggttttctatgaacactgccatatttcagcatgcagctgggcttggcttaacaaagtgcagcaggaggaaacagcaggagtgaaacctcaaatgtgatcgggtcttaggcacggagatggaaaataaactcaaaaacaagtgctgggaggagtttgggctggtaggtaaggcaaaatataaaatgtaataatagtccaaacaagttgtcagaatcagataatgctgtatgaagtacagttgactcttgaacaatgctgggattagggtcattggccccctgcttccctgtcgtgcagtgaaaaatctacatacaactttcaagtcccccaaaacttaactactaatacctatgacggacagaaggcttaccattaacataaacagtcaattaacagatattttatatgttttatatattacatactgtattctttcaacaaagtaagctagagaaaataaaatgctatcaagaaaactgtaaagaagagaaaatatatttactatttattaagtggaagttgatcatcataaaggtcttcatcctcatcatcttcacattgagtgggttggggaggaagagggagggggcgctagtcttgctgtctcaggggtggcagagacggaagaaaatctgtgtttaagtggacccaggcagttcaaacctctgttgttcaagagttaactgtaggccgggcgcggtggctcacgcctgtaatcccagcactttaggaggccgaggcggggggatcacgaggtcaggagatcgagaccatcctggctaacatggtgaaaccccgtctctactaaaaatataaaaagcagccaggcatggcgggaactcgggaggcagagcttgcattgagccaagatcacgccactgcactccagcctgggcgacagagtgagactccctctcaaaaaaaaaaaagagttaattgtagttggaaaatcccagccagtgggcagaagagacattagaagcaaatacctctaagaacccaggcaagacattaaaataagaagtgagccacaccgatagtgtgagtcagcacagtgcttcagctaagaaatctagctctaatatagggtggttctggggctgagcctggactttgtgatattctagctgtgttctttggaagaaagttaacctttcagcttcagtttccttaatggaaatggggataataagaggacctaggtcagatttattgttaggtatttgagataatatagatgacctgcttgctgtcacatagagagttctccacttgtgctagccattatgatgctgctgatggtgagtgttttgggggaggttcatttaatgaggactagaagaagagacagcgcggaatactaggagcagaaatgcacttagaagtcagagtcagacatgcatgcccgtgttcatcgcggcactgtccacgatagcaaaggcatggaatcaacctagatgcccatcaatggtggatgggatgaagaaaacgtgctacgtatacaccagggaatgtgacacagccacaagaatgaacaagaccatgtccttttcagcaacatggatggagctggaggccataatcctaaatgaagtaacacaggaacagaaaactaaatactgcatgttctcactcaggagtgggagctaaacactgagtacatatggacacaaagaagggaacaacaggcgccagggcctacttgaggttggaagctgggaggagggagcaagttgaaaaccacccatcacgttctttgctcattacctgggtgacaaaatagactgtacaccaaacccccatgacaggcaatttacctctatagcaaacctgcacatggacccttgaacctaaggtgaaaggtttttagaaaaagaagtcagggtcaggacttgccgtctgtaattctgggcctcaagctcttaagcagaagagcccactttcgaatcttcctcgtagtatagcacctaggatttagcatatctagggctcagtgctctggaatcattgtgaaaatggccgacatcattcatttgggcctggaagccagggaagcgttcacactggaggcgacatttaagtggcagagtctcgccagtagaaatgcagcagtgaggccacgaggggaggctgcaagggaaggatggggaaatggtgcacgcacatttgggaataaaaaatgagagtgttgtccctggagcgtgaagaaatgccggggagcatgtggagaccaaggggctacagaagacatctgagctctcttctgctccagttaagaatttgaaattatcctataggtagtatggagtcagtgaaaattttctgtaaaacgggaataacatactcagagctgtattctacagtgacaacaggcagcagtgtgtgaagaatggcttggcagagaaaaagaaagatggtagcatgtctgtttgggaagcaatggaaaaagcttggatcagaggtgataaggtctcatagtaggcagtggtcttgggacacatggagagcgcagggacacgtggagaactgtcacggtggcagtcactagaattagaggctaattacatggtggtgggtggggctggtgatagagatggtggggggaagcctatttgcttgaagaatgaatgaatggccgggagtgatggctcatacctgtaattccagcactttgggaggccgagacaggagaattgtttgagctcaggagtttgacaccagcctggaccccatctctgcaaaaaaattaaaaaattagcctggccaagtggcacatacctgtattcccagtaactcaggaggttgaggtgggaggatggcttgagcatgggaggtcgaggctgcggtgagctgtgatcacaccactgtactccagcctgggtgacagcatgaccctgtttcaaaaaaaaaaaaaattgtgaatgatgaggccattaactgagtaaagggagtagatgatagtgagtttgacttgtaaacttttgggtttaaatattatatagtttgacataagagttcagagcttgggataggatctgagctagacatatacaattgaggataatttctgtatattgggtggttattaaagttgtgggagtaggtatgatcacttttaggagtattttaccaagagaaaggggccaagccaactcctggggaaacactgccatgtaacgggtggatgaaagatcagaggagaggaggctgaggaggtgcgctgagtgcttggtggagaaccagaagagagtggtagcattcaaaccacgagggaagctgaatttcaagggtgggtgatcaaaggtatcaaatcccatgcaggatgccaacgagcgtgaggattgcaacaaagcccctggattccgtctttaataacctgcaaggagcaggattgtggcgggtggtggtggaagactcaaggtcacagtggttaggaggtgcaggagcttctgagcttttccccagagttacggaaatgagtggcataaggagaaaatgggcagtaaccaatgggttaaccaaaatcagtggagagttggttttttaaaaaaaatggagaaatataagttgtgtgaagagggcaggtggaaaaagagcagctgaatgtgagagccaggcgaacagtagagaaaatcatgttttcaggacagagacaccaagaagcgccagattggttctatgaatgttgtactttttagaataagaaattgaaacccatggcttggcacaagatttttctgatttataaattcattatgttaaaaattgcataaattgtatacaaactaagtcattttttcttggatgatttataaatcaactttacaaaaagataaggaagttttaaaagaaaacaagactgtccaggtaagttggggtagagatctgctatatatttgccaaatgtgcccacttaaggggacaggaggtctgcagaggtttggaaccagaccaggcaatgccctggcaaggctggaagcttgttagttagttgtccagggattcatgaaggccggagttgaagcaccagccctctatctttacagccagatggacactggacgggaaacgtaccccaaagtccaacatcttacataatatctctgcagtctcagttcatataaagccaatccttcattttggagacattcaagttaatgtcctggtcctgttgcttagacagagttattagcaaagagaaaaatattcagttgccagtgatgctgtcagataatgttggggttcaggagatttttaacagagttcaagtgtactctttaaataccagtgaaaattatgctggaatgggaccagccatcctgttttttcaaaacttctataacaatttgggttgttagaagaagaaatagtaatttagctgtatgttaaatatgatttcacatatgattaactgtcataaacctatagatacatagaatgttaaggttggaagaagaaagcttagagttcgtttgctgttgtcacctaattttttaaaaaaagacattgaggtggaggtggggcagtgcaaaaaataaaaattaattaaaaaataaaaaagatactgagatccagaaatgtcagggtcaaggctaagtagaaattaacagcaggatcagcactaaaacgaaagccttatgcttcctacgaagtgaataagtattttggtaaaatataaaaattgcagttatgtacaggatacggaatggcagactagaaaaatagagggagaaaataaatttagggtcaggctggagccactttgattttttttttttttttgagatggagtttcactcttgttgcccaggctggagtgcaaaggtgtgatctcagctcactgcgacctccacctcccaggttcaagcaattctcctgcctcagcctcccaagtagctgggattacaggcatgtgccaccatgcccggctaatattttgtgtttttagtggagatggggtttcaccatgttggccaggctggttttgaacttctgacctcaggtgatccacccgcctcggcctctgattacaggtgtgaatgctgggattataggcgtgagccaccgtgcccagcccactttcacttctatatctgataagcccagccttcatttgtcaatagaaggaaaagtgttaagaattcaaatatgaaatggaaagtgtccttgctttgaagtcaggaggtcagggtttccttcattactttccccttcggtgccaaatatgtaccagacactgccaggtgcttgtttctggacgtgtaccacccctcaccctcttcatggcttggggttcttagtttgcttatttagaaaatcaggtgcctggggaacagaagcagaaagaagaaaactaaggaagaggattcagttaggagttgcatttgtgggtaagaaaaggaggacaagatggcagatgaaatggccactgagggcccagtgacgtcagtggtggtttcatcctcaaagttgaagtcaacctcaggcagccaccaggcttcacatgatctctgggttacaagactatccccatactcttctgggaatacaatagaaagctcttcttagagtaggcctagtccctataggttccaaattgaggcaagctaagcccacatgtaacagccattactcttggtgtcatggaaacaaaggcaaaattcgccaagtagaagaaacaaatgaacatttaaaaatggaacagtagactgggctcagtggctcacgcctgtaatcccagcactttgggatgccaaggcaggcggatcatgaggtctagagattgagaccatcctggccaacatgatgaaaccccgtctctactaaaaatacaaaaattagctgggttttgtggtgcatacctgtagtcccagctactcgggaggctaaggcaggagaatcacttgaaccccggaggcggaggctgcagtgagctgagatcgtgccactgcactccagcctggcaactgagcaagactccatctaaaaaaaaaaaaatggagcagtaatacacagcctccatcctctttcacagaacccacagcagtagtctttatatcgccaaagcaccaatgtttttgatgcatgaattgttaatagatgcatagctgaataaatgaatttttgtcatctctgctcctgcaatgctcagtgctttggtggaaaatctcagaggacaccattgggaatgtgctgtactgagttcactccctggcattgttattgatatacaatcttcgtgttgtgagccacatgagcacttagataacatcacagaagtgcgttttctagaattgcatgctgctataatgagaaaagggaaaaactggattttttgacttctattgaaattgtgatggcatcgaggggagctaatcaggaagctggacttgcaggcaggtttcaacacatttggtaatatatttgcactttctgctcagtcaccttcaagtgtctggtgtaattaaccttgggctctcctcaatgacacatcaggagcatttcttgctaaggaagctgtgggacccatcggctgggcatggccttgtctggtcagcacacaagtggcttcattacgtttcctttcacgaaggctgagtattaaagtgacctctgactgacagttaaattgcttaattagagcctttcttctaagtcttcgattcatgtagctctgcaagctcttattgatctcctagaaaggctgcttgtagctcagtgtgagagcaggaagaggaaagtccgttcagcagcaccagctggcccctggagattcctgacctctgcttccagcatcctctttgctcagatcattggaatgtctgctttgtgagaatcagcaaggagcagctcaaagcaagccgaccatggtccaggtcctgcctctcatttggaggaaaacacaaacgagggctaacagagcctggtaccaaaaagcaaaagcaaaagcaatatgattagtaacttctgaagctttttgtggctatctaggagaaagaaagaaaagtgtctgatgtgatccggaaaaaaaaaaaattccctgtgctcccacccaaagctgcaatgtctgttgttgttccattattcgacaataaaatgcagggtggaacagggcagatacctaacgcagcatcctcttttgttgtatttttgtaatacaccacccatgatgtgtttccttttaaaacactgatggtttccaaagcagagcaaacagacacaggaataatagaactctgggtttcaaagagatgatggaaacaagtcttctttaaatatttactgttttacaaacaaatccatgacagaaaccagtctctctctctcccctcctcttcctctctccctctcttttcctctctctctcttttcctctctctctctccctgtctttctgtccctctttctttccctcttcctcttgctctctctccctctcttcctctttccccctctctctccctctgtctctccttctctctctctccctgtctctccttctctctctctccctctgtctctccttctctctctctccctctgtctctccttctttctctctccgtctctccttctctctctttctccctccttctcttcttatctttccctttctttgttcctctctctccctctccctttttgtctctttctctctctcctccctgtatctctctctcactctctctttcttccctccctcctttacgccccaccacaggaatttttgtttccatctgatacttgaggatgatctttttcaaacgtttatcttgtgacttgcatttgtattaacatgcttagctactttgcttcctggtgcgggtgtcttattaacaaccaaatgctgagccagtgctttgaatctgcaagatgaaggaagagttgagttgaagccacagctctcaatctgtggacacgggtttggtttggcttggtttccatttcagctcagactctccttaaatgtttatttgtgaaagtaaaacgagcatcttagatttcttctcatgtcaacatttccaggaatctttgagtcagtgctcgcaacaactgcaagtttttagagtttatagtctcttgtaagatgtgaagactgagtgggagagtgtagaacaaagaaataggggtgaacgcatcgtgatatgagatgtggggttgtgaattgaacttagtattgaatttccaaggagcgtaactggaaaaaaatcactgacaaaggaaactgatgcttcctccttcctcagccccaagaagagatgctataatgagtaatattttcatttccttccgcattcacatttatgactgtaacagcttgtataatttcctgagggatttccctccctatcacttaatgtttcctctattttggagaagttcgtattccaaagtggcaattccattagcaggtataccgccatattataacatgtgaaaatacctcatggactctcgatcctcaaaatcactttgcacctccatgtgaattatctctcctgtgccctaaatgtcttattcttcaccacatttttgcaccctgctaagatcaaaggcaatccagggcaggagacctgtgttaccatctggagttaaaaatgtagcaaagcgggactggcacagtggctcatgcctgtaatcccagcactttgaaaggccaaggtgggtggatcatttgaggtcaagagttcaagaccagcctggccaacatggtgagaccctgtctctactaaaaatacgaaatgtagctgggtgtactggtgcatgcctgtaatcccagctactttggaggctgagacatgagaattgcttgaacctgggagacagaggctacagtgagccgagattgcaccactgcactccattctgggcgacagagcgagactctgtctcagaaaaaaaaaaatgtagtaaagcataagggtccaggtgagaaggaggccacactagaccagagaatggcggttggaccagagaaggacaaggaggagctttatatctgaatccaggaatagaatcaagtttatgtggcaacgatagaagttctgggtttatgtattgaccccagacactgtgctctttgttacccattctgctaagtgagccatgctgggaatcccatgcacgttcactggaatggaatgcaggacagatgccaaccacttggaaagccacgggagcccaatataagactttctcaaatgctactgaggatgcttgattgcaggttcagatgcaaaggatgggggactcccaccctatttccagagctgctgtggttttctttcttggagaccgtgaatatctcacttagcttcacagaatcatggtctctcaacattctaactgaatgaatacaacttgatttcaccttttctctaggtttaatcatacttggtcggacgtcagacagatggggtttgtatattggctctgcactgctaagcgtgtgattgggcaagtcatgtatgttttcagagctcagttttccctgctgcaaagtggaactgtaagaatcaaatgtaaacaaatgtatttaagtacctatcagtgtctggttcagataagtatttgctgctattcctaatttttctattacaatgactcctgcttctattactattaacgctatgttaaagatcttaaggaatcttttaaaaaaattttctccctgagcaagatgaaacttagtaaacaagataaaaaatccagtagaaaaaaattcctcacttcctactttccaacaatctcagggaatatattcctgttttttttttttttttagaaataaaaatacagatattactgaggaagctacaattcatttccccctcagtcatgaggggtgcaaacgatgactgacatttcagtcaggtggtcacgagccatttaatcaccccagggttttgattacagcagagaggggcagccgctgaagtgctctgcatcacgtccacgtcaatcacgtggtctttagtgcttaggcaaagcatgcgtgattactggtctttatttcgtgcaatttaaaaatgtatgctcagctttactttagtatgtgatgttacattttagaaagcgcacgctgtgcactgagttgttttgagactgaatggaaggaagacacaaatggaaggcaggggaaatttcagggtgttgtagtggcctaggcaagatgtaatgaggccccacaccaagacaccagagagggacatggatgaagtagagggaaggagccaagcgatacatcggacaaacagatgttagaacatgctgatccactacatgtagcagggatgggggcggttccccaaacggtctggccgttgggtacatgcttccggcatttactgtggcaagaaatgtaggtaagggagaaatgagagggacaggaagagggcttcagtttgagacactgattttcggggtttgtggaacatggaagagatgatgtctacgatacagttgtctatacaagcctagggcttaggggagaggactggggcacagttgtagatattaggcaatgaacagatgctttggagatcttaaaacagaagccacgtccattaaacttgatacattcctggcggcagcaagaggctagattaactggcgttagtagccatctggcttgggtgctgcagtgctgttatatgaatagtgccctttcatgtctgtatgtaatcacttatgcgtccgagtgatgaaacactaaagaacttttaatatagattttatttttaaaccttacatgctcctcatattaaatttgtagaatacagaaaagaagaaataagaaattattgccatccttagtattacaatatagatacaagctattgaaattttggtttatttccctcacaaacacacacatacaaatatatacacgcactcatgtacacacaaacatgcatagttaagataatattatatataattttgtatcttgcctttttcacttcatattatttgaaattttcttaaatagtttctttggctagtcaatgaaatggacgtgctgtaattcagttagccacgctttattattaaccatttggattattaatgggttttttcttttcttgttataacaatgctatgaggagtatctttatatgtgaatcttagtacatttcctattatttcctttatatagcttttcttttctttattgaacactctactatgaaatattttaagtatgtagagaaataccgactatataatgcatacaaagtatataacatacaaaaacttctccctgtccagactggccaaatcttcatattttgccacatttgcttcaagttcttttgttttctcccaaacagaaatgaactgttcaagacacaggtgaagtcccacatgctcctatcattgatcccatgccctgttccccgtcccagaggaaactgctaatgagatttctggtttgtgattcccatgaaggtttttatagttttttcattatatgcatatatccatacacactatgaaatattattttgcatattttaagactttatgtacatcatgtcacacgctacatatccttcttcaacttgctctattcactcattattctgtttttcacattttctgcattgtaatgcatacagatctaatgcattcttttagtcactacacattctattttatatatgcaccacaagtcatttgcccattctcctgttaatgaacatttaagttgcttgcaatatttttccttagcaactttttgtaccgaatattcttgaagcaatatctgtatgtaaccacctaagactttctctagtgtaaacctgcagaagtggaattgctagcttttaacttttctgtatgttaaatttcgttagaaatttatatatgaggccgggcacagtggctcatgcctgtaatcccagcactttgggaggctgaggtggatggattgcttgaggtcaggagttcgaaaatagcctggccaacatggagaaaacctgtccctactacaaatacaaaaaattagctgggcgtggtggtgtgtacctgtaatcccagctgcttgggaggctgaggcaggagaatcacttgaacctggaaggcagaggttgcagtgagcaccactgcactccaacctgggtgacagagtgagactctgtctcaaaaaaaaaaaaaaaagaaaaaaaagaaaagaaaagaaaaaagaaatgtatatatgagaatttctggaacgaaatgagaaaaacttaccttcatacttgtaatcagtttccacaaaactttcaatacattgtcttatttgatctttacaataaccttatgaggctgcaaggggagtttacctaccctcatttttagatgaggtctctgaggtggttactgcaaagagcagtacagcatgtgacttgaatacagcactggacagcctcattcttcggaagcctttgttcttcattccacacccgcagacttaccccagaacttaccagcttaagacaacaacatttacagtttccgtgggtcaggaagccaggtgccactcacctgcatgcttcctggctcactcatgtgaatgtacacagggttcagttccttgcaggctgttggctgaggcctcccttgactccctgccacacaggcctctccacggagtatctcagaacacggcaccttgctcaccagggcaagcaatagagaggacaagagagagtccaacaagacagaaagtgctagcaagagggcaggaaccatcttttctcacctcattatggaggtgacagactatcacttccattgtattctgttaattagaaccaatcacgaggtctatcccatacgccagggaggagattacacagaggcatgaataccaggacgtggggctcactgagagctgggtcagaagttgcctaccaccccccacccctacaatctccagttggaaaattttcacttcttatctctcccactcctacctacccatatttctggacaacccccaccccaccccttggttctcttttcttttttgcctccatagctttctaattccctacttcatttcttacacagcaatttagctcccactttgtctcactttgatactagaggctaacatctatcacatgcttactacatgccagccactctcctaagtattgtatcttttaacttattcttgtgaacagtatgagctatatattcatattaatccaattttgcagattaagaaatttagcaacagatgagaaagcaaagagaagggggcaacttgtccccaacaacataaaataacacctcccctactatactcatgttctgagagcctatgaagatattttcgtcaataaagattgcttttccggccgggcgccatggctcacgcctgtaatcccagcactttgggaggctgaggcgggcggatcacgaggtcaggagatggagaccatcctggctaacacggtgaaaccttgtctctactgaaaatacaaaaaaattagccaggcgtagtggcgggcgcctgtagtcccagctactcaggaggctgaggcaggagaatggcgtgaacccgggaggcggaggttgcagtgagtcgagatcccgccactgcactccagcctgggccacagagcgagactccgtctcaaaaaaaaaaaaaaaaaaaaaaaaagggattgcttttccctctaaaaggaatcctgccaccaacttttaaataatgcaacatgcttttaaataatgcttatttataagacaaaggtgtgtatgagaattaaaaagttccctttgcttggcttctttattttcccacattaccgttctttagaactatgatcacaggcctccagaactagaaatgccaccaggaagggatgttggtctcacacttgaatggttttcctcctgtgtcacttgacatgtgacaaagttgaacacatgttaactttagaaatgatggacatttatgcaaatctcctcaaggtatcgaagcatcaggtatgaaaattaaggccgggcactgtggctcatgcctataatcccagcactttgggaggctgaggtggcaggatcgcttgagccaggagttccacactaggcaatacagcaaaatcccctctctacaaaacatttaaaaattagccaagtgtggtggtgcacacctgtagtcccagctatttgggaggctgaggtgggaggatcccttgagcccaggaggtcaaggctgcagtgagctgtcacaccactgtatgccagcctgggtgacagggtaagaccctgactacaaaaataacaattataatactaattaaaagaaatttcataaatgtttggcttagttctcacttctggctagagctgaggatgtggaggggacttgatagcaccataatatatcatgtgttcagaatactctgggccttggggacgggtccaatgtcctctgcccacattctgcctctgccttctctcaccctgttggtgaagggcccctgggagcggagtgcatgacattggctgtgccctgtggttgggccccttcattctccttcagacctggcatataggaagcctgcccagaaagcagccgagctgacctccgtccccctgtgactaacctcttacccacaattgtgtctactatgtgtttacagcattgaatctatgagggcaaggacagctgtttcttaactcagggttttcctcaaccctagttctcaatttttagagaccagcaactgtcatacatattcatttattcatttgttcatcaaacatttattgcctgtatgtgccaggttctgtactttttaaaaagtctcctatttttatataataaagttaagctttttgtttttgtgggggttttttgtttgttttgttttgagatggagtcttattctgtcacccaggctggagtacagtggcaccatctccactcattgtagcctctgcctcctgggttcaagcaattctcgtgcctcagcctcccaggtagctgggattacaggcacacgtcactacgcctggctaatttttgtatttttaatagagatggggtttcaccatgttggccagactggtctcaaactcctgacctcaggtgatccacctgcctcggtctcccaaagtgctgggattacaggcgtgagccactgcacccggcctcatatgtattttgaatatgtgtgttagtatcttggcattttataaaattctggatattttacaaaaagactggtcaacttttctgtagaaattaaatgaccactccattagatctgcctctgttttaagagcttcggcagttagaattctctgggggacagtggccactttttattttgtggcttcaacttcaaatttttattttattactatcatctagaaatgaattagttgacatgtacaaagttttattttgtttgtatattgccctgacttttaccacttaagtaacgatcagaaaatcaatgctgaggcctagcaaactcttggcagtagacttaagtaagaattatatgttatattaatatatgtgtatccaatagtaatatcatttgctagctttgccttgggaactaaatggaagttaaggtgaaattcatatcgataatttttatgactttagaattgtaaatgaatgggagcaaggtttctcatattttcttccttgaagtgcttttcttgtggaattttataaattgaaactttaaatgtgagttgttttttgtctttttttttttttgagacggagttttgctcttgttgcccaggctggagtgcagtggcactatctcagctcaccacaacctctgcctcctgggttcaagtgattctcctgcctcagcctcctgagtagctgggattacaggcatgtgccactacatctggctaattttgtatttttagtagagatggagcttctccatgctggtcaggctggtcttgaactcccgacttcaggtgatctgcccacctcagcttcccaaagtctgggattacaggcgtgaaccaccacacgaagcctgagaataatgatttgatattataagtgttaaaaacactcaaatgaaagaatttatatttcaaaatctgttaaaaatattctccctccttgatagcctgaggtttcaaaatttcataaaatgacaattaggtacataaaacttaataactataatgctacggtttgaatgtgtcccctccaagttcatgtgctggaagcttaatacctcctctagtgtcaggaggtatggcctttgggtggtgttcaggtactgaaagccttgccatcatgaatggattaatgttgctataaaaagggcttgcaacaacaggttctctctcttctgcacttctgccacttggtgacatgatgttcctccccacaagaggatgcaccattcaaggtaccaccttgaagcagagagacccggctgtaacttgctggcagcttgttcttggacttcccagccttctgaactgttagaaataaatttctgctctttataaatcacctggcctcaggtattctatggtatcacaaagaagcagactgaggtgtgtcatgagcattttaaagagaagtaacatggtaaatctagaatttggagagagaagacgctgctactcactagtgatgtgaacttggatgacttactagcctacattgaatgagacagtagtttaatagcttagcacttgcctccctgtctttatttttatagaaaatcacacaggttaggatgtttgtgatggagcttgtaaaattataacatgctcatcacatttggggtgtcattggtatataatttgaattccgggacacatgaaaaccttctttttattgagatggagtctcactctgtcacccatgatggagtgcagtggtgcaatcgcagctcactgcaacctctgcctcctgggttgaagcaaatctcatgcctcagcctcctgagtagctgggattacaggtgcccaccaccatgcctggctaattgttttttgtatttttagtagagacatggttttgtcatgttggccaggctggtcttgagaaaaccttctatttttgatccattccttgtgaagtattacttcagccagatgaattttagcagaggtcttgtaattccaggacctcaggggctgggggtaggggaaatagctgggaagtctgtaaagcttctaggtgtgcccctttcaaaggacccccaaggaaatgggtgattcgggtgattttctgaagatttcagccttaatattttagtttacttttgttccccttatttcctcttgtcccttgagaggattccaaccactcagactgaaaacaaggactgtgagagggaagaaacaatatgtacttattccttggacctttgaatttcggagaaaatttttttaaaaccagaagagtcttattttgtgagtccatggacttgcaaaatcttagagttttttcttttttttttttttgagaagtctataaacaccatagaacccattgttccactagtttaaaaaattaagaaatgctagacacttaggttgattccatattttggctattgtgactagtgcttcagttaacaaggaaatgcagatatattcaacatacttatttaatttcctttgtctgcttatcccaggagtgagactgttggatcatatggtagctctatttttgattttttgagaaatgtccatactgtttttcataatggctgtatcaatttacattcccatcaatagtgtgtaaaggttcccttttccccacatccacaccagcccttattattttctaattgggattaagtggtatttcactgtggctttgatttggatttcactggtgattagtgatgttgagcattttttcatttacctgttggtcatttgtatgtcttctcttgaagacaaaaagacttatcaatggatgaatggatttttaaaatgtgatatatataaacaatgggatggtacttagcaatagaaatgaacacaatcctgtcatttgtggcatcatggatgagcctgaaggactttatgttcatggaaataagccaggcacagaaagataaatattgcatgatgtcactcatttgtggagtgtaaaaatgctgatctcgcacaagtacagggtagaatagtggttaccagaggctggggacggtagcagggaggaaattatggggagatatttgtcaaagggtatacaattacagttaggtaagaggaataagttctgatgttctataacacagtagggcacccacagtaaacaatattctggtttataaatattatagtgtgttaaaagtaactagaagagaggattcttaatggtctcaccacaaataaatgataaatgtttgaattgatggacatgctgaataccatgatttgataattacacaatgtatatgtgtattgaaacatcacactatccctcatacatgtgttcaattattatgcatcacttaaaaccaaaataaaaaataaatataaactgtatatattcataaaattgaatcttaaacttttataaaaatgaaaaaatgctattctaaacaaataaatgaataaattatcttgagagaagtaaatagtctgtgccttaagattcaattggtgtattctccatactctgtaaccacagatgttctaagaaggtattcattatcctttgatattaaaactaagacagtattaatagaatattactacaagcttaggacactgtatctataaccttaggacagcataaaaccaagtatagagataataaagacttgaattaaaccaatggtggtgatatttgagagtagactcaagtatgaatgtagtaagaggttttgtagtgatggtttaaatgtcattttgtctactgtttacagtgttcaacgtgttcaaaggaaggattcatactagattggaaattataatttgaattggttagaaaaatggaatttagtttttaatcaatctttgttgaatgaaaatcagtcatcaggtttcatttattggagatatatatatatatatttaaattttgaacattaaataataaaaaagaaaagatttgctgctccagaacagacccacatttgttttaaacttattattgtaagagctttagctcctcagaaagttaaaaatcctattgatatttgattcatgggcttgtataagccaaactgagaatatcctgccaatcatacctgtggctaaagagaacatgcagaatcatacctgtgtgctaaacagaacactgattataatcatcaccagatttttaaagtcacttgcgagtaacttccttacattgaatctccgaactttctatttttttccccaagattttcttatgaaatataaatggcaatttgtttttaatgaaatggccatattttaccttcatactttcagtcacattctaatggttggcaggttgatgcatgcgtcctgctcagttgataccttgcagtgaacaagaggaaagggtttcaattctggactctggaatctagtggtctgattcaacgtgacctgctccctcttaggaattgtgtgacttgggcccattacttaggctctctgtgcctctgttgtcctgttcttaaaaacagaaagaaatttgggaggataaaatgggacagtgtacgtgaagggctgaatccagttcctggcacatagtaagcactaatgaatgggagttattattaatcatccaagcaaaggaactcatttcccccctgatttacacataagagtattcaaaaattcatccagacactgagttccaagcaaattagtaagcttcaaattttacaaatcaatacagagatttcaggtatatgtgacatagattccatttcattacatgcctggagggtcagctaggtcccagcatggcactaggcaagacagagaccaacagttaaaaagagagaggtaattttcttttccttttttttttttttttttttttttttttgagacagaatctcgctctctgttgcccaggctggagtgcagtggtgggatctcagctcactgcaacctccgcctcccaggttcaagcaattctcctgcctcagcctcctgagtagctttgactacaggtgcacaccaccacacctggctaatttgtgtattttttattagagacgggggtctcgccatgttggccaggctggtcttgaactcctgacctcaggtgatccacccgcctcagcctcccaaagtgctgggattgtagatgtgagccaccatgcacgggcaaaaagagagagaggtagttttctaaatcagccttatatcacccctatcgtttgaaaagaattctgccatttctcttctcttgagcattaccctatcacgaaacttatgaagaacaaacaggtccaacaaatgttgggattctgacaacaaatgctcatcactcatcattatttctcgtctgttttctcatgtgtctattcttgcattacacatttccagcacatgttgtgggcatggcctgtgaggtgactacactggggttgggaaggaaggggagtgtggaagggacggcatttatgaagatatcaagaaatctaatagtggctctgacagaggaagtcctgctgaaattcacgtcagcatccctagaaatgaccaaagacttgttacagctgtgagaaaggacaataaagccagtttccctagatccagcaaacgtgtgattatccactagtatatcggcgtgcagacagttcgtggaatacaggccttctagatgtgaatctgaaccactgtttgccctgtctcctttcttgtaggcatacgatggcttaagctccacaatgtcccgccttgccaggacgtgtggaagggagcagctggctaaccccatcgtctcctcaggaaacagcctcttcttgagatttcagtctggcccttccagacagaacagaggcttccgagctcaattcaggcaaggcaagtaccctgtggatcttcccaggcacaagagaaatcttcagtgctctgtttggtgcaacagtgaaatgagacctgtgctcagaaattgatcacagccttctacttaacatgtaaaaaattaaatagaacaaaagaactgtgacttacaattatcccaactcctgatgcttgtaaccttctccttctctgacttcctttggacccgcatctctaacaagtttaaaagtgcttttaagactagaaacagtataaaaaagttttatccaaattcactgatctagcactacccaaggctttacactagaatgggatacactgctatcaattacaagacttgcttgtaatgtattcagatgccagcccctggaagcagtggtttccctcatttctgaatcctgccattgtccaactgaggagtcactgttgttttccatttatttttctttctttgttccctcccttcctcccctcttcttccccttcctctcctccccttccttttcctcatctctctttccctccccttccctttctttccacagggtctctctctgtcacccaggctggagtgcagtggtgcaatcacggctcactgaagcctcgacctcccaggctcaggcaatcctcccacctcagcctcctgagtagctgggactataggtgcacccccacgcctggctattttttttcttttttagagatgggatctgctctgttgcccgggctggtctcaaactcctggcctcaagtgattctcctgtcttagcctcccaccatacctggccatttttgttcttaaatcaccacttctccaagacctttttacccattgcctttcatctgctcgttctaagagatgaaccccttatcccatagtcagagatgacttgtattcagatgactcagaacattcactacaaatacatttagtctgtgtagtcattatgtctatcttagtcaactcgcttatattctgtagtaaagagctctggatggggacagtgcctggatcgaggtctcccaaatacgcaccatagacctttagactttggagcaagacagactatattcttgttgattttaaagaaaaactagtttcctaatagttcttttgcatgttattattcacttgtttgttgcttcatagtaaaaagtccctgctagctttcatccggactgtaacaacctcctgaaagtcacctacccttaccccatctctctccaaagtcgcctgtaaaagccctgctctgatcatgccattggaatgctcaatgtctgtcccgtctccacctggcctggagaataaagctcaagctcctgcagatgttaaccaagagccccagaacccaccctgacctctctccagcgtcagtcacccacatccctggggcaccccatgctccagctgagcctctatagatgctcctctgtgtctgctcaggcagtcccctccctggcctcccttttctcaccctccaagtcctagtttagcctcggcctcctcctcagcaagactcctcttacgccctccagcggtgaccgcctctccctcttcaagactcacatcgaattttgctcttctctagtaatctacagtcatccttatgaagccttattcaattgagtatttattttcctgaaaaaaagaggtcatttataagcagattatccctatgcctatgatttatgagtgggcagtgtaagtgaatccatgcaagaattttgtttgaatgacttaggcaattcatagacatttaatctgttgctttttgccacttcctacttcctgtagttgaagaataattgttaaaaatataaactgtgctcctgttttctcatggtttatgtacagctctccttatggagaactttcttggcgtgcattttagaaataagaagaaaaatcattgatggttttattcatcaaataattgttttgtacggtcagtagaaatgaaaagcatatgacatgtatgtgtgtttgtgtgttccccagcctgcggaggccacatcctcaccagctcatttgatactgtttcctctccacggttccctgccaattatccaaacaatcagaactgcagctggatcattcaagcgcaacctccatgtaagtaacaaaaatgaaaaagaaaaggcacacaggagagaaggtgtctgtgggaaggtcagtctatgagtaaccttcttatctcagtgctaacaatcgatggccttcctcttcatcttttgcaagtcccaattcctgatgtgcttaagaacaagcatttcctaatctgatagggaagtcatttctacagttgcttctaaatttaaaaacaatttcttttttttcatgtcaaggcctagcaaaggttaaaaaacacacacacgcacaacaacacaacacacctacaaccttgctgtattaacaggcgtatgcaggcgtatgagattgggggtaaaccaaaataatcgataaatagtttttgacatgtgtgccttgagtatagctgatgttcaagacagttgctgagtgaacaaatgaagaagagtcacagactggagaatcagtgactcacgggccagaatgcaatgcgcgcacctatccatcaaagcaaacattcataaaacctgggctctcctgcaaggtactattccagcacaggcctagaagaaacattgaataaacgcttactttcttttcttttttggaaccctagaatcttattttctgacctggtaacagtccgatggtaaggacttctgtcctcattttacagacagagaacatcaggaaatgcccctcaaggacatgacagaatggctgcaaagcgggtgatgctggggcccttctgaatcctgtttcagaggagccctgccctcctttgaggtttgcaggaaaatacagtttcaggcataatgtaggaaagtctttaagttcttcactctgcacagtaattaatcgcctgtgtgaaaatagggaagtcacttaagctaatcaggccatgaaaaagtaatctgcaaaatgaagagtttggcttaaatattctctagcactttcccctgggatgtcaggagttaacaaattgctagtatcttcattgacatgcataagatgtggcagccgatgatgtcatccttagccaattcaaacggggaggtggagccccaaagaaagttgccagccagccagaaactgagctgtagataaagaagccccctcccttgaactgagaagtttgtgcctgaggattattttctaatgagttgtaaagcatttagatgaaagatctcactggttcaagaacagcaataggaaaagatcctattctgaagattagggagcttaaagaacaacaaaaagaaaatgtatccaggtgcttgctgttctgcaagtaattcaaaactttcttgataaatgtctctgaaccttagggcactagctctagcctgaaaataaaactgagtgagctaaaatgtgggctccagggagaaaagaatgccttatttacaagcacatgcaaagaatccgaatttaaggaaatgagtctattgagaaaaatgcttctgcgaggaacacagcaatggtgatataaaaactggaaagacggcattttccaacaagatattcccttatagtgcctggaatgaacctacccaggagtcctcttatttaccactgccagtgtttcagatgccacaggcagtttcaaaagcatctattccgttactcttcaaaggaaaccatctattctattactcttcaaaggaaaccatctaggatagaagttgtccccttcccttgctttatcccttcaaccatgtgcaaatccgcctcattcattacttctctgctggagaacccttacatgaaattaccagaagtaaaatttatctccctgtatgttttttaattttaattttattttgtaaaaaaattttattgttaatttttgtgggtacatagtagatgtatatatgtatggggtacatgagatgttttgatacaggcatgcaatgtgaaataatcccatcatggaaatggggtatccatcccttcaagcatttatcctttgtgttacaaataatccaattctactcttttaattatttttaaatgtacaataagttattatcgactacaattaccctgttgtgctatcaaacaggtcttactcattccttctattttttatagtcattaaccatccccacctccccgtcttgccccatctccctgtatgttttatttgccagtactttacgagagagtcttctcttttttcttccagtaaatcatatcaccctctcttttacccactttgaacttgaaagaagcacaacgtgtgcacgtgactttgtagaaattttggatggcggccacgaagacgcgcccctccgaggtacctcagcgttcactcatctacatctgtggtcttggctgtgctttatttatagatccgcatatttataggctgccattctaggttgcaatgtttccaataaatagaaagagcagcctaagccaaataaagatgattagagggtaagaaagcaggcttgaatgtggggttcagggaactcagcctgtttattaatatattcaaacgtgtgaatagtttgtgtatatgttttaaaacatttaaaaattgcagctgctttaaagaatagtggaatgcaacccatcccagcattaggtagcattctatcagaaatttcttgttaatatttgaccaagttcttacattcacatggagtatgtttctttcagccttgtccttagtggaagcgaaaaaaaaagcacttaattagataattaattaattaattccattaaaaatctgtctttttgtttgttagacatcccaataaaattaaagagtgccgctatctagtttctgaaatgctctcaggcaaaacaaacaaacacacacacactacacacacacacacacacacacacacacaccaggccatttaagctttctccgtaaatttcctaacttttgaattttgttgtaaaaacttctcatcctgcactagaagacaaggtctgtcagagaggagactgtttggcctgttgcctaattcccagtgcccaggacagtgtctgagacaatagtgaacaatcaatgaactctccacaccctatgcacacctctcacagcatttgttagtaagcatttgaccaaggataagggtatattatttaacaagctgttacatagcaataccttgcgctgagtactgttctcagtatgttataaatagtaggtcaatccttgtaatcttatgagataggtttcattattttcaatatgcccctttttccaagtgaggaaactgaggcaccaagcacgtaagtcacttgcctaggatcacacaactagcaaatggctgagccaggggctgaatccaggtagcctggctccagcatccacacttttctgtgctacaaaatagtggatattagtgcatttatttgtatgggtccgactgggctggagatttttgctttaggtacatgtgtcccttggtcatctaagtttttcctctggtcctattgttcttgatcatgtttataaatcacctctcctatatatagctcctatatatagtttattttaaatcatcaggtattgtctcaaacattgaccctgaatgaagtggttctcctagtggcaatttcttcactttgttttggtctcttgtaattcgagtaaagatgtgtttcctagaaacagcggtctctgccatgttgtcattcattctccttgtcattatcttcattatttaggccgttactgtggcaccgacatgccccatcctatcacatccttcagcagcgccctgacgctgagattcgtctctgattctagcatcagtgctgggggtttccacaccacggtcaccgcatcagtgtcgggtaagaaaccctagcacctgactctagcggttaaaagggatgtggtagaaattcttggtttgttattggggactctgaccttcgtagttgggagccagtttcctgagatcacctctgggccaaatcttaccttcttcccaattaagtgatcgtgttgtcaattctagcaataatgaactctggaagtgtggaggattggttggaaatgtagctgtcttttcagctacatgccatgctatcagatgacttggtgttcttttgttgtttttgagatggagtctcacttggtcgcccaggttggagtgcaatggcacggtcttggctcactgcaacctctgcctccccaattcaagcgattctcctgcctcagcctcctgagtagctgggattacaggcacttgccaccacacctggctaatttttgtatttttagtagagacgaggtttcactatgttggccagactggtctcaaactcctgacctcgtgatccaccagcctcggcctcccaaagtggtgggattacaggtgtgagccacctcgctcaccctggtgttctttttggcttgtttgttaaggcagccctaacctggggaggagaggaacgaggagctacccaggactgggtttcttagcctcttagcccagagagtgctgttggtcactgccatcttccttgtttttagtggttaaaagctacagaacacctagaagattggtgtgtgcatttcggtgctctactgagagggaaagcaagcatgctgcgttgggttctaggccagggttgaatagaatcctggtcacaaaagccaagtggctgtaggatggtaaacaagtcttttattcttcaaagttaccgttcacaggaagaaacggctttgagaaaagacattgcagaaattccttctaatccaccacactgcatggcccttggtcttcagtttgcagaattgttcccttattttatatgacatgaatgttttaaaatgtgagatggaaatactatctattcttttacattgataatggctctagcgttctttctcctttattttatagtgtctgatgcagtctttgctctgatactcactttatttctattttcttccagcttgtggtggaacgttctacatggctgaaggcatcttcaacagccctggctacccagacatttatccccctaatgtggaatgtgtctggaacatcgtcagttcccctggcaaccggctccagctgtcttttatgtaaatccttttttatggtgtattgtttcagtgctaatgaatctgtaggaaagaagttctggtgctaataggatgggcaactcatagtgtacgtgaaatttaggaagtatttttccaaatttcctctgtttcagtcatagtttgagttataaatagcatgaagtttctctcgaccatggttcttgggtcctgtctaacatttccaaaagtacattcttgagtccttggtgaatgaatgaatctgtggcgcattcatgttcagagtacaggaatcttatctttttttttggaattagacacattaaggttcttccagggaatcactagtattgtttattccagcagagccctcccatctcaattaagcattctttacgcttttatcttatccctacctcaatccacctttccttctatttctgtcagaagaatggttctggggctgggtgtagtggctcatgcctgtaatcccgcactttgggaggccaaggcgggtggatcacttgagatcaagagttcgagaccagcccggccaacatgacgaaaccccgtctctactaaaaatacaaaaattagccaggagtggtggcgggcacctgtaatcccagctgcttgggaggctgaggcaggagaatgccctgaacctgggaggtggaggttgtggtgcactgagattgagccactgcactccagcttgggcaacagagtgagactccatcttaaaaaaaaaaaaaaaaaaaaaaaggaatggttttggaagtttttttaacttccaaacttaaacttacttaaactttaaacttaattttttagaacactttcatattcctcattgcactataacactttttgaaatggactataaatatggaattagtagtaggatcctatcacattctgagtggtcttagattaaattagacagcaacaataatatgtcctagagtagatgtaaaaagcacacattttaatcaactgatagagaggtatatgtgacacgtcacactgataatggatgcttattatatattgagagataagatcctggaatttaaattgccgttttgaattgaaatttatttaccagtctattttacatattactaggctgtggttgggattgctaattctgttttgaagcgaatataagtaacttatggttgagagaagaggattgttttgaggaccctgtcctgtttatttaaaagtcttacttttcttccaagacttgctaatctgtgcatcaggaactgattaaaaatatgggacaactatcctatttgtggaccaagttcaaacatctcaagttgctttttttaatccatcaatcagacagagcctcttcagggtataagtggccttgtgttaaaacaaagacaccctctgcatgccgaaaggcaatgcaagtttaagctgcctcacaggaaggaggttttggtttgtctttttttttttttttttttttttggagacacagtctggctctgttgcccaggctggagtgcaatggagtgacctcagctcactgaaacgtcgcctccggggtttaagctattctcctgcctcagcctcctgagtagctaggattacaggcacatgccaccatcccaggctagtttttatatttttagtagtgatggagtttcaccatgttggccaagctggtctcgaactcccaacttcaagtaattcacccaccttggcctcccaaagtgctgggattacaggcatgagccaccgtgcctggcctggtttgtctttgtcttcactaagagcacagcgttctggatgggaagaaatctatatactttataatgtttaccagacatatatttattctttcactcaacagatatttattaagctcctaatatgtgctaggcatgtagttggcacatgctactctcctatgaggtgccttctatatattgatcaataaaacaccatcattgtccttagaataaaatccaaagcccttcgcacagctttagtaggcctatcagaattgccaaataaaatgatttttttttttggtcttttcctgtttgtctctaccacattcacattgttgactgctctcattcagtggttgccaggaactgagctaggtgttcaagacagataagatttcaggtcttgacaaattactcataagccaacattaagaagctatttaattaaattcattttatttctgtgggataataataacaagtttctataaacaaatttatagtaatttcaaatttctaggactgtgaaggttaaagaagatgtcaaatttaaaacgcataccacacagctagtgcatagcaaatgtttggtgacttaattctctcaatctttaccatttctgaagtatcttctgtgatagctcacaaataaatccaaacgggcagcactaggctctccttccagaggatgggagattacacacacagaaagcaagtttcatctatttcagtgcttaatagacattacattttaattaccatatagaacatcgtaatgactcagctatttcctttctcgcctgtaagaagttaattttgattcctctgagttacttgcttgagttttatttttaaaatggacgttttaggctgcaagatgcctctttttttgcagttgattaatgagaaggcaaggcctgtgagttatttctgccctggtctaaattctatccagatggatgcttggaaacattaccctggggtgtgtgagagcgtatgagaagcatgtgtatcacatcaagttctaaaacatggggctgggattgtggtgaaactgagtagggaagaagactggagaaattatggttgaatctgcaacaaaaaggaacggggagaaataaaacctaaaaaggagttttttgtaagacatatatttaaccatttattacccataatatgaccaaaaatgtgaatatggtaaattgttttcttctgcttctcagaaagcagaaagggaagaaagggagatcattttcctcagaaggtaaattacatgcagttgtctctaaaatctttctattcaaagtgcagtgcaatctttctgaccagttacttcacccctgcggtttggtgggcagggaattgacagaaattgtattttatacttgcagagtgcttttagaaagtgataggtctcagttcaagaatcagaatgagataataagaaacagtgattgtactatttttgttccacatcctacatttactaacagatctaagccaaagggtgtagttgcttataaaatgtaccagcctaaagcaaagacttccaagcataataaagctttttttatagtttaatttaatccttctaggtatttgcctaccaccatgtccaacggaatgtcttttctgccatctagcactggattgcagtagtcaagtacttagaaaagaccttcactttgtaatcttctggagcatcggacagaatgctaatgtgcatgttgatcatctaggatcttgctgaaattcactttctcactgagttggttggtggggccagattccttgtttcaaacaagctctccggtgatgccgatgttgctggattatgcactttgcatagaaagattttagaggcaacttcgtgtaatttacgttctgaggaaaatgatctccctttcttccctttctgctttctgagaagcagaagaaaacaattttgcgtatttcacattgttgatcatattatgagtaataaaattgagcctgaatgtatacacaaaagttggcagccatcccaaagatggatttagaccaattccttgcaaaataaaaaaaagattgaagatagaaatattgtgttataaatcatcagattgtcaaaggagacaaatatgtggtttgttttgtctgatgtggatatatcctgatttcaattatcagttatagcttgctgtgaaaattccatctagtctagtccagatggtctatactgtagtgacccaccttggtgggattctgagagccaccagcttaccaccaggcttactgatttggttagagacctaccaatgctagtatctggcttgagagctaggttagagcagagctgaccagttacttcacccctgtggtctggtaggcagggagtgaccagagatgtgcctggtatattgattagtggtagggcttgaggtggtcagagcctccaggctggttatctctaactattctcctccattagctgagatagagccccaggggagcactatacttagcataaagtaaaatcttgccatggataatgttgagcattaacagaaagatacacatgacagagaagtacatttttcctttcctttccccttccccttccccttgccttccgttcccctcccttcccttcccttcctttcccttccccttccccttcccccttcccttccttttcccttcccttcccttccttttcccttcccttcccttccctttttcctttaccctttcccctttcctgtttgttcatgctttcatttcattggggtataaacctagaagtgaaattgctggttcatatgataatactatgtttaactttttgaggaaccaccaaacttttttatagggatggactattttacattcccgttagtaatgcgtaagagttctaatttctccatatcctcatcagcacttcttattttctatttttaaataatagtcttcctggtggtttgtagtgttatctctttgtggttttgatttgcatttctctaatgactaataatgtttgaaaatcttttcatgtttttattggccattcataaatcttctttggagaaatgtgtattcggtttgttttccattttaattgggttatttgtttttaattttcgagttgcaggagttattttatattcaggatactaccttggtcatgtgtttttattttctttgggtatatatttaggggtggaatttctgggcattaattggatgtacatttaattttatgagaaactcccaaataattattcaaagtggctatgtcagtatgcagtcccacgaggaatatataagacttcagttgctttgcacgcttgtcaacaattgatcttgtcagccttttaattttagcccttatgatgggtgtggaatgatatctgactgtggtatttaagttgcattgctctgatgactaatcatgcagagtacttttcacattcttggtagccattttcttgtcttcttttatgaatatctgttcaagccctttgtccacttttaatttggttgttttttcattatctgtaggaattccttttatatttcaactttgagtcccttgctagataaatgctttacgattatctcccatttccccaccccggtctgtaacttgccttttcatttttttaaatatatatatattttctggacagagtctcactctgttgcataggctggagtgagtggcacgatcacccctcacttcagcctctatctcccaggcttaagccatcttcctgcctcagcctcccaagtagctgggattataggcacaggccaccacacatagctacattttattttttgtagagagggggtttcactgtgttgctcaggctggtctcaaactcctgggttcaagtgatcctcccacctcagcctcccaaagtgctgagattatggttgtgagctaccacacgcagcctattcattttcttattcatgtctttaatgaaatgtttatttatgaattcaaatttattaattttttatcttgtggttagtgctttttgcattctatgtaagaaatatttgcccatcccaaggtcacaaagatttttctccgtgttttcttctaggatctttatgtttctagcctttatatttacatccttgagaaatattaagttagtttctgtgtacgaagataggcagaggtagaggttctttttttcctctctctccataaggatatccgttattgcatcaccatttgttaaaatgagttttccccttgatttgtcttggcaccatggattgaattggattgacagtgtatttgtgggtccccttctggaaattctttcctattccattcatccatttgtctacccttacaccaataccactttatcttgagtagctcatgtttttaagcagtaaggccaagttttgaaagtactcaactagcacctacatgttccagactctttagatatgttacctatgaacatcatatgaggtagatactatttcctatcctcgactccccaacacatcgtagttgcagaatataagacaagttgaataggtcacattcaagcaccagcgggtgttgttacaaatcccataattttgctgcctctccagaaattaagtacatacacctttgcagcgcatttaagtgccacctaaatgatcccatcatattgccccagttacatgttttaatggtttctttttttttattatttaccttcagccaacccacaccatgtcttagaggtactcagtgttttaaacaaaccaggtatctcgtggttttctgaatatgtcccgcccttctctgcacatgtgccttggtggcatgcttctttgcccaccatctatagtgcttacatccagctcacatgtatatttccatctcaaaaagtcttcccatcaagctattgcagagcaccacaatcaaatatgatgcctctgctttgcaattcttaaacgccactttataactctgatggcactcacactattctgccttatatattttttttctgtattctcgtccagttttgcccactaggaagaaaactccttgatggaagtgtattcgtcgtctttgtagctattggatacacatttcaacaagtccgagtgaaagaaattttttgagacagccaaataatgttgtgatcaaagttaaagaaagtttaaaaaagtgaacgggttaacctagcatgtgatccgggagaatcccaaagtctattctctcaatttaatccctttaaatatttttttccccaaatcagatctttccagttggaagactctcaggactgcagcagagattttgtggagatccgtgaaggaaatgccacgggtcacttggtgggacgatactgtggaaactccttccctctcaattattcttccatcgttggacataccctgtgggtcagatttatctcagatggttctggcagcggcacgggcttccaggccacatttatgaagagtaagttgtttctattttagtgatagcttccagaatatgtcttacaaactagaaataataattttctcagtaatatattaagcaagaacaatcctaaactctacactattttcctacattgtctttgtgaattaccttataacatattagaaaaactgaattgcatatgaatggctcaataagggcaagggagagcactctcaatggttctattgttctttttaagctctaatttctacctaatgttaaattagtttttttcatgacgttgtgttagagtctggtaatatattatagtttgggtttggtgtatttatatcaagtgtgtttcatttgatttcataaactctacgttcttcacatttaagacatttagtattactttgggattggcttaagtgctcacatataacaacaataggggattcttctaatagtataaaatgttaaatatttttattctctagctcaacttttccattattggctatttcatatgtaatttcaaactatcagtttttcttgtaaatttctttaaatgttccattcttttgaaaaacaaagtaaaatagataaaccaaaattagagagtggggctgctcaccccaccttcccatgtccccaagtcccctaggggctcagaaccccttttcacatgggaagttgtggcctcttttcacaccatgcaacgttttaaggaccttttctaaggaagtgatagcccagaaaccaaaaaggaggcagtatttctttccctagtcagaaaagaaatcacagtcaattaaaagtccatccttttcaacaccctttgccttttgtttttttcatttgattaaagagcaattctaagtgggtctgatttactactctgtcttccctcctagtatttggcaatgataatattgtgggaactcatgggaaagtcgcctctcctttctggcctgaaaactacccacataactccaattaccaatggacagtaaatgtgaatgcatctcacgttgtccatggtagaatcttggagatggacatagaagaaatacaaaactgctattatgacaaattaagggtgagtttccacatgcaatcaatgttcataaatattggtgaattgctattggtaaaaataaatccaaggtaacgtctattcaagcatttgcaaatcatgtgggatagtctgctctaaatcatgtttagagcagactgcctctagattacatggacaaaggcaatttcagtattgtatttattattttccatttcatatctaaggggttttttaggattattataattttcctgttgagctttgtctaagcatgcatgtatgtcctaaataagtatttattctgtcttatttcctactatcctctttgtttttatgttagagtattaaaaattttaatgatcatataaaaataaatataaatataaaaatcatggtgatcattgctatccagacattggctaccatatcagttccagaaacacaatcggatgcttacaggctatgaccccaccttattcatcttggattcttggtcatgaatagatcccagtgcctgatgggtgcccaatatgtatgggaatgactattacataatttgtttggtagagtattttataataactgttcatatgaatttgtcctgagctatttaaaaattatcacagaatatgcctcaaaataggtaatttgagattttaaaaccaaaggtaggagatttactaagtgctttgaacatggtgagccctacaagttttggctattttgttgtcattaattcttctttccttctgtggaaatatggactcctttaggatacctgtccactttctctcattaaagcttttctcttcttgttattttcccttctttcttcctaattcctccctttgaagccccaaagcacatttattaagtactgttggtaggcaaccatcctggttcctatttttccatccacaaattttactgtaaatcatcttatgagtgattcccacagtgcatgtttattaatataattctgcaacaaagatgcaaatgttttcaaaacattaaattaccttcaataatattttatattctctggcagtatgtgttttaagctaaaattaaatgtttactcatttgtcatttttttgttatgataacattgtaataatataaggcatcttttttattttatctttttatgaagaaaaatatagataatacaatgctctattatctgtttttatgtacagatctatgatgggcctagcattcacgcccgcctaattggagcttactgtggtacccagactgaatctttcagctccactggaaattctttgacatttcatttttactccgactcttcaatctcagggaagggattccttctggagtggtttgcagtggatgcacctgatggtgttttacctaccattgctccaggtgtgtttggtaataaatgaagttctttttaggactgatatgtgcaggccaatgtttcaaaggatcctatcataacaggggtcagatataaaaataagtacagccccaaagcccttccaccatatgttcagatgttgttttaaattcataaacactaccttttgtagaaattgtacgtttctttctaaaaaatgcaggtcccattatattttttatattaattaggggcttgatatccataagatcgtctacttacaatttctagagaccactttagaaatccctgaaaatttgatttgcagatactacacatgtacattcacacacacacacaatcagttagttaaggatcaactcataaaagtaactatttttcctctgcattttatttcaaatgtagcttcagaaatgcttcagtttctccttagctggttgtaaatttccatgtttcaaagtaaaatgggccgaattttaaacttttattttacttttttacattcctaatcccctcagtgaaagtgatattgagctagcattgtttggggagacttttttcttgaaaaatttttaaatgagaccgggtgcggtggctgatgcctgtaatcccagcatttttggaggcagaggtagacggatcacttgtggtcgggagttcgagactagcctggccaacatggcaaaaccccatctctactaaaaatacaaaaattagctgggcgtggtggagcgcgtctgtagcctcagctactcgggaggctgagacatgagaattgcctgaaccaggaggcagagtagagtttgtagtgagccgagaacatgccactgcgctccagcctgggcgacagagtgagactccgtttcgaaaagaaaagaaaagcaatttatttaaatgaatttgagcgtttcttatggatttcaggattgacatagaagaaattaatcagatatttcttggaggatattctaagtccttgaatgcttgattggaacacagaatcacggtatctcattgaagaatattcgaactctgaacttgttctatgacttaaaagattagcctatttgcttctaacttcttatatcagcagaagtcactaatgaagataatttgtacttatatttatttaatgtcccttagtattccattctgaaatgttgttcctacctctctaataaggtgctttcatgacactgaatacaaatctcttacttaaaatattgatctgtctatctaagagcaaagaaccatcagcaagactgacaaatgcaatttagaggcaacatttaaatctggatggatatatccagagctcttagaaataaacttgagttaagctttcttttatatttacaaccctcaaggtagaaaaggaattatttacttgtgtaaaatattataccaacaaattttcttctaatattttattacgaaatttcataattatatgatgtaagtggacaggtgaagaagagagccataaaccttatttttcttagtcaagaagaaaaagaaaaaaggaaagtaaggggtcaagagaattttagagtttactaattatctagatggcataagtgattatcctgtaatgataccacactgtgaaagtgtcattaaaacttaaaaaaccttaatattttgaaatatgtcaacttattgagcattgtcctatcagtatttctttctttttttttttctttttttttttttttttgagatggagtctcgctctgtcgcccaggctggagtgcagtggcacaatctcggctctctgcaagctccgcctcccgagttcataccattctcctgcctcagcctcccaagtagctaggactacaggtgcccaccaccacacctggctgatttttttgtatttttagtacagatggggtttcaccgtgttaggcaggatggtctcgatctcctgacctcatgatctgcccacctcggcctcccaaagtgctagaattacaggcgtgagccactgcatccgtcctgtcctatcagcatttcttatacacacatatatttattttaaatcaacgcatatttattgagaatttattatggatacactgagaagactaagaaaggaaaatgaggtacaatctctactctccaggagcttaaaagtaatgggaaccaggcacagtggctcatgcctataatcccagcactttgggaggctgaggcaggagggttgcttgaagcccaggagtttgagaccagcctgggcaacagagggagaccccatctctacaaaagattaaaaaaattaggtaggcatggtggtgcatgcctgtagtcccagctactcaggaggcagaggcaggggaatcacttgagcctacatgctgccagtgagcagtgatcatgacactgcactccagtgagaccctgtcctaaaaataaatacataaatagtaaaaataaataataaataaaagagattgggaaagaaaaaacactcatatgtgagttaagtaatggtatcgtaattaaatgggtacatgacaaagcaaatggtaacagtagcaaataagcaagggaagaaaaatgagcttactgtggactagggtcaactgaaggaaattcaatgtgtcaagtaggaaaagcagtcagtgtgtcagtcaggaaaagctcagccatatggcggtaacaaacaatttcaaactcttaggtgctgaaaacaacaggtctccttctacatgttcctctcgtgttaactgggtgcctctcatcatccatcacttcctaactcaggctgttggagctgccattgtctgcgatattgcctgagaccatggcagtaggcaaaagagcccttggatgtctcggtttaaaagtgctcactgtaaagtaacacatgccttttgctcatagttcattggccaaaactggtcaaatggcctctctcagccacttgcagaatgcagttctaccatgtgtttggaagtggagacaaaggaaatatttggcaaacagcactaatgacccacagtcattataaccatattttacaaattcaagataagaaatatttcacatagaggaaaaccttaaaatttgaagatactggataacattcagcattcagattttccatgtgaaattgctttaaaaaaatctgtagcctacatagtaatagggtaaagaaatcaggacctagttctacaacattttatattcacttcctgttggccctgataagattcaaacatattatggtgtacaagttgtaaacttctgaaatggtgaagattggatctctgaaatatattgctacataaaagtgatggcaaaaataattgttaaaatcaactttttgagaactctggaaatagaccaaagccttatagcaatctgcggcatatttattcaagaaaaatcactgaatctaagtaagagtcatttttgtggcattctcttcctattcccatctctctctctcctcctagctttgtagtagcctcatgaccacagtagctgtgaaaatgagcagctttaacagctgtgggtggtggggccgcagaggtccagaaaacagcgcatctcctcagcattgccattattccagttcagcaacttcctggaaaactgcattctcaggtcttgtcttcacaggacctgggcaagagctcactcttttgtaaacagccctgtccctggggtctttgccgaaaacaatcagcaacagctgtttcacatcacaaccgtgcaaggcagtgacaccagttacagctaatgagaaactgaccagtaaacttgaaaggaaaaaatggggaaggagatgcccactggggctttgaaaagctccgacatgtttctggaaatctagaaggccacacacatagcccagctgtgcacatgcccaaaaatagaccccgagaaggacctaatctgtcaactcaaaattgcctagatataaattacaaaagtaactacgcaaaaatgataaagaaacatgagaaacacaggaatgaatacagttctacctcagtaatacaggggatcctctacgtgtctttattgatgcctaaatagtcagcacttgatattaaatgggttatatagcaaaattatggtgaaaatggagaacacaatgcattttttttacatcaaagatcaattgcggaaattgcagctttccgaatcagtgggttacatacgatattcattgatttctctgagaaattgtttcaattggttgcttcttttcagtagagggctgtcactttcaagtgaaaaagtgctagctagcgtcttttccattagggctgtgtcaaagatgttgctttctattctacaggtgcttgtggtggcttcctgaggacgggagatgcacccgtgtttctcttctccccgggctggcctgacagttacagtaatagagtggactgtacgtggctcatccaggctcccgactctaccgtggaactcaacattctttccctggacattgaatctcaccgaacgtgtgcctatgatagccttgtgatacgagatggtgagaacattataaagaatgctgagtttcaaccctgacacataattagttctagtccattatcatcagacttgcatactgcctccatccgtttggtttggaattacacagatattatggtcaaggaaggcatcagtaccagaaatggctacaacttctgaaggacatagaaagtattaaattaccggtcacagaatatcaggaatagcacatttctataaggaaaaaaggcttttttagaggcttaagaaggaaagaatagtctgaatgtcaacattgttcacctgtcctattgagatacctctgagataaatattgatattttatgtttctggctgaaaaaaatacttataattgtaatgtgactggacatagtggttcacaccataatcccagcactttgggaggtcgaggagaaggatcacttgagtccaagagttccagaccagcctgggcagcagaatgagaccctgtctctaaaataataataagaagaatataaaatagtaatgtattcatttctctttgtcccctgaatgtgggtagaataggtagagttaaggggtgatattgttgtattctttcctttgtacacaggcatggtgttgctatgtgacataaagttagagacataaatattgctgatgtatgccttatacaaaattgggcttcacagtctgcatggactggaatgaaggaggacagcagaaaggccacatcctccacgtcagtatttctcagtgtggcccccagatccacagcatcatttgttagatgtacatgttctcagcaaaaagaaacgtgtttgtctttggcccacaggttgctagtgtgcaagatcttgtctcccttatccctgatccctagacccctgccgagtgagaaaaatcgaatggtgaaggtgctttatgtcccttctgtagaggcagaacactaagtagagactcaaatcaatcatacacacatgatgagatgtcaaagcatgacactccccctttttcccatcagcaatcggctatcagcacgttgcacagaggagtatcaaagcaccagaatgccctcttcacatctaagccttcctgtgcatactgaaatttaaaacttttcatgtaatggaaaggatgtgcatccttgcacacatattctagtgttcagaacctactagaagttttaaaaaatatctttgaaaaaaatcttaagtaggtaactgcatctatgaagtaaattatggttattcttttaaaatcacattccattgagttgtttttgttccatcactaacttctcttggaagcagagagtctggggagcagtccttttttcctgtgtggctttgcacaggtcacaaagtggctccaaacccgttctacctgtgagatagacaaatacctccctcacaggctttttctgaggattaaggaaagtaataaatgaaatctttttagcaaaagtacaagcattttgtagatgatgaatttggaatagtttagatttcagtttacttagatggaaatttctaagagaggtttaatcagtgcccttgctcaggcacagggcggcttgaaagagctaaagaaactcaggtgcgtgccaaaacaacacaaatgttttaaagtggttatgcggcctttccgtatggattcctttttatgcactggcaatgtgagtagatgctcaataaggttccttccttcctcatttgtttaattatttattcaagaaatagttattgagtgcctggtctgtgtcagttggtgagtattgtagtcatttacacattgttaatatatttttatgactaaatttgatgtttttttttttttgagacggagtctcactcttttgtccaggccggactgcagtggcgctatcttggctcactgcaaactctgcctcccgggttcatgccattctcctgcctcagcctccctaatagctgggactataggcacccgccaccgcactcagctaattttttttttttttgtatttttagtagaggtggggtttcactgtgttaaccaggatggtcttgatctcctgacctcgtgatctgcccaccttggcctcccaaagtgctgtgattacaggtgtgagccaccacacctggcctatgactaaattttaaatcccacttcaattatttgttctttgcccagccagccttttgcttctgagtagcagaagcatgtaacattctgaagcaaatatctaaagccaactggccacagacaaagatacttataggctattcctgctcatgcaattggcctgtcatcacaggcctttggccgtatggaggctgtgaaccttcctgggctaccccagagagggtcatgcagcattcttgggagaactgagtcactgtcccacctgcttattcattttatagagttgccatggttcaaaatgaatcagtttcttccagaccacgcatctacccattctgtataccaaagatccctccaaactgagagtccatgaaactacattggtcctagcaaaacttttaaatagaaaagaaattgtataaaaaaatcagtaatcctttaatctagttccagatcttaagtgtactttcttcatgaccttagataaatcatttaatagcatggttttggggcatctgaggttaatctgcaaaggttaacatcactgttaacttctatctctatgcccttgcatacagcaaagtggcttgtaactcctgtaagattcagttcctcatatacaaaatggggataaaaataaatgcccacctaatagtgtcactgtgaacataaaatcagatagtacatgtgaagcacttaaaggggtatatactaattgctcaataaatgtcagtcttgaataatcttggggcctcagtgtctatatctgtaaattgaagaggttggactagagaaagaattgccaagttgccttctagtgctagcctttactgttctttgacttcccctcctctttaaagattaggctcaagattaggctcaatctttctgcaatctatatgttgaggttttggaaggctccagaaataccccagtactcagtatgaagactgaaggggtggatgggcaagtaacaaaccatctgtgatttttgggtcatcttcccactaatgagtaggctaatcaacaagcacttattttgagataagcattgtttcaccagatgatctggagtgaattttagaaaagaaatcaaaatcaatagactcaactcactttcatccagtgataaaatatacacgtgaactaataacatataataaacttcaaaattttgtagtacaggtaatcagagaataagtcaacaaaaaataatattgggtgaaatgtgtagcaaaatagcataatgaagtgcacttactataaatgcaaaagaactataagagatacacttttgaattataaagaatgcaaaagtttccagcgatcagaaaccctccaaagaatgccattttgagcattttgtatttataactctgccattacatttgtaatcacaagaatagaaaataacttattttctaaagtggttaataatgaatgagtttcaagttgtagtcagtgccacaaagaatccatgtggctggttgtataaaagggcatatttactcatgtctcatattctatttttgttttttataaactcgagatttattaattctctgccttaggacaaaagagaaaaaaacaacatattttcccagccacggcatccaagtctgctataatcccctttgctccattttggtttcagccggcacaggggctttgatcaaagcttatatccaagataatcaagatgaaaggagacgtgtggtgcccctgctgtcctttgtgtctctgtgggggtggggcacagttgctggaactcttctctcaccctccacacaaatgtgtggttgtttttataccaaaacaaacaaaagcaatgaacaaacacagatgaaaagttttgtttaaaaaaaccccactggcactgaagaaagggcacatacaattgcataccttttggtgaatgatattgtaacattagtgtaggatctgaggtcaaagagccaactgttttttttttttcttttacctacttgaccttcagcaatcagagtaactgaggtcagagtctctaatcgacagacatatcatcactgggtctccatcgcttcccaatcccaggtactctgattttgagttttagtgacagggagaactggcagccagtttttagaaagacggtggaaactgtcaaagacgtctttatcaaaaagggtaaagaacccagcactttgggaggctgaggagggcggatcacttgagatgaggagttcaagaccagcctggccaacatggtaaaacccctgcctctactaaaaatacaataattagtcagaagtggtggttcacccctataaaaccagctactcaggaggctgaggcaggagaatcacttgaaccccagaggcagaggctgcattaaaccgagactgtgccactgcactccagcctgcgcaacagaggaagactccatctcaaaaaaaaaaaaaaaggggggggtggggtggggtgggggtaaagaaaagggcaggaagcaccattgcaagctggagccagaatgatatcacccctgaggggtccttctttttgaggatcccattatctcctacgagtcctgatgttctgagaaaaatgtgtgagctgctttggctaagctgcaaatgattgtagagtagattctcaagatgtattttcatgttgttccctttctttcaacgtaggagataataacttggcccagcagctagcagttctctgtggcagagagatccctgggcccatccggtctactggagagtacatgttcatccgcttcacctcggactccagtgtaaccagggcaggcttcaatgcatcctttcacaagagtaatgagttcaaatattttttaatcccatgttatctcatctcctctcttttcctctctctttctctcttcctaatataatgtttttgggcaccaggacacaagacaagtcagaggacatgggtctctgcccaggctctggatggctggctccccttacatcagtgctgagtcctcatccaaagcactggggccaagtcgtacaaaagtgtgctgccttcaggtctctggtgtggcatcttcgctccaaaggaggtgtgtccagggaatgcatgagagagagctttaaagcaatttttcagcctagctgagggctggaactagatagagcacagctcatatccataactcatcgaaggagcaaaacgtcatcatttattctcataaattacttggttgaagtcagccatctgagggttggcaggaagagtttgttgctcttgaaatatgaatttgatgagtcaaaagcgggcaccatatatgggataccatcatgcacagtatgattgagacttttcaaacttgacatgtgaagtccagtaacagccttaaatccaaactaactgaaaggtgataaagtagtccaaggaagagtgaaagactctcatgttttgatcaaaaaacataattttaaagtagattctcaatctaacattaaaaattaatctaatatttcctccatgcttatatataccttttataaagtagggagcaactgaagataagttgtgttcctcacgctcaagggaggcaggctgcatagtggcttaagagcatgggctttggaactagacctaagatacattttcacctctacaatttaactagctgtgtgagatgtctgcccttactgatgagcttctggtccctgacaactggagaattaatgcctcctccttttatcctcttcctttatctcctgccctctcactctcatgtatatattactatgtatcgcaactcattatacatacatacatgtatacacatgtatgtatatagtaagggtggaaccattggaattaatatgtgtgtttatatatgtatataatatatataaatatgtgtgtgtgtctatgtatatatacatacttggcagctcccggtctagaatgtatttcaaatttaacctgtgagtggtataatggactttggagactcagaagtggggaggatgggtggggtatgagggataaaaaactacatattaggtgtaatgtatactagtcagggaaccagtgcactaaaatatagacttcaccagtatgcaattcatccatgtaacgaaaaaccacttgtatcccaattagactagatagatagatagatagatagatagatagatagaaaaaaaaatttcacctttgaaagttgaacactttattcccacccttttccatgccaccaccccccaattctacactcctcataatctcagcaaatggaaagtacatttttctcattatttaagtcaaaatcttgatgttatttttgacttttctgtttgtctcacacttaaccatcaacaaatcacactggctctaccctcacaatgtatctagattccaaccacgcctctccatttctgttgctaccagcctagcccgtgcacctatcatctctccttggcctcaggcggtcccctccttattggacactctgctcctgtccttccctgtcctccaccccttacagtctaaggactgcacatagagtgacattttcaaacttaagtgagatcatgccattctgatgcccaaaacccttcaacatcttcctcttcttattcagaataagtcttttcagtttcctgcatgacctagccatgctacctttggaatctctcattctgcctcatccattctgacttccatgatgtacctctaacacatcaagcctttacactgttttctgaactggaatgttttctcccccataactatctggcttgatccttcatttcattcatgtctctgctaagatgttactccaatgacgtggcttttctaacttaactctaacaataaagtacccttctccctcctctcatccatttttctttatagaatttatcaccatctcacatatcatgtatttgtttattgtatgtcttccccatctataaagaaatctttatgaaagcaggtaatttgtcttgtttacttacctctgtatcccagatctcaatgaccaccacaaactgagtagccaatagcatgtgctcaatacatgcttgttatgataatcatttcctgcactctggctttattttcaagcatttttattgcctccactttgaaaaccccccaagaaaactaagaaagcataaaaatccagttgccaatgctatttaaataaccgacctttgtttctttgtgggaaggctgcggtggatatttgcatgcagacagagggatcatcacgtcccccaagtatccagagacttacccatccaacctcaactgttcttggcacgtcctggtccaaagtggcctgaccattgctgtccattttgaacagcctttccagattccaaatggagattcttcttgcaaccagggggattacttggtggtaggtcttgctgctaccctttctaattacattttccatagacttcattcagaaaacaaaatgataatttttctctcctgggacataaatggataagaattgcgtactccttcttttgcaatgtaaaggagttgatgaaattttaatttgtctttccagctaagaaatggtcctgatatctgttctccacccttgggaccccctggaggaaatggtcatttttgtggcagtcatgcttcatcaactctgttcacctcggataatcaaatgtttgttcagtttatttctgatcacagtaatgaagggcaaggatttaaaatcaaatatgaggcaaagagtttaggtaagtattttcactgagaattatatctgcttttcctgcaattgcttgatcttctttgatataaaattttcttttctgaaccaacagtaatagaattaataagaatgcctactctcaagtacttattatatttgatacattcaatatctcatcgtgactacttttcaagtaaagtatcattatttccattttaaagataaataaaatgaggcttggacttttccaaggccacatacctaattagtgaccaaagtgaaattttccatgagtataaaataaactattcttcttgatccctggaattccttagacctttccattataagatgtctaattgtaagttaattctagttacagaaacattataagacttacatttgccttattttgtaataatttgtatgctgttttcaaaagaacacataattttttgattctattattactgatttaattatatattacatgatatctgtaattgcttgtacttaattacacttgattataattgcatttaattctactgtaatgatttgattttgatgacatttgctttttagtaatgtttaattgaataaataaataaataaataggcatcacttcaaaaaaagggagtaatgtcagtagaaagtaatataataataaatttttcctttgtcccaccagaagttagataatatagatttcaaaatgatcctatgacttgaatcccagattcatatatatatatatgtaaatgaaatcatatgttttattgcacattgtatgagatttaaagtcaacatggtttctttattttggtaaaagagatgaataagagtcttcaccaactgacacacaaaaataagcaaatagcttgagtaaggtccagaacaccagggaaggagctttggtcacttcccagagctctggcacaaggagggagctttaatgcagctctgtgggcacccgcgccattgctttctaagctgggaccttctcatccctccatctcttgatgctgagctttgcagctgagtcatgaatgggcagttttcacctggtaccaaagcatttcaagagtagcagtgtcctgagtctagtgagtagacgtcagcccatcctacccatcctacataactctactcttttgtttttgtttataatagactcagtcttttttttctttcttgagacagggtctctctgtcgcccaggctagagtacagcggcatgatctcagcctactgcaacctctgcctcccaggctcaagtgatttcctgacccagcctccctagtagctgggattataggcatgcaccatcatgcccagctaatttttgtacttttggtaaacatgggatttcaccatgttgcccaggctggtcttgaattcctgagctcaggtgagccacctgccttggcttcccaaagtgctaggattactggagtaagccaccgtcctcagccaatagactcagtttgatttatatttttaaagtcaacatttagtggtaattcagatacactaagagatacactaagggtgtgtttgacattgcacctcttctattcctttgtggattcactgttcatgcaagtatggttatggccattactttctccctgtctttcttgaagcttattatgactgctgttaacatcagacttaaaagtcttttgatttcacaacctgttcttggcaacctgaaacaacagcatcactgttatttctctctacttaccaactcaagattgttccataactatagccagccttctacttcccacgtctatctggctatcttcccaccatatctatttccatgccactcccacttctcagcctttaacctaggtccttttgtgaacattttttgacatcaaatcacctagttttataccatttttctccagagacactccttcgctatggttgattgagatttctaggaccctgtggtagatgccttttattctcacctgattaataggcctgttaattaattagtcaaacatttacaaggtgtttcacatcatgcaaaccaccgagttctgccaaggagttcacagtgtggtaaaggagacagacaagcaaaggcacaattagaacatgatataaggctgggcacggtggttcacgcctgtaatcccagcactttgagaagccaaggcaggaggatcacttgagcttaggagtttgagaccaacctgggcaacatagaaagaccttagttttcaaagtagctgaacatggtggcgcacttctgtggtttcagctgctcagtaagctgagttgggaggatcacttgagcccgggaagttgaggctgcagtgagccacgatcataccactgcactccagcctgagtgacaaagcgagaccctgtctcaaaggaaaaaaaaaaaaaaagaacatggtatatggtataataagtgctagaaagaggaatgcacagaacagaaacacctacttcagcccaggacatcagagagggttccaggggaagtggatgaagagatttgcccatcagtgataaaaagatgtgaatgcatagaaaatctcaatgttacaagtcatattcaataatttgaaagaattcactactgctagagatcagagtcaaaaagagataaacataatagtgatgaagcaggcaggaatcactctgctcagggccctggatgccaccctcagttagttaagatgttaatcaaaaggttatgggaggcattggaagtttttgctccaaagcctgaacagcgtgatcagattaaaaacactaatgtagctgcaacactgaaaacattggagatggggaaggctgaagagagagagaccagatgaaagagtaatttagggaaaaaatttactccctgaactaaggcaatggcagtaagaaggtaggagagagggcatatcaaagatattataaatacaggattgagtgaatttggcggtcagttggatgtgaggcaggagggaagggatgggaggagccttaggagcagttgttaggtttttggctgggtggatccattcttcccacagacatttatcaagaactttccatgggacagacactgtatcaggccccggggatgtggcagtaaacaaacaaaatccatgtcctcatggaacctaattctagtgttaagatgcagacaataaataagtaaaatatataatatgccatatggtgaaaggtatcaaggagaaaaataaggcagtaagagtggatgcagagtgtccataggaagaggggctgatgctgtcatcagcagactcaggtatggagctctggatgacgagcaaatgagaatgttcatttgagacaagttcagtttgaaatctctgaattacctccattggagatgcccagtaagtggtcggaacaggaatctcgaggtcagaacagggatctagactgaatctgtaaatacggaataatcaacagactgcttatcatttaagtcatgaggatgtatgacagcaattggggaattattcagagtgagatgaaaggcctacaggaggattcctgagggcctccagcaatgtcagggaagccctggagagatgcgcccaagggccagaggaagaatgacatgaagagtaaaaggaggagaagagcttggtgtcagaagccaagggacaaaaatgtaaagaagaacagtgtgatcaactgtgttaaatgctgtggatataaaataagaatttaaaaagttctttgggcatataactgtgaggtgacttgggagaacatgagtgctttcatagggttgaagaaggaagggcaaaaagagagaaggagagagacagacagacagatagggagagagagattaaatagggcaagatcctggaggagacagtaggatgggaacttgatccagagatacaggaagttaatgtacagagggaaaaatagagtgtagagatgcagattaatttattgaggatagtaataaattaggggtaacaaatggaagagattctcatctgatttcttctactttctttgtaaagtggagcctaatgtaatgtgcttagaatcaagaggaaatggggaaagtcaagggcttagggagtaaagttccaaacagccattgtagtttatatgaaaagtaatgggtgaattgcttggctgtgttgagatgggagaacatatatttgcaggggcatcaatttccatgaatgaatggcttgaattgaacacaaccacggagttggtattttgcaagggaagtttgaaggaaagacacgaagcgagggagttggagctcatcaaagggatttgcaatttagagtttcagagatgggggagttggaagtatgacagaattcaggatgtgactgtaagtggatgagtgacagtggacacaaatgttctagagttgagcagatcaagtatgtgtatggctaagtgattggacaggttaatttcattggcattgtaagtacttttactcctatctggtttgtttgttgaaaatgccaaagaatatttattgataatagaaaaatattttttgataatgctttggttttttagaaaagaaatattaaaaagctcctttatcctctggcataacattactaataaattatttcattccattgatcttggttctcaaatgcatctaaatcctgaagaaatctaatgaatgaatgctccccgagttgtgcaaagatatatctgcttagtcttttaaatataccaagatcatagctctgcatcattctgctgtactgaatgctcagtgggaagctgtaactgctagcatacttacatgcttatcgaagtggtggatatttattcatgcttctgtgatgttctgccccgtgcaccatgtgccataatcatttggttggctttaagaaagaatgaaatttccaatgagaatagataaatggtctggcaaaataaaaagtgtcacacctcgtagctccctcgatagcaaattgagaatttgtttgctggaaaagaaaatgaggatcataacagatgaaaggaaatggagacaaaatacagagaagtcgactttaaaagatgatttgtggccattgactgcatccccttcaccagatcatagactgatttaagtgtgtttgctcacagcctgtgggggcaacgtctacatccatgatgctgattctgctgggtatgtgacctcccccaaccaccctcataattatcccccgcacgctgattgcatttggatcttagcggctccaccggaaacacgcatacagctgcaatttgaagatcgattcgatattgaagtaacacccaagtatgtcacttccattttcatttttttcctaccccaagttagtattttttaaccgtcatgtctcaaaacagtccatttctttcagtagcacatactgcaaggaaatctaggggaaaagggaaatgcttaatggctcaggcctgaaaacacagtcggccagccactctcccatcagctgagccggttatgtacgtggatactgtcccttgtgaccctagacacttcctgcaagggacactgagggtggctacttgagattgatgttatccattcttcctcccacaggaaatatatcatgtttctgatagatgaatatttatttgaccagcctcatattcggtgtcacaaatgataaaatgtctgtttaacaaatgggaatttgtgtggtgtgtcaccaggggtcagcactgtcggaacagtactaaagcatgcacagtataatttctcagtctttatttaataagagttctgaaaggattacaaaacagtaagtcttactatgttgaagagaaagaaaaactatattgatcgtagaaaacatttttctctttccttgaacaaaagtatgtatacatttgcatgaatgcagctgtggtgcaaaacttggatataagatcttctgttgctatttctggcactgggtctaatactacttttccactcatggagcattaattggctaatgtgacttcctgaagaaacgttagatacatgcttatctacttttatggacacagaaaattccagttgggacgctccattagtcccaattacagagctgttagagaatttatctttgtcctgtgaaatgtatcaagtcattgtgtggaacaaaatatttgttgttttttgaaattcctagggactaatttgaaagcaacatttatgtttgtaaaaccaatacagaatatggaagggaagtaaatattcttgaatgtagaacatgtaaaacctgtcttttgagctactaataaaagaatgtattattaggaaaaatatcatacagcattttaaagtgacatggcttatgctgattctatcatagttttttatgctaagaaatgatgatttaataatatcttcaaagaaagtaagtaaggttgtcattatcaaaataagcatctgaccatgtaaatttaacagaattttgttcccacttcagctgtacttccaactaccttgagttgcgggatggagtggattcggatgcaccaatactttccaaattttgtgggacatctttgcccagcagtcagtggtcctcaggagaggttatgtatttgagatttcgatctgacaacagccccacacatgtgggattcaaggccaagtattctataggtaataatttttttaaaacttttattttaggttcaggggtacatgtgcagatttgttatataggtaaattcgtgtttgggggtttgttgtagagattatttcatcagccaggtactatgcctagtacctaatagttattttttctgctcttctcccttctcccaccctccaccctatcaaatgaaagaaaattccgtgctcatggataggaagaatcaatattattaaaatggccatactgctccccaaaatttacagattcaatgggattcctatcaaactattatgacattctttgcagaactagaaaaaactattttaaaactcatatggaccccaaaaagaacccaaatagccaaggcaatcctaaacaaaaagaacaaagctaggggcatcacaatacctgacttgaaactatactacagggctacagtaaccaaaacagcatggtactggtacaaaaatagacacatagaccaatagaatggagtagagagctcagaaatacggtctcacacctacaggcatctgatcttcaacaaagctgacaaaagcaagcaatagggaaaagattccctatccaataaatgatgctgggagaactggccagcagtatacagaagattgaaactgtaccccttccttatatcatatacaaaaattaattcaagatggagtaaagacttaactgtaaaacacgaaactataaaaaccctgggaaacatttttatattaaataagagttattatagaatgaatatgttaaaacttttttaaaaaccatgactttttaaaaataagtctatttgcctaattttaaaaatattttaatgctagaaataagtaaggagtgtaaatgtttgaaactacagtcattaatcaactttaatttctcttttaattttcattttaaaaagtaatcttagtaaacttaaatattttatattttctctaacttatttgtgaagaaatatatgtggttaaatcaaactcctgtttcttcagcttactatgaaatacagtagttctctcttatccatggtttcatgttccatggtttcaatgcccttggtaaacagaggcccaaaaataggtgagtacagtacaccaagatattttgagagaccacatttacataacttttctaacagtatactattatgattcttctattttattattagttattgttgttaatctcttatgtctaatttatacagcaaactttatcataggtccatatatagagaaaaaaacagtctatatgtctgtatagggtttggtactatctgaggctttaggcactcactgggggtcttggaatgtatcccccaaggaaaaggaagaaatgcagtatgtttattactttaagtaataaaaccatttaagaaccaggtaactctatttagcacagtgtctttgaattcctcatcaaatataaaataattaaccttttttttctctgagtctctagtgccaaatcagtcactggataaaaagcaaacatgtcagtggggcatggtggctcatgcttgtaatcctagcactttgggaggctaaggcaggtggatcacgaggtcaggagttcaagaccagcctggccaagatggtgaaaccctgtctccactaaaaatacaaaaattagccaggcatggtggtgggcacctgtaattcctactactcaggaggctgaggcagagaattgcttgaacccaggaggcggaggttgcagtgagccgagattgcgccactgcactctaggctgggtgacagagcaagactctgtctcaaaaaaaaaaaaaagaaagaaaaagaaaagaaaaaaagaaagcaaatatgcctcttcagcattttgatttccttatttaaaaaatgagcggttgaagattcactataatatggtcacaatagcacataatttggtatctaataggtttagacacaaaccaaacaaatatttaataccgcgaaagttcagaaagcctagtggtaacaatgtttaactacaccatagatcgtgttatatcctgagtcaagctgcatataattcaattagctatcacacccagctaataagacataattgaatagtaattttcaaggccctgagatatcagttactgtagtgaactgtttagttgagagtaaaactaggaatggcaggtgtccccacagtaccccttccagctgagcttgggttcagtctttaggatcaacacagggtactaggcaggccagatcagcctatcagttggttcttgagatgaaacttacttgcgactattagctcttacatagtgtcccaaaagaattaatgtgacattacagaatattccatttagtcatcatcttctgtttcccattattgtattggacttgtggtatcatttctgtttacatcaacagtagaattcaaataatgaggaaagcactaaccgttttcagaatttttaaaacttcaattcagagtcacttggcacctaaaagttttcaaatgtgctggtgaaatgaagaaaacaaaatttgtaatagaatcaatctttcttgcttgcttgctttcttatttatttatttatttttattttttgcagctcagtgtgggggaagagtaccagggcaaagtggtgttgttgaaagcattggacatccaacacttccatacagagacaacttattctgtgagtggcatctccaggggctctctggacactatctcaccatctcttttgaagactttaaccttcagaattcttctggctgtgaaaaagacttcgtggagatctgggacaatcatacctctggttagtaaaatatatctgctctcttttgggtgtttattttcacatgtacttattcagcctctgaagtttcttcacttccaagaaaggcaaaagcacatctatactctgcagagaagtgcagactaatgagctttgggcagtactggtgattctctccctcaattctaccattaacaatggatgcccagagcccaggtgtcatatagcccaccctggaggccacttggggagagcaacggtagtgggaaggcacctcttgctgctgagacatcccattgccacatgccgttatttgaggggtgttctatagcttgagatggggaagggatcatgcatgtctcctagtggtagcataaggcagatacttgtcactgttgtctcagatcattttttcaaccaaatgagcaagccttcctcattgtgctgagatatccttcccctaattggttgcatttttttcacttcttcatgtatttgaatatgttcatttttattcatgttttcctgttgtcttgacagagattaacgtttcttcataggcagggtcttgttttttattattttctttgtacacacaggacaccttgaatagagggtaaaggaaatcaatcacttggacatgtatatttaattatttgtctctcacaggaaacatcttgggcagatactgtggaaacaccattcctgacagcatagacacttctagcaatactgctgtggtcaggtttgtcacagacggctctgtgactgcctcaggattcagactgcgatttgaatccagtatggaaggtgagttcattgattcattcaacacaacattgagcacctgcattggacagacactatgctaggcaccagtgttaaaatatttgaaaaacaaaacaaaacatgacccctattttcttggaccttaatcagaaattcacagtgataaatgaaaaattacagctgtgatcaatgctataagggaaaataactagtatcacgagagagataataagaggatgagagttatactgtaatgcccaccttaagagagtcctgtagttactcagaatttgtcttactgcaaacccaacaaactcaaatgaaataaagatcttgttcagaaaaactgggtacttaacattaactttctgattttcctcttttttttttttttgtgaacatggggtcttgccttgacctcccaaagtgttggggttacaggtgtgagccaccactgctggccaattttcttgattcttttttttttcttttctgagacagtgtctcgctctgttgtccaggctggagggcagtggcatgatatcagctcactgcaacctctgcctcccgggttcaagcaattcttctgcctcaggctcctgagtagctgagattacaggcgcacgccacgacgcccggctaatttttgtatttttattagagacgggatttcaccatgttggtcaggctggtcttgaactcctggccttgtgatctgcctgcctcagcctcccaaagtgctgcaagtgtgaaccaccatgcctggcccgattttcctgattcttaagttcattacattcattggtctctcatttcttgggccatgatgataactaaattgctgcctgtggactatcacccatggaaggcagggttaaatattaatagagataaaaaatgaatgtatatgttcactaaaatcctcatgcacataaataaatatggagactaattttatctagaaggataatttttaaatacctgaattttgagagctttcttgatggaaggaaacattttgatttgattgaaagttttcttggctttttccccacgtcagagtgtggtggggatcttcagggctctattggaacatttacttctcccaactacccgaacccaaatcctcatggccggatctgcgagtggagaatcactgccccggagggaaggcggatcaccctaatgtttaacaacctgaggctggccacgcatccgtcctgcaacaatgagcatgtgatagtaagtgttccctgccgcctgagatgttatattccatcatttaaagagtttaccgacccataaatcatagtcagaaaactaggtcaggaaaattgccatctatgcaactataactcagacaaattctaagtattgttgaaagaacaaaatcacagtaacctgtcaaaataattgtaaaagttgtttgaagagactatcagctatcactctgtgcatcagggtcatagaataaattttaagagtgaatgatcacgacaaatggcaaaaccggagaggctgtgggaagctaagcctacagcagcacacagctgaatgggaccagagtcacagcacaagccaccacgaaagttctgagcaggtgggtggtcctgcataagcactgctctctccaggggtacagagggactcttggtgggagagcactgctacgtgacctccatgtcaccaacctccagtggtttcacatgtgtcttcagcactctcagcttcctgcagtgaaagaaagcaaatgagatccctgagtgtgaataacaaatagattgttaactgtgaagtgctgtgcacacatatgtgtgtgtagataggaagattggattaatattagtaaatttatccacccaacttgccccttctgcagtgtttgttatctcagtaaataattccaaacttctggttgcttgggtcaaaaatcttgatgtctattttggaatccttcctctcacaccctatatggcatctataagcaagtcccattgggtgtatctttaaaaatatccacaattgaactatttctcatcatatctgctactaatacccccaccgttcacttggattattttagaaagttccacctcgtccccctggttccgttctcctctccctacgttctcaacacagcagcatgtgatggttttaaacctcaatcggatcatgttgctgcctttgaaaatcctctaatggcttctcatctaactcagaggaaaatcccaaattgcacctgtggcccacctggctgacattatctgctgcccctccctcttctacctgtttgtcttatctcaaactcctctcttctttgctctctgggatccagccacctggcctccattccgttccctgaatgtgctgagatgctccccatctggctgttgccttcatctggaatgcccctccccagatggcggcctgctccacaccctcacttcactggggtctctgctcgaatgccttttaatccataaggtctaagtaccttatattacagaccccaccctggcctgacccttctctgccatgttgttttgcagcacttcacacctgctgccatacatcattttgatttgttcatcagtttattgtctgcttcccccactagaatgtgagctccttgaggtcaagccacagtttcattcactgctggggattcactgaatccccagtgcctgtacataatagagataaataattgttgaatgaatggatagtagaggtactatcattatcccttttataacaagccacttttgttttcagtttaatcgtctcctgttgggtagtgaatttcaaaaatatgaaatatctttgtatcttatgaccactttgtattgccgtaaaatgatcttattcaaccttcagattttatttccaagttctaatatctgaaggactgaactgttttctttcagatcttgaaaataagaaaccaagtgtgttttcttttatttgagagccaggaaattttggactaaggttgtttattataaagaaacttttttcctattattgattgaattatataaacaaagatgaagtagaaaaaatactaaccactcccactataccacattttgattcattttctcatctcttcttggcaaagcatactttatgtacttgtaatcatgtgatataaatccacttgaattctgattttaatctatttttctggttataaatataatggatgcttattgagcaatatttggagagttcagaaaataaaaaatataaagatatttttaattctactcatgtattactaaaattttgatgtatgtgctaacagttgttttttacctttgaaattattttcatagtttaaatcatactgaatataatgattatcaggaattttacaagcagagtattcacatgtcctttaggaaagagaatatgaacagtcatagttttagatctcaaataaaagttacagtcacaaccacaaattccaaagcagatcttacttgtcatctccctatcccttaattatcaacttataactcttgcagctactgctggtgggttttatgtcattatttctaaataatattcctattctactactccttgctttttttggacattatctatccacatcctactctagaagatgagacttacccctttgccaccacaaacacacatggggtatgcaatgtttatatactttcccaatcgtctcccaaaatacgtatgtcacgcttttgcttaaattgctgttcagttgacattaccatgattatgtaaacaccattcacaactgagccaagtagtgtagtatggcaacatttgcttttgttttcctaaggaataataataattgggtcctctttacattttcttgggttttatgcattgatcaccaattcgtccacaccctctccaccccagatgtgcatctctaccttctgtagtaaaacatatcagttccatttcttttcctcagtaatatccttccttgagcctttgtacgtcagctgcaagcctgatgctagctgtcatttcagaatttccctttgccatcaaatgtgcaagttccttcattcttctcctgggctagagagctgactttgtgatgctatgcacgtccctttcttggttaatttcctcttttggtgaggcataccctcttgcggctccccaaggaaatgggcaagggcaataaatcttttgaaaaatggtatacctgaaattatctttattttaccataaatctttgaaaagtatatatttaaatattttatatgtttgatatattaatatatatgaatatattaataataattttgaagttttgtgttgctcatttggggtcagttttcttcatgttcctatctcctgtttactaatattggtctctgccttttacattagtcacttccctaaatgtctgctgatccttggctattcattcgtatttaagaatgaattactgaaaggatgactggtatctctgtatgcatgagggggccctgactctttagcaaaacctgcaaacctacaaatgtcatatccacaggtcttttctcttggggaggttaaaactccagcgacgaatcactttcagaattaatttttcttctgagtctttagttctaatgtccacattcctttttttgaaatgtatttttatatgttcaatgtttattttggttcctctttaccctgctccaaacaagggcatgtgggttggcctttgcccctactctatttgattgagaacttgccgaaaagaggaagaagaaagatgaaagaggaagaagaagaaagagaaggagaaggaggaggagaagagggagaagaagaagagggagaagagagggagaaggagaagagggagaaggggaaggagaaaaaaagaagaacaataagaaggagaaggagagaagaagaaaagaagtagaagaaggagaaagagaaggaggaggagaatgagaaggagagggagaaagagaaaagaagaagtaaaagatgaaagaaaaaaaagaaaagagtgaagaagaaagaagatctgctggtgcagaggaggcagctttaactttcattgcactgcttcctagctaataccttatccagctggaatgagcctaaaatttctctaaacccacctgcctatctgactctctgtacagacagagaaaataaaaagctatgccacccagtgtgtcctacaataagacctgtgtctgatgttgtccctgctcatagcagatcctaaatctcacgtgcctgcttcctatccatttgtactctgagagttgtagtttctaagtacaaaagggattagaggacaatgatgggaattgcattctggttgcttctaacagcagaagtccatgtgataaatggatgactataacatgttcagtcattgtgattctatgccaaaggcagactcagaggcaggataacagccattgatcacagtttccgacatgtcccattaaccttatggttggttctaatcccttttgattccatcaatgtggtgcccattcctgttttcagcattatagaaatatttttcctcatctgtttctttatgcattacttaatggtttggaatcagagggatggtttgaatcccagttctattattacatcatctttctggattctggtatcttaatctggaaaacagggatactgttatctgcctgggagggtgttttgttgattagataagacaggctgagtggatgataagcaaagactggcatttttgtctgctcagtaaatgatagcaaactcttcttctggtccagtgagccagaagacactttacaccagaagcccccagagagctaaatttgattaattatagtaaatttaaagagatgacatcttggccgggcgcggtggctcacgcctgtaatcccagcactttgggaggccgaggcgggtggatcatgaggtcaggagatcgagaccatcctggctaacaaggtgaaaccccgtctctactaaaaatacaaaaaaaaattagccgggcgcggtggcgggcacctgtagtcccagctactcgggaggctgaggcaggagaatggcgtgaacccgggaagcggagcttgcagtgagccgagattgcgccactgcagtccgcagtcccgcctgggcgacagagcgagactccgtctcaaaaaaaaaaaaaaaaaaaaagagatgacatcttttgttgtggagtgcattctccttctgcataactgttagtgccatagtctgagtcattatttctaatcttgagtcattcaaatccttttaaaaatgggaatatcaaccattcaatcaatgaattattgttcagttatttcatctagattttttttgaactgtgaaaaccagtcatgcaaattcatttgattttataaagcattggaagaatagtttgcgaattattgtaactatgtgaatgactacagctattatttaatattttagagtcaataataatccattattggaaattcaaataagtaagaaaattgaagctttgaatccataactaatgaggaaagaactattatgtttaattgcagatggagattgatttttcaaattacttttcaaagtatttaaaaatatctgcttgctgggtgctgtggctcacaccagtaatcccagcactttgggaggccaaagcaggtggatcacctgaagtcaggagttcaagaccagcctgaccaacatggtgaaaccccatctctactaaaaatacaaaattagctgggcgtggtggtgcatgcctataatctcagctgcttgggaggctgaggcaggagaactgcttgaacctgggaagtgaaggatacggtgagccaagatcacaccgctgcactccagcctgggcaacaagagcaaaactctgtctcaaaaaataaataaataaaaattaaagtaaataaagaaaaatatctgctttattatgtacatgaaatcatcagaaactgatatttaagcttcccttccaagtaacaaatgtcctgatgcattgttaagaaaaactgcccatcagtgagctctgcagaccacattgtaagcacaatggctcatctcctttacattgagagcacagtttccagttgcaaagtgtatagcagcttttaatctatcaccacatggcaggaaggcattactgcaatactttcattctagtgaaatcaccctgaagtcacaaaatgtgctcggggtaacagtggcttgtggcactgcgatagaaacctgcattgttaggtcattcattttggggcagggttcccataaaaggaagtgggtctgggctggaaatatcacctcctaggaaatatgcagtaagatggattgtgtgcctgaaggttaaactctttttccaacaggtattcaatggcattagaagtaactcaccccagctagagaaactgtgtagtagtgtgaatgtaagcaatgagattaaatcttcaggaaacacaatgaaagtcatttttttcacggatggatccaggccatatggcggcttcactgcttcctatacctccagtgaagatgcaggtaatgtaggatgttgtaaatgccccccattttaatcaggggcactgcagatgcccccatctactgccaatggcagcagagccatccattttccctttagtgatacttgaaatctttgacataagacaaacacacataagcagatgaaaaacgcactgcagacagaaaaaaagctttctgatttcagaaagaaactgccatagtgaatttaaaacttttaatgctattagattagcttctagcacagtttcaggtcatgttaccatgagggttggtgacctgttccgtagtccctggtcaattcttttgtgctgaaagaaaccatctacctcctagagggtaacttagtctcagagagtaattaattttgctggggacagaacaggctttattgtttctagtcatctatccacacacatatttccagtgaaaataaatgggaggtttgatttgatatagaatattccaaaattaagcaagatatggcctctaattataaatatcctcctatttcctgaattgggttcaaaattttaaagggttttaaattttagaagtgggagtgttttaaaatttagaagttttaaaatttagaagtgggagtgaatattaaaagaaaaacgctaagttatttcattggtacaagaagcatctgttcctttattaaaagggggcaaattaatggcaaattaatgtcctattatctgtttgatttaaaataatttattagatcaagtggagaattgctaatcaagccattaggacctgccaccattatatttatgtattcctctaaagtaaatattaatgaacagtaggcctcaatatttggacctattgatacagagccaaacgcccaccacttaatctacagcaacaggaaaatagagaagttgttgatttttgcacatctttcctttataaacttgcagaaacttccataatttgcatgccttttacccataagcttgactgcatctagaaaaacaaatcaaagcagtaatgttgatgttttagttactgttcctgtattgtttatctcttccgttgtggcctgaatcttactactactttctctgttgccttctgttttcttagtgtgtggtgggtctcttccaaatactcctgaaggaaactttacttctcctggctatgacggagtcaggaattactcaagaaacctgaactgcgaatggactctcagcaatccaaatcagggaaattcatccatttccattcactttgaagatttttacctagaaagtcaccaagactgtcaatttgatgtcctcgagtttcgagtgggtgagttctatctaagaatgcgttttcccatttatctacaatattctttttatcttttttgttgttgtcgctgctgttgttgttgttttgagacaggagcttgctctcttgcccggactggagtgcagtggtgtgatcataactcactgcagcctcaacctcccaggctcaggtgatcctcttgcctcagtcccccaagtggcttggactacaggtgtacatcaccacatacaactaattattaaaattttttgtagagatggggtctccctatgttgtccaggctggtctcaaactcctggcctcaagtgatcctccctctttggcctcccaaagtgctggggttacaggcatgagccaccacggctggcctacaatattcttcatatgcttggagactactaacaatgaagggagtcaaatggctctaacataggtacacacgatccaaaagaactctgttcgaagccataattctgtgtgtgcccagctgaggaaaacgaaccccaggaacagtgagtgaggcggatcactgtacaactagactctgtgttacagtcacttcgtttcccggcatgtgacttttgccgaagcgagagtccactactatcaagactcctttccaaggagactgggacttagcatgctcagcatgtgttggcagtttcctgaacttccaggatttatgaaggggctgtgaaattctcctgaggccttaggagttaaaagaagttttgcaatataccagatggagaaacacatggaagctatttggggaaataaccccaaagcagtcatttgtcttggttttcgtgatggaaaaggattgcggtgtactcaataaaccataattctcttaagaatttttaaaactctgtattcaaagaggatgaatcaattttctttctttcccatagtcaaggtgtaggttattcattaggttgcttccatgattatgctgacacgtttttctcagtaaataaacaagtagatagaggaagacaataatattgtaaatagtacgtaatcatccatactgtaaaagttttgctgagttctgtgtaatcccaaaatttaaagaaaaggaggctgaaagcagcagaagctcatcagttagttggtggagaagtccttgggaaactgagaggtcaatgttaattacctttgagaacgtgagcgacagaattttcaggaaggagaatttgatagagcctgtacccacgggccaagggcctcagccagagagtcctccaacctctctgaggctgaagagtctaaaaaggcttataagggaaagggaagttgtggtttgagaatgttctccatggaattctgataaaccctcaccccctctgcctgtttcaaaaccaccggcttgtggtcttaagcagaacagctgtatctcaaatttcagtcagctaaatgctgtcttctctttatttgctcaggtttagaggcagttaaaatactatatatcattgatttagaagaccagtgatgtttatctgacagaataaaaagaaagcagataaatgagagctctgttggtgctctgtacatgttcatcaaacccacgaaatgtaatcttcatgaaaaatattaggctcagatctgacagctcttggcctgaatgccgaatatggagtccatttcagttgattgaatatagtgaagaaatctttcaaattttaggcaatgatcactttatcttgaggatatattttatcactgttggtattatatttcttacaccctacaaaaggtgtgtccaaaagtgctattttaattcattgtatctctgtttagatatgctgaaataactatgaaaacacaaattggaacaaaatggtgtccatcatagaggttcatttcaaaattgctttgatttttttgtgtttgttttacccccttggagggactttctgttgcagttaacagagacacacaaatattgtgcaatgtctgctactaaatcagaatttaagtgtgtgtcaatgaatatcttgaaatttgtttttatcaaattcattgaatgtatttctcaaaagctgtatcaatgatggcacttggtatattattttgttcaggtgatgctgatgggcccctgatgtggagactttgtggtccttcaaagcctacattgccattggttataccttattctcaggtatggattcactttgtcaccaacgaacgtgtagaacacattggattccatgcaaagtattcctttacaggtaagaattataattaagatcttgataaaattacttataaagattaatgatttttttccataaagatttcatatatattttgttagatttatttctacatagctattagttttgttaatattatcaatgagattttctaaattacattttttaattggttgtggctgatatctagaaattttataatttgcataatttaaaattattatttaattttaaaattattcaataataaactgcataattttaaaattattaaattttaaaattatccaataattatttaataattaataataataaataattattaataataattattatttaataattttaaaattattttgtaatttgcataattattataaattttataattttgcatacatgtaactttagtccaaagatctagctatcctcttattagttttaatatgttgtctatagattctctttgatctttctgtgtaaacttctgcaaatgttagttctttatgctttcagtcataatacagaatttcattttcttgcatccttttgctagctagggccaccatcgaatattgaacagaaggaatgatagcatcttgtttctgacctggatgtgactatgacattttattattaaatatattggttgctcttaagtttccaataaatatcttttgttaaagaaagtcccttccatccttagtgtgaaaaagctttttttaaatgtaaatgggcataggattttatcagatgattttctgcatccattgagatgattcaactttttctcctttcataagttaatgtgatgaattatatgaaagatttatttctcttggtaaaccatccttgcatttctgggataaatcctattttgtcatgatgtgtgttttatacatataatgggtattatttgctagtgttttgtgttggatttgcatatgcaacattcagagtttgtgctggaaaacccagccctactcttgactgcttcccttggcaatgggaggttttctagtcccttttcacgagcatgccagtttgtttagattcccaacttcttgtaaaagtctcaattccagtcctgccttctgtggagacccagagccctatcttctcctcctacccagtcatcaaaacctcagagcccaaccctgggacccaaacctgcattctttaccctctcagacttcactctttcactttcactcctctcactttgagtacacttactgcttctagattttggggagctgcttttctttccattgagtttgctatgaatcaaaatatgttttagttatggttttatctaacattcctttgtgttataaccaaatggctggttgaagaaggagtgaaattgattatctactcactcaaccatcttgccagttgattttccttcatcagattcaaagaagagtcaggtttcagtaaacagtattatttgtattgaacatcagaccatattattcttcagaaatgtatttttttttcaattttcaattttctatgctaataccgtatggaattttgttattcctaaacttttacccaattttacttttcttctatttaatttcatttattttatacatatatatacataaaatatacatacacaaaaaaatacaaaatatatatatacaaatatatatactatatatacacaaatatatatgtactatatatatacaaatatatatatactatatatacaaatatatatagtatatatatacatatatatactatatatataaatatatatactatatatacaaatatatatactatatatagtatatacaaatatatatatactatatatagtgtgtatatatatactatatatggtgtgtgtgtgtatatatatatactatatatggtgtgtgtgtatatatataccctatatatggtgtgtgtatatatatatatacacactatatatggtgtgtgtgtatatatatactatatatggtgtatatatatacacactatatatggtgtatatatatatatactatatatggtgtgtgtgtgtgtgtgtatatatatatatatatatatatatatatactatatatggtgtatatatataatatggtttttttttgagatagagtcttgttctgtcaccctgactggagtgcaatggcatgacctcggttcactacagcctccaccttctgattcaagcgattctcctgcctcagcctcctgaatacctgggattacaggcagacgccaccaagcccagctaatttttgtatttttagttgagatggggtttcaccatgttggccaggctggtcttgagctcctgacctcgggtgatttgcccacttcggcctcccaaagtgctggtattactggcgtgagccaccatgcctggccttactatgtttttaatcacaaaatctgatggttatgattactacttactttggcattatcggttcttttttttacttctgttttattgagagggttaccaatctcatttcagattgtggcggaatacagataggtgacagtggagtgatcacaagccccaactatccaaatgcttatgacagcctgacccactgctcttcgctgttggaggccccacaagggcacaccatcactgtgagtgctaatgactgggtgaaatgcttctgagacaatagaaccacaatagcctgtcctgcatgaaaatggagctcttttattaagcaagtgattagagaaggctttgattctacaatgagatcactgtttttccctaacattttctcactagagcacatacattggcatttattattcatgaagagtgaaatctcttttttaagcatagggaaagatatacacagaagataattctgcgtcttagagagaagtgtattcagtttcttaatatgtgttgccatcccaaaccagggaaatgtcttttctcaaaatttccaagagaaccttcaataaggaaaaaaaagtagaggggaagggagaattaaataagagacaaaaatacaaattataaaaataaaaacaaaattaaacgatttgtaagggccttatcttcgtaacagttgataaaagctcactgacaaccattttcttttttctcctgcagctcacatttagtgactttgatattgaaccccatacaacttgtgcttgggactctgtcactgtcaggaatggtgggtcccctgaatcacccatcataggacaatactgtggaaattcaaaccccaggacaatacagtcaggttccaatcagctggtcgtgacttttaactcagaccattcattgcaaggtggtggattttatgctacgtggaacacacaaactttaggtaaaagaaatgtttgctccatttgattttctttttagtgatgtatagtatgaactcataatatgtacattttgtacctactttacatcaggcttagttctaaatatttgcacatgtcatctcatgcagcaaccctggtgggataacacaatatcaatacctggcatctctattttgcatgggcagagactgaggaagcatgggttgatcatttgcctagatacatagccgataattggtagagtcgggatttgaataaaggcaattcagtccagaaactttgatctcaacacttcatgatgctgccttcatcggcaaaagggtatggcacaacctgggaatctcaagtaatagaaacatgagttggaatcccaagtgcttgaaaatatctggagcctaaaagcagaatgctgagtggtgagctgagggcaggaaaataagtccacaacataaagagccttggtttatatgttatcccttgaacaatgggaaactgttgaagagttttgaaaacgaaggtgacaagatgagatttgtaatttagaacaaatgctgtagtgaatgggtcctgagtcaaaatatgacagatttcattttaaaagaatagtttttgtgcatagaaagtataaacattgtgaaaattctcagaaaatacaaggacttgtatcacatactttattagggatttctgtaaatcttgtatatcacacaagacaattatttctggtagagtcacagttattatgaagctctttgttgactgagtcagacttcccctggttaacaaccactggctgttattgaagtgagaagggagttttaggtgaatccctgatttccaggggtttcacagcaaaagattcggagaatgcctctttaacttcattttgttttgtatgaaaattctagatttttcttcctttgaatctacataattaattttgatccatcagtcagtttcaatatgaatcaatcagattgcttaataaaagaattttccccaactcaaaatcactttctctagtccagttagagtaacgttgcaaatggagtgtagagtaatattctcatgtgtgaatggtaataaaatacagaacttagcattgccaggttacatatactacataggctcaaagagaataaaaatacagctcttgtttggagacaggatggaaatctatcctctctatggcacggattagtgttcttggttgaattcaatatcattgtaacacaactgtaacagctgaaattttctctcaatttaactcacctttccatttatggagagagcttgctgtgcacctgactggaagatgatcacttgtaaaaaatgatgaattgaaatctcacatttggaaatgttccttctgtagcagtcttgagtttccaaaattactttccttgctgattgatggctttttacatggcaatatttcaggttgtggtggaatatttcattctgataatggtacaatcagatcccctcactggcctcagaattttcccgaaaacagcagatgttcctggacggccattactcacaaaagtaaacacttggagatcagctttgacaacaacttcctaatccccagcggtgatggacaatgtcagaatagcttcgtgaaggttagtacacttgttcatttaattggagccaagttggttttgtgaacattagtgtttaagctagaaatgattcattgtcgctcaaagtaagaaaattttgctgcctggattccttggatgaaaagtgagaaagtgagaaacctcaactgttaggagctagaatttcttttctttcttacttttctaatagatcctaaagggaaaaatgccctttataatatagggcactaccacaggcaaaatttaaagcatgccacaaaaattacggaacgttgaaggagcagctaatgccagccttcaccttgggcattaagaccccacagtctgaaaaaaccgtgagaaagccatgtaaaaatgatgggaatggggcatcaggagagcaaagctctttcaaaatctaaagttataaatgctgctcgtgtggcagtggcttgtcactttccactgacttgtgactatgatgactgtcttagaaattcatttcatctgtactgttttgcatcttccaagttatatctctaaaagtctgtgacttttagagaaagagtgccttatttccactgtgcctttccagtggaaataacactggtcacgttagcccctccattcatgtctgtcatacctaccacctgcatgttcttctctgagctacttaaacaattggcctttaagttattcaactgtagaatgaagagcatgattccttcttcagtggggctgttttaagcattggagataatacgatgtaataacataggtagtgctaagtacttggaatttaaagtcacttgatgagtcaaagtggcttttattgtcagtgttattacttcctatcaactctcaaatgatgttttatatctcattgacccatgcttactgtttaaatgaaaatctcatatgtgtataacatatatatatatatatatatacatataataaaatacatttaatatacacttttcttaatggctttttccatgaactaaatgaactctcttctcatgaaatgaatcaatatcaagtattcagacttaagtaaaactttcaagtgctccagttgtaaaactggaatgtggaaaatggcctaggctcattccttctctggattgaatgggggtccctctgataacatcgggcaagcccaacgctgctgccgagtgggatgtattaggaaccctgccaaaaataagtggccgtgggaagcactcgtcttctcctaatgggcccgagatgcttgtttctgccaagaaatgctgtgtgggtggacggaaccagtaaagggacccagcttcggcaagcagcccccgcaggaagccacttaacacctgtaaagctgagattctctttacccacccagagacaccagggtaggtgggactggaaaaatgggtcccagtcacagaaaggggccagtctgggaagcctctttgtccccacaggccagacctgctcctcttccacccagagacattgaggtacccgggggtattggtaggggaaaattactataccctttgccttcaactgagaaacacacagagtccctcaggtagcaccagcaagaaccagtgagagccccggtagcaccaatgtaaaccaagcagaccagaattccaccacacagattctgaatattgaagagcaactggaactgtaacccacaaaatgtgcaaggcacgtggtaaacataaacagggtgacagcctgctaaaataaaagatttgaataggacccaaagttccctaacataataaatgacatgtcctgggtacaatcagaaagaacacgttgtatcaggaatcaagaacatcacaacttgaaagagaaaagaatcaagtgatgtcaacagtgagataaatcagatgttgaaatatatgacaaggatgttgaagtagtttccattaacatgcttcaacaatcactgacgagctctcttgaaacaaatagaaaatatcagcaaaaaaacaatggttacaataaagaactaaatagaaattatagaactgaaaaatacactaacataaataaagaacatgctgaataggctcaatagtagcatggagatgacagagaatagaatcagtgaacttgaagatagaacaatagaattcacccagtctgcacaataaagagaaaatagactgaaaaaacaaacaaactagatcaacacagacttagggactcatggacagtaacaaaagattcaacattctctcaaagggagaggagagagtgcagctgaaagaacaatcaaagaactagtggctgtaaactttcccaaatttggcaaaagagacacacctataggttcaagaagctgagtgaacctaaaccaagataaacacaaagaaatgtaagttcagacatatcttaattaaacttctgaacactgaaggcaaacaaaaagtcttgaaagcagtcagagagaattgggacattacctagagaggaagaccagttagaataaaagcagatttctcatctgaaaccatggaggccctaatgaattgacaatatattcttcaagtgctgaaacaaaggaattgtcaaccatacattttatatctggaaaactatctttcaggagtaaagaggaaataaaaacttctcatatgaaggtaaactaaacaaaattatcactaggaaacctaccattaaagatggtcaaacagaagttcttcaaacaaaaatgaaattattaaagaaccgtggagcatgagaaaagaaaaaggaaagtggaaaaagcaaaaatatgtgtacatacaatagaatatccttttccccataaagcttgtgaatcatatttaataaaacaagaaattataatgccctctgttattcagtataatgatatggaaaagttgaaaggggacctaaatggaaatcacatttccacaagtggtcagatgtggatggtggtagactactataatcacataggcacattgtcacacacagaacaaccactaccaaaactgtgtgaagaaatgtacagaaaaacgctaatatcaatcaaaatggaatccccaagatatcaagaaaagagaaatagaggaccaaaaagcagataaagtaaacagaaattatataataaaatgtagacacagaactgatatatatcagtataattgtaaatagtttagttagaccaatcacaatacaggttatcaagccaaaacatgatctaagtgataataaactgatttccaattcaaccacgtaggtacatgaaaagtaaaaggatggaaaaggatgtcatgcaaaggttaaccaaaaaagcaggagtggatatatttatatctgatgaagtagactttagagtacagaaaattacaacagaaaaagaggaatcttacataatgataaaaggatcaatccaccaggaagacataatgatcctcctaaatgtgtatgcaccaaacaacagaggcacaaaatacataaagcaataactgatagagctaagaagagaagtagacaaatcttcggttatagctgaggacttcaacactctcctctcagtaattgatagaacaactagacagataattgacaaggatatagaagaactctacaaaaccatcagttaataggatctgattgacatatatatgtgtgtgtgtgtgtgtatatatatgtgtgtgtgtgtgtgtgtgtataaatatatatatgtaaaatacaccacacagcaacatcagaatacacaattttttaggaactcttgtaacattccaaggtagatcatatcctgagacatggaaaaacctcaaccaagtcaaggaattgaaatacagagtgtgttctttgagtatattaaaactgaactaaaaaacagtaacagaatatcttattaagcactgagctgagctggagagaactgagctgccaattgttggagcagctaattaaaacaacaggccaaaatgtaagtaacagtcctgtctttcatcattttctgctgtggtgtaagaggccaaacaggagaaagctctgtctccctcaatcgtccattctttcccatgggaagtgcctggtaaggatcagatggatcagtgtagatatagaaatggtctcattgccaagtaagccccaaacaaatatgtgcaggatctgagtgctaaaaataatgaaatgctggcataaacctaaatgaaagagacaattatatttatgaattggaagactcaacatagtaaagatgtcccttctccccaaaatgatggataggtttaatgcaattcctatcaaattttctccaaagtcttttgtaggcatagacaactttttccacaacttatatgaaggcagagacccttcaatggctaaaagaatcttggaaaagaagaataaaatgggaggaagaattctaccttactatttacctaggcttacttatctaagttacagtaatcaagacaatgtggtattggttgaaaacccagatgaaaacagagaacctagaaatacactcacacaaacatcctcaattgatttttgacaaaggtgcaaaaactttccaatgtaggaagaatggttttttcaacaaatggtactagagcaattgaacatccacaggcaaaaaatatgaatctcaacctaaacctcattattttgtagaaaacctcactcaaaatagatgatagactgaaaagtaaaatataaaacttctagagaaaaaaaaatagcagatgtcttcaggacctggagataggcaaagaggtcttagattaaacaacaaaagaatgattcataagagaaaaaataaaatgataaattttaccccatttaaattaaaaatcttatgccatgtgaaatattttcatccagtctgtagccagtctgttcattttcttcacataggcaatgtactactatgtaaaatatataaagaagtctcaaactcaagagtaaaatacaaacagttctattagaatatggacaaaagacatgggcagatagtccaccaaagagactctacagatgataaataccagaaaagatgttcaacgtcattaacttctggagaagtatgaattaaaaccacagtgagctatcactacacacctattcgaagacaaatatttaccaattgcataatatttaccaattgcactctgggcatttatccgagagaaatgaaaactatgtttacacaaaaacttgtttacgaatctatataaatagcacctttatttgtaatagctgaaaccagcactaaggcctttcaacaggtgaatggttaaacaaattgtggtacttgcttaccgtggaatgtaactcctgaataaaaacaaactatttatagattaacaatctggacaaatcactgagggattatgccaagtgaaaaaaggcagcctccaaagattacatactctgctgttccatttatataatattttgaaatgatagtgttttagaaatggaaagcagagagccagaggttagagagaaggcaatgtaggagtaaattgtgtgtggttataaacaacaaaagcaacttagggattcctgtggtattggaatttcagtatcttgaatgcaattgtgtacaacttgtatataacttaatacacacacacacacacacacacacacacgagttcaagtaaaactaggaaactgagtaaaattggtgttatgtcaatgccagtaacctggttgtgatagtatactacagttttgcaagatgtcagtattggaggaactcagaaatgtgtacaaggaatttctccatattatatcttacaaatgtatgtgaatctgcaattatgtctgtaaacatttgtttaaaaaatagttgaatgataaaatataacctacaacctgactgaattatatagaacactaagaaaaatcagaaagtttttgacctgatgacagttaagtaacattttgtaggttcaatatagttttgatgagtcctctgtcatatagccaatgaaatgagttcttgataggcaaggcagaaatgaatattgaataactctttaccattgtcatcaccattatcatcattattattaaacttatgttcccaggccaaaaggtagagttgtcgaatctataattaatgacttcagaaaagtataagcacttaagcattcttggattccttcattaaagaacttgaggctctttattaagttttagcccttcttactttgcctgtttagtaatgtttgtaaaaatatagtatatggcccaggcatggtggcttatgcctgtaatcccagcacttttggaggccaagacaggcagatcagttgagtccaggagtttgagaccaggctgggcaacacgggaaaaccccatctctgcaaaaaaatacaaaaaactagccaggcatggttgcacgcacctgtagtcccagctacttgggaggctgaggtgggaagatcacctgagtccagaaggtcgaggctgcggtgagctgtgattgtgccactgcgctccagcctgagtgagagtgagactgtctcaaaaaaatacatatatatataaaatatatatacagattatctattgataaattgtgtttataattttatgaaatgtggataaaaaactgccatatactgtttccttggatatattattagggggaaatctaattagagatcattaagtaaaattgagtaggtgcattttttttcctgacatttttattgatcttaggcatttggcagaatatctgcacttttgttctcagtaggtccagcgccaggcacctcccttatctaataaatggctaatataatttgtcttcagtaggatgactaacagctggatacccagtgcttaaaaatcaattgaaacaatacggctttaaagagctgagaattattaaaccaatgctatgaatcagtgctatttcacatctcttgctatggactgatttcccaatagaaatgtttttaatgacttgatgttttattgctgtgggtgaggaatatccttgagaagagatgtgtttggaatgagtaatttggtatcattccatgtgaagaaaatgttgaatagtcaagtaagattaatacacatccaactacatccttgtttgagatagttgtctgttgatagaaagggcatattgggtattgcagattgtgtagcaatagtcctggcccctacccactagatactacccatcacaccgagtgtgacaatagaaaaatgactacaaaccttgccagaggtcccaaaattgctcctagttgagacctctgaactaggacgagcttctctggttaatatgtttaatgtttttggggtttttttcccccaagttttgtatattcattacctaatatgcatactttccttgagtgactcagcattgtagataaccatgatctctcacctgaactagggcaaaacctacctgactgttttccggcatcctttctgactcctattttccgaattgtaatgttttccaaaaaccaatcttcttggtggctccttgctgtattcaggacagtggcccgagtctctaacgtgtcctgcagccccctctgcaggcttcctcaccccttcctccttggttttctctctcttctctgaactagccacggcctttcctgccatcggggttcgctcggggcaggctcacttcccccagttaggtaaagccaccaattatatattctcaacagccccatcataatgccttgtttatagctggaattttgcatgtaaatttatgattctgtgattcatgtctctgtttttccctggactgataagaattggtttgatttggaattttggtgctcaccgtttatttcctagcaactgttttttgcatgagtatataaattcagtcattcgaggtggccagaccaattaagtgacagcccaggtctacttgggagttgccaaccaaatttttggtgaatagcacacactgactggatgtcagcttttcatcaaaatggaccctacaattccacacagccaagaagtgttctgatttattccatttcatgctgattatacgtatacttggaattcatgcccactttcttcatgcaccacgatgtgcctcttgcttgctggtgttgtccagctgtgaccacaatctgctatcttcccaggagcagggctgagttccacctggctgctccgtctccctcagcacccgggaagctcggctaggtcagggcaactagaagttatgaggaaaccgaacagtgatccaggaaggtggatttttaaaaaatcaccacccagctatgcaaaaaggaacaccatctccttagagaagtcaagaatgggacatgctattttaaaaacagctttaaaaaaattattctcaaaagaaaatactacagatttgtccatgttttgtttactcttatgcttagttctgtatacgtgtgagtgccattattttgaaacctaagtgcattaaaatattgatgggaaacccttgagcattaaagttctgtgtatgtccgtgctaggtgtgggcaggaactgaggaggtggacaaagccctgctagccactggctgtgggaacgtggctccgggtcccgttatcacaccaagtaacacattcactgccgtcttccagtctcaggaggcaccagctcagggcttctccgcgtcctttgttagccgtaagtagccctaagaaccaaacccagaggtctttgcgggagtgtggttgtcacaggcaggcagggttggctaaacctgggggtctaggggaggagtatgggggtctacggggaggatgagtcacctaatcccaagaagacacctttcttccaaatagcagtgagaacagaactgaattgagaagtgatataaaagccatgaggggcactaaccaacgtctagaaataagcctggcatccagagtgggctgatattgggcagaagcgcagatggctagttcgttagcaacaaccagtgtggctggcctgtggcaccttgaccacaaaatcccgtggggggcttgaaacacatgcagattcctgagcctcactccaggcccaactgaattcagaatttccatgacgaagtctttcctgttttttttttttttttttgacacggcgtctcactctgtcgccaggctggagtgcagtggtgcaatctcggctcactgcaccctccacgtcctgggttcacgccattctcctgcaacctccacctcctgggttcaagctattctcctgccttagcctgccgagtagctgggactacaggtgtgtgccaccatgcccagctaatttttttttttttgtatttttagtagagacggggtttcaccatgttggccaggatgatcttgatctcttgacctcgtgaaccgcccgcctcggcctcccaaagtgctggcataagccaccgtgcccggccggtcttgcatgttttaactgtcatccagagggttctcatgctaagtcaactttgggagccagtttctttgggaatgttctttcctaattttgattaggaaggatggatctccttttctagctattgtacactattagattcgtgggaaatgtagcatttttcaagtcagagaagcaatggtgtgtgcctgttggctgagttaaatcaagtgtagccactcatggcaaaccactgtttagggaaaagtttgaggaaaggaattagaggaagtaatacagtagacaggtttttcagactgaatcagagagtgctggaaaggaagtactgaaagacaaccctagaccaaatcttaggtctgcaggtggttcactgtgtaagtgtgcacgtgtgtacttgtgtgtgttttaatgtcaatttaaaaggatagagatattttcgtgcttgatagatcagagagtgaagtggattaactagtcaatggttatatgaaaacaaatcattttagtggtgaaaagatatttctttctgtttcgaaaaccagggatgcatgtaagaatttgataagagttgggattaataaatccagctagttttaaaaagcaaccattgttgtggctagattacaatggtaatgaaaatagcagttttctaataataagacattttaaaaacattaattgtgtaaagtactaatcagatacaaatcattttttatctgttttatttctttatctgcatgaaccatattctatcattgctcgtttatcctttcttaatatcttaatattaagggatttgcagtagatttgtggtaatattacgaggactcagtccataaaactctgcagcattttctaaaaatgtataatattcttattaagcacatatgtatgtttttaaatcagagctttattctcttcattcttgcttcttccatttggaatatctcagggaactatgtctatagataatttaggaaaatgcctctttccttcatggacaaaatagatacacgagaaataaatgatctgatgatgactttttgttcccacataggatgtggaagtaatttcactggcccttcaggttacatcatttctccaaattacccaaaacaatatgacaacaacatgaattgcacctatgtcatagaggctaatcctctgtcagtggtcctcttgacttttgtgtccttccacttagaaggtaagtttattcttttaaaaaaattacgtttaattgacaaacaaaaattgtatatttatggtgtacaacatgttttgacatatgtacatgttgtagagtggctaaatccagttaattaacatgtctgctcactcacttacttagcactttttgtggggagagcatttaaaacctctcttagcaatttttaagtattcggcaagtaatcaagtatttcaggtattcaaccttgttattcgctattggcaccatgttgtacagtagatctcctgaacttattcctcctagctgaaattttgtatcctgtgaccaatatatcctaaatctccactcccacataccctaccagcctctggtaaccaccattctactctctgcttctatgagttcgacatttttagattccacatccaagtgagatcatgcaatgtttgcctttctgtgtgtagcttatttcacttagcataatgtcctccaggttcatccatgttgtcacaaatgacaagattttattcttttttaaggccaaagagtattccattgtgtatatctaccacattttctttatccattcattcactggtggacactcaggtccattccatgtcttggccattatgaatcatgctgcaatgaacacgacagtatagataatctcttggacacgctgatttgatttcctttggatctatgcccagaaatgaacttggtggatcatatggtagttctatttttaatgttttgggaaactgccatgcatttttccataatggctgcactaatttacattcccatcaaaagtgtacgaggaagagttcccttttctccacatccttgccaaaacttatctcttgtcttttgataatagccttggaagataagttcattcttaagtaaactctaattggttcttcagaaatgaatgaggagtaagtagaggcagaagtctaaaactcaccatttaaagaaaatattgaaaatatgttacagagtagatttaatgtaaacgtgattaaaatttcatccaatttttaaagaatacaagtattattctatgtattccatctagaagtaaaaaaatagtgacagaactttaacaacacaagtattgcataaattgcttaaagaaaataagtctgaaatgtttcatgttaacatagcttttaatttattcacttgcatttaaagtttatagacatacgtgtgcacacacacacccacattcatgcacacactattaaccaaaccagtgagagaaactgtcttattgagtcaacataggtgttcgacaaatattgaataagtaagtaaattaataaaattaatataggctgggcacggtggctcacgcctataatcccagcactttgggaggccaaggtgggcagatcacctgaggtcgggagttcgagaccagcctgaccaacatggagaaaccctgtccctgttaaaaatacaaaattagccaggtgtggtggcacatgcctgtaatcccagctactcgggaggctgaggcaggagaatcgcttgaacccaggaggcggaagttgcggtgagcctagatcatgccattgcactccagcctgggcgacaagagcgaaactctgtctcaaaaagaaaaaattaatatatgtgccctgcttttagtaaatactaccattgggcgttctttcttctgctccatctcggtcatcttcatcttctcagtcctgactcttcagtgcctgagttcctggccacaagtgccctctgtgttcattctcccactctagggaatgggccgttggcagagggaacagtagagatgccgatttgggctgggctttgactgacaatagacaccacttggtgtttaatggaggctttcacacagtggaaaggaaattccttcaaatagatgggtattttcaaccactcataaccatattaattttcttgttacatatcagctttctatttctaaaccacaatttatctgcagatttgtcaagctacctcggtatattcgaaatttcttactcttgggttagtctctcatggcagtgaaaagttacactttgcaaaatgttctatagcattcaacatctgggaaatgtatggtttataaaaatgacatgtcagaactcataaatggataaatttaacaaagcttgtctcacttaatcctttttcctatgacctcactgccttttcatacatctctgcagttgtaattttcagcacatgtgtttgcttaaaaaaatgccaagtgtaaatcaatgtatgtcactgtaaaaatggaatataaagtaaagtgtcatcttttcagcatttgctagcccaaaatcccagtaccataaaaagatgcccatgatatatgaaggcttgagggagggtaaaatagtttgtataagatgatccaattttctttctaaaataatgtgtgtgaataaaatctataaggctattaaccagtacattaagagttgtcaccactgtgtgatagatttattcgagatgcttattttcttctttatagcttttatgttatttttataattaggacaattattttaatagcaggggaacaacatgtggcttggattttgtgtttgtggtcattaagttaaataaacagtgcatctcacaagaccgtatcactcagactaagaaaggagactctagtaattgtactataaagccacagaaagcaatgctgataccagtggtatatgtattattataagagactctatcatgacctgagacagctccctgagctcagttatcaggtgagaaaaaggggagcagccctggaatatctcagtatagtacagggaaagtgagcacagcatttaggatggatcttaatgccaggtcagccacttactgctattcaagtgactttgtgcaaattacttcacctttatttctgatacttatatatatatagcactttgctatatatgtgtgtatgtgtgtgtctaatatatatttattatatatgtataatagtagttctgaaagtcagataatgttagattgatttctgcttccgctaatggatttgccaatcctcactcagttgaagactgattcttttctaagatggtatccttacaacaatgccttgtgacatttccagtgtttaagtgttcagcattttcaaactgctgcctgagtaatttctggctatagattcatctaattatgatgattccccaaaagggtgactttaatcaaatttattttataattagcttcttatccttaaccatatcaatgctgacatttattgaataccatcaccgagctacagattcgctagctacagtaaaagtaacctttccccagcccttctaaagtgagcctgagggattcatgtgcaatatattgggatgaaaccgaggattgctctgaaggaaggtcatagctttattgagggagccttggcctttctagctgctataggcacttggaactgtttctgagagactctgttcaaatggctaagcatttctgagcccaggatcccagcagagccagtgttgacttaggtggtgatgaaggttctagatctgtcatcttggtggaccattagcacaaaaggtgggattggcaaggaaaagatgtggtatcccaggctacaaaatactgtgaggaaacacacttgtccctatatggcgtctactaaacattgacacctgcttagggagggttttaccatgaagggaaaaatacagattgttgaaccacactcaactcttaggttacaaaggctcagtgacctactttccgcttaccacaaagtaagttgctccaagtttaatgttggtctaaatttctctaactttctcattacttttacatttccagtactagacattccatgaactacagaccattgatgtttgtcctcattttggaatctggtattattaaataactgcttattttattttcccaaatattaaacagtccaaaattttgtgttctcattattcatgtggccaactagaagccctcaatctgctaaaaaaaaaaaaaattatagatccagttttcttacttcatagataaagcacttcttgaggcaaaatgaagcaagccagtgccttctaaaccttgattattctttcattaaaattagatagtaggccgggcatggtggctcacgcctgtaattcccccactttgggaggccgaggtgggcggatcatgaggtcagggggtcgagaacatcctggctaacacggtgaaaccttgtctctactaaacaaaatgcaaaaaattagccgggcgtggtggcgggcccctgtagtcccagctactcgggaagctgaagcaggagaatggcgtgaacccgggaggcggagcttgcagtgagccaagattgcgctactgccctccagcctggacaacagagcaagactctgtctcaaaataaataaatacataaataaaatttaaaaaatgaaaaaaattgggtagtaacattaattcaccttggtgataatgaggaatttagaaattctcaatttaaaaattctacacgccgtaaactgtaaactcagtgtttctcagatccagtaattcttgacaagcattggagggtgcagcagcgcttagctcgtgaggtggaaacaccaaagggacaaatgcctttgcttgttgtcctctagagatggcttcaaagccccaacaggagtgggcccagattcacacctaatatttgcctaaattctcttggattaactgaagtcccagtttatgggttatatctaatagaaagcttaaagaaaaaaagtaaaaaaaaattagttttagatttttctttttgacatttttttccccatcaagaagcacaataaatgagctttgtcagttttctttatttcctcctatttaaattttttaaaaactggtattgctcaactgctgtttcttctctttgctttctcagttgtttctaaagaactcagaatgtggtcgcattccacattactttagaaaaaagtgggcagtggtccttttgaaatgtttcctattgatattttattcaactggcagagcactggagcagatggtgtagtttctgtgaaatcccttgtttgcctgtgttacactccaatttgctttaatttgtttggccttcgtgcgcaatggaacttagctgtatactagtacatgcttccccctcctctgaatcatgcctccgtagaggagaccagtctcccagctactcagggtaaagttaacaagacagatgataggtctcagtcactgctgcctggtaattcatgtgcctctgcctagaacccatttctttcttccttccttcctttctttttctttctttcttcctttcctttcctttccttccttccttctttttccttccttcctttcttttcttttcttttcttcacagagtcttgctctgttgcccaggctggactacagtggtgcgatctcagctcactgcaacctccgcttcccaggttcaagcaattctcatggctcagcctcccgagtagctgggattacaggcaccagacaccatgcccagctaataattgtatttttagtagaggtggggtttcaccttgttggccgggctggtctcaaactcctgacctcaagtgatctgcctgcctcggcctcccaaagtgttgggattacaggtgtgagccactgtgcctggcccctagaacccatttctatttcctgaaaatacttgatcttatctacaacatggaaatatcccaaacaaagggttttccctcatctctagtcctctttggtgtctcggcccacgccctccccccactttggagaaaaactgtggtccaactctaaatcccacaagtttattctatttgtggaattactcatccttagttttccttcagttctctcatagttcttagaactatgatgaagtttggaattagacattgcccagtaataaatcccggaaaaatagaacaaaaaattaaattttactgcatggtatagagccttgcccattgcaaacgatgaatatgttttaaagtttttaggaaggatggaaaatagtcataaaaacaaatgatagggaatcgttttgcagctcagagatttcagtagtaaatgtctatcaaatcacttgttgaagacagagttaagaattactgagttcccggtcccatgacgtggactctagtccacggagaaagtattgttcaatttcagggtgcttctcttcctcacaagttcgcatatgtctgatcgaatgctgcctcttggtcataaactcaactgtgatatccatcttgcttcttgaagaagtttttccaaacctcaactaagtttccttctctccctagaagacagtcaccccaattatgagagtgttgtgtatattttgattatacatacaattggctcttccaataatgatgagaaagtgtttaatataattattttctgatgcctttagtctgtcaccaacaccttctcactgaagaatcaggctgatatttttgatctaatgcagtgatgggatatatagaactttagaatatgatatatgtgtgtaaagtacttaatgtctagtgacacacatatccattttcttgcatattactttgttgatgttaattttttatattttcttagactttagctaattttaccagcttctaatattatgtacatgtttgatttcttttggagagaatttgaaagggcataacatcctaccttaaacaaacgactactagaaaggatacaagaatgttttaatccatgaaataagttgccagatattataatttctacattttactgaattaggctttgagaagcagactgtcttacataatttgtttagttagttgatattctattgccatctacaaaaaatctaaaatcccttgtcaacttcctctgcatttccccaacaaacttccttattgttcaatacagacatttaataaattgttgatgagttttgattatgtctcgtaccactgccatttcatgaatgaactttctgtatttcaactagttcctttaatcaactatttgtcaacataatcaagtataagtgacactataccttatgtttcacagccttttcactgttttctaagacaactgccactgtgatcatttatatcattagcccacaacttaacaactaactctttaatacctaacacatgcatagcagcctatttgatcaaatgtgggaccaagatttcaatccagcatcagcaatttttccctacattctgtgattttggttttataacttgatatattgttgctaaataatttctataactaatgcacaatttttttattctcaaactcatctactttgaattttttaaaattccagtggagcttttgatgtcttaaagacaaatactgaggttataactaaggtacataatttggcaatattcaaaccatgaatctgagtttaacttatttcttttttgtcctctttttccacatcatattgcttctaattacatgaaaaggccattgaagttcagtctttcactctttcaacttatagatttatgcccaattagaaatatttctattccagcattttcaaaataagggaattctttgaggttaatttaaaaatgtatatcttgaattgatacctcaagatttctgcaggctgaatagaaacttagcgaaggagctgaatgtattcttaaaatgatttaagaatgtgtggtaactctttaatgcacagagatgctttttaaaagtatttgtcaagattctttgaatggcaagttatcttcaaaagttagcttagatacaaagtagggtttataagaaggatactgggtgatttcatctcatcaaaggaagggcttctagaacaaaggaaaccagggacaagaatctgtcagcatgctctctcttccccgctctttttgctgattgctgcacaacttctttttcccttacggcagcctggcttccttaatgtgtcaggaaacatggctgcagacattttttaagtttagtatctttggctcctaccattgactcttactcagttgcagtttggacacatctgattggcctggattgggtctgatgccatgccttgccattgattgactggaattatcaatcagtcaatcaatcaaccatggtcaggatggtggggttgtataaacaatagcaacagtgactctaatcatgaaaatatctaccatatccattaggaggttttatggcacaattaacaggaaacttgattcaacctggtttaaacacaaaggagcaattcattggtttttaattctggaaggtttcaaagttgggtgtgcctcaaatctctcaattcagcattttaattatgtcatcaaatattcaactgtttctgtttttactttgtgctactccagtgtgagcctcatcctaaggctggctcctctcattgctgtaggggtgctgctctcacagtgggtactcctcacccacatcagaaagagagatggcttctatcctgtggtaagctagagttgggttgcaccatcttgcaagagtcaattttgctcatctattcctattctgcatttaatgacttgttgttaatagcttgaaattggctatcgtgggagtatttatacgatggaaattggcaaatgccacaaatctctcggagagttggttgttatatttaccagcatactactacctctattccaacttccaaatatcaaacaagggtgttgaaattcacctttattggactggattgggtcacacacccacctttgaaccaaggtctatggccaggggacttggaattataaagtaagtgtgcataacgattttgtcagcgtgctcttgtaggaagagtattctaacagcaaacagcaaacaggatgtctgatttcagagtccaccgtgccatagcatgtgcttatataaaataatgtagtttgggtcattcccaatggggcatttgtaagtaagtaaattttgtgtgttggggtgatgtggatcattagatatatgttcaagttagcatcgccatgaaataaaagcattttgttcttgtggcttgtaaatgaaaatgggaaaatatttcacattgttaatcatcagagcaattaaaattaaatatcacaatgaagtttcgtttcgcatgcaccagaatggctaaaattaaaaagactgacaatgtcaaatgttggcatccctgcagagcactggaagtcccacacatccctggtgagaatgtatactgatgtaactactatgagatatagtttggcagtttcttgtaaaattaaatacatacctaatttgggggctaataatttcactcccatttatatacccaaaggaactgaaagcatgtgcccacacaaaatctcatgcatgaatgttcatagcagcattatccataatagccaaaaggtggaaacaaaccaaatgtctgtcaactgatgaatagataaacaacatgtgctatcactataaaaaggaaaatattcagccataaagaggaatgacatactgacacatgctactacatggatggactcaaaaacattatattaagtgaaagaagccagccacaaaaggtcacatattgcatgattttattcatgtgaaatgtccggagtagacaaatccatagaggcggaaagtagtttagtaattatgtagggcaggagaccatatacaggaaggatgagactggagtgattgttaatgggcataacattttcctatgggcaatgaaaatgtagaattgggaagaatgtcagatgccaaaaatgttgtgggagagtaagtcggcaacaccaatctagggatcatttggtaacctgaaaaatagtcttaccttagtgccagtatctaacttctgaaaacttattctgatgaaatgatgaaaaacttcctcaaatatttatgtacaggaatgtttgtttcaacaatatttttatttacagaaatgtggagaatatagaatttcaagcaataggggattgatggaatgtggatggcacatctatatgttggaatttgatataggcattaatatattatgttggtgcaaaagttaggctggtttttttcctttcctttcataataatataatgttttattttatttgagatggagtcttgtgctatcacccaggctggagtgaagtggcgcgatctcagctcactgtaacttctgccttccaggttcaagcgattctcttgcctcagcctcctgagtagctgggactacaggcgcgcaccaccacacctgactaatttttgtatttttagtagagacagggttttgccgtgttgcccaggctggcctcgaattcctgaactcaggtgatccgcccgcctaggcctcccaaagtgctgggattataggcgtgagccaccatgtctggccctaatataatgttttagaagaatatttaatcacatacaaatgcatgatggatgtaatttcatattgatacaaattaggttaccatatgggtgtcatttcctattaatacaaattaggtatgatccaagttaatattttaacagtatgtgttcacctacaaaaatcactggatatgttgtagtggacacatatctttttaatttcttgtttattttgttttatatttttctttgggggatggtaggctggagcatatattcacattataattggcaaacaaaacaataatatatattttatagtccttaaacactaatagtgtttgtgtgaacatctaaaatggttgttcaataaacattaaggagtttctaatgatatctccatgataggagtcccttatctggacataagcttggagcaagttttctcagtagcagcgctattgacatgttgggctaggtagttttttgtgggtcccagagggtccggggtgtaggtgctgccctgtgtatagcagcatcttcaggagcaaccctggtctctactccactctacagtgtgacagcaaaaatgccttcagatagtgccaggtgttcttggggaggcaacacggtccccagtttacagtcactgagttaaaggaaccgttatctaaagaaaggaaattctgaattgtttcaaggtggaaagtgtctactgtgaagtcctacctgttttatcatacctgtgcttgttttgtagttagagtaaacattgtttcaacaggaaactaagttaaatatctcgtttctcattttaatttttatagcaattgcatgagtcatcatcacatttttgtttttatttttatggccttaattgtttgtgtaggttctgatcataatgcggttgttccatgccttttccagctcgttccgctgtgacgggaagctgtgtcaacgatggcgtgcacattatcagaggttacagcgtcatgtccaccccatttgctactgtgtgtggggatgagatgccagctcccctcaccatcgctgggccggttctgcttaacttctactccaacgagcaaatcacagacttcggattcaagttttcctataggataatctgtgagtagccataatgacagagtttggaattttcttcttttctgagtaatgtatacaaagagttttcactgcgattcatacagcactaacttgaagattcagagaatttaagggaaaaagattgtcagtgaggttcatggttaaaaaatacatatacacattttttcttaaaaagaagaggacctttttcaggaactttggctagaactactctgaaaatcaaatgaagaattgacatttgttttgtaatttaatttaaataaatactactgctatttttttgtttttcttaccttacacaaagttgcctgttggtccaaattatccagatgcctgttttgtttccccaagtcattttgctaatacaaaaattaatattttatatatttagaagaaatataagagaatgtctttacagtctgataggaaagacttttttaaaacactatgcccaaaacaaaagccctaatggaaaagattgatatattcaactatgctataatttacaacttctctgcatcaaaggcaaagagaaaagaggagcaatagactggacagaggcatttgttgctacccagaaaattctaagattgcatttcctgatcttgaatagtcttttcccctcctgcctggttagtttgctgacaatatttatgcactatctaatagacatctcagctgcagtcaaactggcacacaaatcttgtaacatctttcttgagtctatttcatctttgctccaccaaacccattgctaaaggtagaaagttaaatagtttcccttggaataaattattgttcccatctccagagaagactaaaaacatgtatttacttctgaaaaggccctccataatttgttcacattagctgctatcggcatcctgactcccacagtttgtaaagtatgactacatatggctgtgtagctctgttggctctagcagaatagaaccacgcaattaacgtttcctctcccgtcgtcttgttgaataaagagaaggatggatttgttttattcttttggcacaactgctgctttggagaggtaaactcctgctttatattcttcttctctttaatctctcattttcctacaaggaagtagtcaagattcaatatattctagtataagagtcccacttaaagagtgtcgttgatgtgaagacttcaaatgctgatattgtgcaaagatgggagttatttaggccttgataaacttccagagaccacataattgtgtataaagtgaaaaggagtgattgctacccttatctgacatgtaattcacttttacagatggacctgggggtctgaacacacaagtacttacaggcacatagagaagagtgctccctgcaaggtgggctcagttgaggcaaaaacagtaaagaaataaagagcctgacatggcagcctcaatttgttcctcatttctgaggatgtaaagtggaacgtgtccactgatagtgtataaaccatggaaatacttcaaaatgcgttaaccccattataattttagaatcataaatatacatagataggtctttccactgcagggagagtgatcatcaggaggtacaatctgatcctcatatgtaaacccaagcaaaaataatcactttatattgtggataagaaggctttattacatttttatgtctgtcgttttattgactaatggatctagctcaaggctctgagctgttaattgctggaatcctggagaggaacgggcctggcctcctcctgcttgttgaggattgaggatcagtgatattaatacaaactggggcaagtttagtccttaccagtctcacaactgactgcaaatccaccagactggagagctatacatttgagcccacagaaggaactaaactggaaagctccaaaaatgatttccagtagtttaccatataatattctatccctgacaggagagacagggatctctattatttcagatttccagatcacaaccttcctagatctgtacgcccagaacatcattctggccgccttttccgtacttcgttactgttgtcatccctctctcaacctgtcaatgaaatacagctaagtgatggtgaaatgttcctgctcgtcattttcactctggccattaatttgactcagactgattcctttccaagatgagcctttaaatattcttccctgtttctaccctcttgctgtctttcatcttccttcctagtggaaaaatcagaattatgtgtaaacacaatgaagggagatataagtcactttaagaaaaataattattacctcttttagggaaaaatgtacaatagtatagaatctcttaaaatcatttttccatgctgggactaatcgttgttctcttcatattcccttgtcttctgttgcagcctgtggtggtgtgttcaatttctcttctggaatcatcacaagtcctgcctattcatacgcagactacccaaatgatatgcactgtctgtataccatcaccgttagtgacgacaaggtgatcgagctcaagtacgtaagacaaattggctttcttaagaaaatcctttcagcattatttatagaagagccattcgtttattgatggagggcactgattctcatcggcagtctggagggaaatctacacagaggagtgatgttcctagatgacagttcaacctgggaaatgacgctccccctctccacacaagccggtagtaactaagggcaaaaaacaagcactcaccagttaaaacagtcgttatagtttcccaacaattgtgaaggagcatcataacatggattgtcaaggtataataagcccatcttgaaatcaaaggagagaggaagggcaagagaaagcagttgccatgtgttgggtatttattatacacaaagaactttgattcacacgtgccgtaattgtctcattgtattcttaaaacagtcatatgaggtatatatagattctagattgggaattgtatagattattcccatttcactgatgaggaaactgaggctcagaaggatcaaattgctttccaaaagtaacacacacataaagagtcaaaatgtgtattcatgccaggcttcctccaaacaccacatcctcaatgtttcccaatactgtctctcaaagtatacattttcttttttcttttcttttttttttttttttgagagaaggtctcactttgtcacccaggctggagtgtagtggcacaatctcggctcactgcaacctctgcctcccaggttcaagagattctcctacctcagcctcctgagtagctgggattacaggcaggcgccaccatgccctgctcagttttgtatttctggtagcgacggggtttcaccatgttggtcatgctggtctcgaactcctgacctcaagtgatcctcccgcctcggcctcccatggtgctgggattacaggcatgagccaccgcacccagcctcaaaggatacattttctaactacttaagaaatctatttttatacctgtgtcagaacacctctaaactgatgctatgagagatagcttgagtcactggtcaattttcttcccagtcttacctattcccaacaagactgatgagggcaatgcaacctcccactctccagaatgataaagttcaagactgttttcacctgacagcctatttcagtgatatacgtatggcatgtggtgggaaactctgacagtaatattgttcatggtcatgtaggactttccatacagaagcctgatgggctaagaccacacctacctacctacctacctacctacctcccctctatttgtctgtgatcattttctaccctaaagattctgtactccctgcagtttacttccagaggcctcatgtatcagttggctctccaagtgaacaagagatgtcttgatgaaagacatctctcatcaagcctgatttggttcctgtatcaggcgttctataggctggacctcgaagaaaactgcagctcttacctggactatttgtaggaaaacagagtgtcttttaggtcttggggacaaaagaacagaaactgtcagatggccaggagcaggagttctgtgaagtatgcctgcacaggcgtgaaagtgtaagggggagccatttgctactgtgactcactatttgtttctcatatgtgtaggattgattattgccttgttctgttcaggttgctttaacaaaatatcataaactgggtggcttataaacaacaaaaggctgcaaaagtccaaggtcgaggcagattcgttgtctggtgagctcctgttttctggcttatagaaggtaccttcttgctgtgtcttcatgagctggaagggcctcttataaaacactaatcccatttgtgaggggtcctcccccatgacctaatcacctcccataggccccacttcctataccattagcttagggaacatatgaatttaggggaacacaaacattccaaccatggtatacataccaactcatagaggtatgttatatattctctctctctttatctgtctatctatctatatatatatgtatgtatacaatctaaatgtattttttcagttttcagcctggatcctggagctcaccataatgaaatttacatctgcatgtttattttattttacttatttatttatttgagactagctctcactctgtcgcccaggctggagtgcagtggcgtgatctcagctcactgcaacctccacctgctgggttcaagcgattctcccaccttagcctcctgagtagctgggactacaggtgtgtgccaccagcctgggtaattttttcttttgtatatatatatatatttagtagagatggagttttgccatgttggccaggctggtcttgaatccctgacctcaagtggtccacctgcctcggcctcccaaagtgctgggattgcaggtgtgagccaccacacccagcctacatctgcaggtttagaaaattatttattgcgcactaagagcctacattctaggaaacagataagattctaggtgtggtagaagatgcagacattaataaaaggctctcaaaagattgtggttacacaagcttttctgtcaatgggcttttcagatctcttctgtgctctcctgggaaaatgatgtaaaataaaaagccaaagcagatttaagtcctcttagaaactcagattttatctctctttgtggattctttttgtgaaaaataaatgtgttgtctgtagagaattaaaatgaatacagtgttgttggaaattatctagctattgttcttccctgatcttttacaataacattaaatgttaaatgtggtaaaagaaaatcaatacggttttcatcttgttcctcatcagtctgaaaaccttcaaccaaccaaaaccttttagaaaaaaaaccaacaattttttttctcaaggctgttgaaaggaagcatttattatatattttatatataaatatatattatttagtctatattttcaaaattattccatattatggattgtttattagagctactgccaaaataaattgaaaatgcaggctgggcatggtgtcccatgcctgtaatcccagcacagggaggctgaggcaggcaggtcacctgaggtcagaagttcaagaccagcctggccaacatggcagaaacctcatctctactaaaaaatatacatgtaattaaaaaaaatagccaggcatggtggtggacacctgtaatcccagctactcgggagggtgaggcaagagaatcacttgaaccagggaggcagaggttgcagtgagctgagattgtgccactgcactccagcctgtgcaacagagtgagactctgtctcaaaaaaaaaaagaaaaagcagaagaacctataaaaatgaggacaggatatcaaatattatttttttaaacaagttttaaaaataagctataataaacccaccacaaaactctaaagtaaatccatgtaagaagccttgcttgttcaggaactctagaaatcgttatttgaaatgacaaagaataagacctgaattaaacactgtataagacagagaaaagttagggatgcatctgtcaggataggttatgcacatagtaacaaacaactccacctcacagcagcttaactcaacaagttgatttctcattgtaatgagcatgttcagtgtggcctggcatggaagctctgctcatcgtggtcatccaacaacccaggctgatggaagcttcgtttttacatttgcttccatgatcatcactgcagtgggaaggcagtgtggcaaagcaagtagtcatttgtaaagcttcttccgtaaagtaatatgtatcccttctgcttacatttctgtggtcaaagcaactcctagcagccatgtcaagcctcaaagtgtgcccctagggcaatcctaccagtgctggggaggcagagagctgggaccatgtgcagaagtgtcagtgaccaccacagaggtcttaaatgtaaatttcctgttcttcacctgaccttaacataaacttcattttaaaagaggaaaatgagactgtgaggagaatggagctgtgattctaaaagcagcatttcttctattatattaacatgcttcccataagttctacttcatctcataaaataacaagggaagagtaaatatggtatttttaatgagacctaaaaaactaaagtattgctgggatagtaaatatcagttcaacttgtcaaaagttgttctcagatggactttaatatgccctagactgtgaattccttgaaaagtaagactgtatcttactcactttgacatccccagctgctgtcacagtttttgttgtattgtaattactaaaaacaaatttggctaaacttttgaactgatcagtaaagtactgtttgatttctaatatttcatatcaagtgagttttgaatgctctactggtagttttttccttgtcattttttttgcaagagctaaagctacaatttaatagaagtccaaatggaaacatcagtattaacaaggtacatttcacaggttcagtgattttgatgtggttccctccacctcctgctcccatgactacctggcaatttacgatggtgccaataccagcgatccccttcttggcaaattctgcggttccaagcgcccaccaaatgtgaagagcagcaataatagtatgctcctggtgttcaagacagattcatttcagacagcaaaaggctggaagatgtctttccggcagacattgggtaagaattctggacttgtaaatctatttgtcaggactgttacctttctgctttatttaatttccccgccccccccccacccccacctgattatgattgcttttccttgaagcttagaagaatatgccatgtaagggcttggttttaaaacttacgtatgacatattttaatgttgtaaaaaaatcactcaacaaatgtacccagcactttgggaggttgaggcgggtggatcacctgaggtcaggagttcaagaccagcctggccaacatggtgaaaccccatctctacaaaaatacaaaaattagctgggcatggtggtgtgtgcctgtaatcccagctacgcaggaggctgaggtgggagaattgcttgaacccaggagatggaggttgcagtgggccaaaatcataccattgcactctagcctgggtgacagaatgagactctgtctcaaaaaaaaaaaaaaaaaaatcactttggtagcacagtggaggaaggctagaagaacctacaacatgggaaggaagaagcttatgatagaaatctagatgggaagtgtcaaagccttgaacggacccagaggggaaagagataaagggaagggcagaaatctgagagacggaaggcagaatacattggaagcacagtgtttggactctgatgatattttaatgaggacatgaattgaggatgactttctataggtaatttgttggatgatggtggcttaggagactaagatttaagggagaaatgttttatttaatttggagtattttaagttggaagacctgtttaaatggagctgtctagttggaagctgatgcttgagaaggaatttggactggagagggtgatgtagcgggggtaggtaaagttaggtgagaggataaactgaaaatatgccccagattactcccactgcatgtgagaaataaattatccacatcaaacaccactggtgagaaatacccatatcaaattaactcagaattttgaataatttaaaataaaaggtagttaatcaattacctgtttggctattctaacagcatcagtgacacagtctaagatcattaatattcgactctggaaagtgttttgatccttttccttttgaatatagatgtgattaatgttctaaaaatgcacaactctccaaacaaatctcatactctgtgaagactcagaaaaatccaggcagttttctgtaataataaccctgattcacttttcaaactttctgtttcttccatagtgtggataaacttcgtttctctgatgcaaaacggagtttaccttcaacttcttgatattgggcatgtgaatttttccatgcagtacttgaggaaagcaattagacattgtgttttgaaggcttcccggtaaaccacacacctcaagacaaattgtatcagaaaatccctttgccacctcccctacttagctgtctcaacagtaacttgaaagcaagtctcacgggcagtgagagagtgttgccttaacagaattgtgtaggtgaagtagcatacaaaagccagaaggctattttgaaagaaaaattaattttcctttggagatttttttttgcacaaaaaagggatatattcttgcctttagcacagactttagaccaaatgtcctatgtctgcatttgctttgctacctttcaagttgtttttctttttcctaatatagtctcacaagaaaatggtaattgttgtgttaacaatctcctcactgctatcatctgcatgaagcttctcaagtgagccagggttccctagcctcattaaattaccatgtctttccaagccacaaagaagacatttttagacctattgtgatttaacagaaggaaaagtcttacactgtcagaagcattctctatgcacgagtcattgaacaattacagtcacttactgttttcctctggccacagttagggaaaaggtttaagtggagaatgtagaaacggaactccttgccagcattgtgttacccctgtatttcatgaagatgatttttacctctttttcatctgcataaatgccatcagccacttggaaatacttcaagtcattgtaactactctttgatggtaatgtttaagtgaaaacctaagtattatgattttgcattgcagtggtcttacaaagctttcaagaccacacactgacaagtttattgatcattctgcataactttcaaattttgtttcattttggtttttattgtttgtagtgaggagagggggaaggaacaataagaatagctttgactgtaaggtttatagggtcgtttagttatagctttggatgaagacaaacttggctaataggatgccccttttgcctccaactcatttatgtaaaacaactctgtctttcccctgaagagagggaaatcaactttgtggaccagatagtggattttcatttacaaagctgtttgctcagcctggaaaacaatatcttcacttagtaaataattgatgtgaagaggagaccattttagtctatgacatttccgtttcgatcttaactaaaacactaagtagggttttgcagatttgctatttagattatacacttggcaatgttttatgtacatctgcttcaatttttcaggatgaagagattggcttatataattatgtgactattaggttcaattcgccttgtgcatttgttatatttgtattgctagcgagtcacagcaaatttgggggaactatccctagttgctaattactaaatatgtagtgaaattgggtctcctttttcctcggaacttctgctgctggaggcccatatgcatggatgcaaggtaaggagaaagcacatttggcaagcatgagctgatctctaactgcaatggaaatgtgcctgcttgtctcccccctgtgctccaatgctatatgaataattgatcctgaatggctgacaaccagcaaaatgatcacactgggctgcagcaatctgtgaaactctgaaataatctgcaaatcggagcatttttcctaaccgagttcatagtttgcatcagattgtcaatggcttctatgctcctataaagtttaaaaagctgttggttctgtggatttggctaagtgggcatggcctataggcagaacggatgcttttaagtaccttctgtcctgttaacttctgctagtttagttgctgccccttcctttaccagcagggtcgtctcctgccttgactctgtttatgtgtgtcctgtacaaatcacttcacacttgcaaacgtatttttaaccatcagagcctccagttcttcctgagggggtctcataccagagagttgcttggcctattcacaatatgcatgtcacactacacatcaaacttctacacatagggttagatcaggggctttcagtaaacttatttatttactgtgcagtagcatcattgtttcattttttttttctaaaatgatgtattctataacacttcagcaaaacttcagtgtagaaaatggaacttggctctattagatgggaggtctgcaggcatttcaattagtgagttgccaaggagagactgaggggtgtcccctgcaagacagcagggggacagacagcacaggaagacagatggggaagacgcaccctcagggacaagtggtggcagtgcctgtgtttctggagttggttccttctggtgggtttgtggtctcactgacttcaagaatgaagccatggaccttcgtggtgagtgttacagctcttaaaattggcatggacccaaagagtgagcggtagcagggtttattgtaaagagcaaaaaaacaaaacttccgcagcgtggaagggtacccgagcaggttgcggctgctggctggggtggccagcttttattcccttattgccccctcccatgttccatttttgtcctatcagagtgcccttttttcaatcctccctgtgattgggtacttttaggatcctgctgattggtgcattttacagagcgttgattggtgcattttacaatcctcttgctagctacagagcgctgattggtgcattttacaatcctcttgtaagacagaaaagttctccaagtccccacttgacccaggaagtccaactggcttcacctctcacctggactcaaagctcccagccagcccctgttgcccagagcacacatgctgatgacgagggccactgtctgccttcctccacctggggtatttgtcacatggagactgagtcaggttgcattaaggtcagttcagagacctttgctaagagaccaaggcaaaaatacccaagcacatatataacaaggacagaatgaattacagtccaacaaatgtataaatatgttcaggtaggctgggcacggtggctcacgcctgtaatactggcactttaggaggctgaggcaggcagatcacttgaggtcaggagtccaagaccagcctggcctacatggtgaaaccccgtctctactaaaaatacaaaaaattagccaggcatggtggtgcatgcttacaaacccagctacttgggaggctgaggcaggagaatcacttgaacccaggaggcagaggttgcagtgacccagtgacccaagatagcaccattgcactccagcctgggcaacaagagcaaaactccgtcccaaaaaaaaaaaaaaaaaaaaaaaaaaaaagctgggcatggtggctcacgcctgtaatctcagcactttgggaggccgaggtgtgtgaatcacctgaggtcgggagttcgaggccagcttgaccaacatggagaaaccctgtctctactaaaaatacaaaattagtcaggcatggtggcacatgcctgtaatcccagctactcgggaggctgaggcaggagaatcgcttgaacctgggaggtgaaggttgtggtgagccaagattgtgcccagcctgaggaacaagagcaaaaaaatccatctaaaaaaaaaaaaaaaaaagaaagaaaaaaagacatatggccagatggaaagagctgattgatgcatgatatcattgcttggtgatacggctttagaaaagccctataacgttttgaatctcaatttttatctactaaaaaactgatcaatttgaaatattacaactatttaagaatgtgatggggataaagcagataatttctggaaagcaccttagctgtcagagtgaaagactctatgtattagaaagtaatattgaagtcccaaattttcaagccccccgcccaaccctatttccaaggttggagggtggctgagggtggggtgggcagggatcaacattctcaacaggaccacatcatgctacagtgatttttcgttctttcctacccactttgcagtgacacctaaccgtcaaatcctaaagtacattttataacctaaatctgaaatcaaaagctacattctgattaaatccccaggccttgcacaattgttactccatcgatattgtccatatgagtgatttacagaataaatggataaattgtgcctacttcaaaatcatattttataatgagatataataatataccatatagaacacattagattttatctagattcagctcattctcaaaattcaatcctggtttatataattgttgggtaagctctacacagggaggtaaattgaatcactttcatcttcagagaattaggaataccggatcacactcaatatttaggtcatctgtgtttctctcctgtgagtttttgcctgttaccttaacatctggaaaatgtctctcaaacacgttaaatgaagacagtgggagtggcagaaggaagttgaaggggataaaaaagaaggaaacaggaaagaaagaaagaaggagacagagaaagctgaagagagtctagggccacaaagatggaaaacatggtcacaacaaatggaaaaaaaaatctaacatgtccaattcagacttctgcttctagttatttttaagtttcccagttttggtgttaaatttaaactttgtgaggcattctaaaatagctaaacaatacaagaataaacttaaaaattcaatggcataaaaaatatatgtatatgtctctaggtacctcttggtggcctgattgaagttgtcagctcacgttactgttagaagtacaaatgtaataaggaagttgaattataacttgaataattggataaatcactgatcaaacaactctcagtttagcaataatgagggtattgctccaaagcaaccatggaatgtcatttttctggtttcctaatgtcatttgctccctgtgatgaagtctgagaatgagatgagctgaaactgtaaacccatttaaagaaaaacccaactaagcttatttccgctctttttaagccctgtaccttttactggtgattagacttcccttgggggatgatcctaaagacaaggttatcttcacgttattctttgtgggttttatggggaaaggttttttgctgagctgagaatgtgggaacgggataaagaaaccaacaaatgcttagttcaccaaaactttacaaaagcaagtagacaggagttaaataccaaatcagcaagaagaaaggaaaggttcttaataaacatatttcaacactggagtctgtgcccccaccaatgactagattgccactcctggtcttgaaggatggggctgtccttgtgaaaataaaaccacatggtattgtggagaccaaactaagtgataaaattgagttaatggtaaattataggataacattttgaaaaacactgaagggaacaggtgctgggaagaagcacttattatgtgtaatctaaaacacaagacgcgacctagttttgtcgcaggtaactggttattttgggttaaattatttgtacccataaattccctataataatcaacatccttactcagatcagcctggctttgttatagcattcccaggaacataaaaacaaaatatatgcagtgagcaataaaaattttaaaacattcttttgttataaataaactgttaggaaatataatagtgggaccgtgttcttctcttcattctaatatgtgaaaagtctgttaacattacatggtagctgtacattttgctcactcacaagtaaagacttgtcaggaaatcccagggcatcgtgaaaatcactgcttgtccctgaacctgtgccctaccagatgtagcatgagctgcttgatgtatattactttatctaatcctcagagctaccagatgagacaggaattaccccattttacaaaggaagaaagaaaaatttaagagattaagtaatttgtctgtggtccaaagggtttgtaagaggtaaagccaggctttgaacatgagtttgactgtcccccaaactcctgattttcttagtaagccttcattgcctctgtggcaattgataaaaatacccagggatgtgatgtgtgtgtgtgtgtgtgtgtgtgtgtgtgtgtgagagagagagagagagacggagtctcactctgttgccaggctggagtgcaatggcgtgatctccgctcactgcaacctccttctcccaggttcaagcaattctcctgcctcagccccttgagtagctgggattacccgcgcatgcaaccacgcctggctaagttttgtatttttagtggagacgggctttcaccatgttggtcaggctggtctcgaactcctgacctcatgatccaccctcctcaggctcccaaagtgctgggattacaggtgtgagccactgcgcccagcccccagggattctttttaacagaaatgtatgcaaaagggcactggaagcaagaaagaagggatctatggtacttggatgttccgtggaagaaaggacacaggactgttagaggatgcacctcagagaatgtgagtcctgaattatggtgcagtgggtaagagggtaaacgtggagcatcacatcccagattcaaactcagtttgtacatctcattgaggtcgatcttggacaatttacttatccactctgagtcttgatttttttttttatctgtaaaaacagtacactaataataatgaccttatagggttcagtgattaaattagaaaatacttgtcactcatttcacatgcgagaatttttagctataaatagtattattttggaaggataagaaggcattcattggccaggcatgctggctcacgcctgtaatcccagcgcttgggaggctgaggcgggctgatcacctgaggtcaggagtttgagaccagcctggccaacatggtgaaaccccatctctaccaaagaatacaaaaattagctaggcttggtggcacacacctgtagtcccagctactcgggcagctgaagcaggagaatcccttgaacctgggaggcagaggttgcagtgagtggagatcacagcactgcactccagcctgggtgacagagtgaaactctatctcaaaaaaaaaaaaaaggcattcattgggaaaatggacaatctatggagaaataaaacacatgcacaaagttacaggtgcatcccatttcaatggatgccagctaacctgaacattggtaatgctttggggcataaggcagagaacaataggtgctgagagaggagagatatgcaaaggccaggcatggagggctctgtatcatgtgcaaagaggagccagtcattgttttgagctggagcgtgctatcatctggtcagatttattttagaaagcacatcccagcacctgtggggatgatgttttgaagcagcattccagggaaaaagttagaaaagtattgcaatagtttaggcatgggatgataagagcagtggtaccatgaaaataaagaaagagactgaaaggagaaatcctcaagatatagaatcaataacacagtgttccatttgagagaagcagcttgggaagaagaaataataatgctcctaaggtttctggacaatgtcttgtgacaccactattcaaatagaaaattactaggagaggacagtgctttgcagaataaaataataaaaatgttgggttttgtctggagaatttgatgcctttaggatatccagctagtgatcagtaggtagtcagataagagagttagaagctcagtagaaacatcttggctggagttttgctcttttttattttgaagccatataatgtggcacatgtacatttataattattatatctttctagtggattgactgataccattatgtaacaacgtttttaaatgctttttgccttaatttctacttgttctgatttagtataacttccatagctttcttttgattcatatttgcgtgatatgtttttaaacccttttattttcaacttgtctctatcctgaagaatatatttggcttttgtttggctatgcctttctattgaagaatttaatgtgtttatatctgataaaattactaacaatattagttttagatagacctttgtactatttgtgttttgtttgtcccacttctttttgttttcctttaactatcttttctttttaaaattaatcacttttttattactccccttttaaaattattatttatacatcctgtgactcttgtttcagtagttaccttagagattacagtattcaaccttaatatgttagaatctaatttaaagttgatacttttatcatgttataatcaataatcaatccaaggaccttggaacattttaaacccacttacccacttcctgtcttttgtgctatctatgccaagtattttaattctacgtacataataggtacacaaaacatttttattgttttatacaattactaataatgtaaaattacccttgctgttatttttcttttcttcctgaaattctatgcttccatatgggattaatgtatttcttttggaagacctctcttttatgtttctttcattggagatcttctggtaaaaagtgttctttgtttttgtttttcgaaaatgacttgattttcttaaattctgtgggattcttgctctgagtatagagttctaatttggcatttattttcattcaggactttacgatgctattccatcatgctctggcttgtattattttgattaggaagccattgctttctataactggggacccccatccctcccctggtcatctcattgtagagtactgttattgttgctgttgttgttatttaattttattttagccattctggtaggtgtgtattaatatctcatgtgattttaatttaatggtgaacaattttcacgtgcttttcgtcatctatatatctattctctggtgaaatatctatttatatcttttacccattttctaattgaattgtttatttttctattgttgggttttgagagctttttatctattctcaatcaatgatcctttgtcagtatgtggtttgcaaatgttatttcccagtctatatcttgccttttaattttcttgccttatattggcctttcactgaacaaaagtttttaatgttgaagttcaatttatcgactttttcttttatagatcatgtttttgataccaagtctaagaattctttgcctaccccaaggtcccagagattattctggtgttttcttttaaaagttttatgattttacatttttcatttgtgtctatgatccattttgagctcattttggtttagatatgagatttaggtggaagtcagttttttgcctctggatgtccaattgctctagcaccattggttgaaaaggctgtccttccttcattgaattgcattggcacatttgaaaaaaatcagttggacatatttgtataggtctatttctgggttctgtattctattccattgattatgtgtctaactcctcaccaatatcacactgtcttgattactatagctacatggtaagccttaatatcaggtggagtgattcatcccacttcatttttctttgtgaagttgttttagctatttgaaggcctgtgcctttccatataaattttaaaataaaggctgggggcagtgtctcatgcctgtaatcccggagctttgggagaccaaggtgggaggatcccttgaggccaggagttcaagaccagcctggccaataatagcaagaccctgtcttcaccaaaaataacaaaattagccaggcatggtggcatttgcctgtggtcctagctaactgggaggctgaggtaggaggatcccttgagcccaggagttcaaagttgcagtgagctgtgatcacaccactgcactccagtctgggtgacagagcaagcctctatcctaaaaaaacgtaaataaataaaaataaaaataagttaagctttttgatgtttgcagaaaaaccttgctgagatttttataggaattgcattaaatctatccatcaatttggggaaaactgatgtctttactatgttgagttttccaatccatgaacatatatgtatctagacttatttaggccttcttttatttatttcattattttgtaattttcatcacataagcctgtatctgcttcattaagtatatacctaaatatttcatttttttgtaatgattataaatggtattgttttttaattttggtctccacatgttaatggttagtatattaaaatttgattgatttttgtgtattgttcctttatcctgagttcttgctgaactcatatgttagttctaagaatgtttttccatattacttgggattttctgcagctaatagttacttgcaaaagtggaaattttatttcttcctttccagtctctctatatattttttcttgctttattctggcaagaattctaatactacgctgagttagaggggtgtgaaatcaatatcgttgccttgttcctgatcttagggagaaagcgtttagtatttcaccattaattatgctgttagctgtaggtttttgcagatggtttttatcaagtcaagaaatttctcctctattcctagtttgccaagagtttttatcatgaatgtgtgttggattttgtcaaatcctttttcagcatcaactgacatgatcatgtcattttgcttagtaaattatttttttaatttccaagttggaaagaatgattctcataaaatgccctggggctaatgatgtatgcatagagcattttcagtgatatctaaataatgcaagataaattaaaagataacgataaaattttccttctcctaagttctttatacaagtattgctctttttctattaactacagctactgattagcttgctgaaattacctttcttttagtaaattaccattcttttagttttatgattcctaaatattaccagactaaatacacattttaatttagattaagctgggtttcaaattaggataactaaagtgagtcaaattaagtgaagcaactaaaaacaaacaaaacaataaaaaacctcattacaaaaactactaacttttttcttgtaaaacataaatattatacctgaagtattgtacacattggagattagggagtaaaataataaacactgtttacttttagagaaaaagacaaaacaggttcgtctgaaacctagtagaatgtttttacatgaatacactgctttggagcaattgtgtatctgcagctttataaattacagtaaggctgattccaaaaaaggataatgcatttctagccctgcatccctgggtggtagaaaggaagctgtctaggtgtgctcgaatttccctaaggcaccagctttaaatgtctttgtattctgcttcctgtagtttccagtaaagcttccttcagctgcagcctaaagccacagatggcttgctggaaacaggagagggcctgaagtcaagccagtctgtatctgctcgtacagcacactgtgcaccttctcagtagtggtcaaccagagacaggcagagatactatccagacaacctcaggaaaatgtcagccgtatagaatgtgagccacaaaaatgtcaattctccaaataatgatttaaaaatgtatctaactccactgaagccttcgagatgttttatccaagagaatgtaactattttttcccttatcagattgatcttggcttaagcttcactctgaggtttagtcattggaaggtaataattcaggattcggttaccgatttttaattaagtagatttagacctggatctcactccttattatggggttatatttccaatatttctttagccaaaacatgtattttctctgaagaaatggctcttttgtgtgagagagatatttccaattcagggaagaaagagtgacgtttgttcttggacgcagggtgtgtcatcagagagtgactgacacacctgattgatgaggcaggtgctgatggatgagagctgtctaggtggccccaaaatgtgtagtaatgaggaaatgatggattggtgatgctaaacatatcaaggttaagatggcttatacattaaaaaatgcaatttcaaaatatcagtatggtaaatatatatgactttctgatgcgtgggactctattgcatagtcacagaggtcgcccttgtttatattcccccaccattgaaacacagaaagagcaatgtggcaatagctccttttgggaaagaacccttcttttgttaatattgatcattacgttttctcaaagacatatacacttacatttcattttgcatggagcagttttgctatatttaagcactaaagagggggaattagagcaattgctattccctgcactacacaaataactgttcactcatgtaatatgatattcacttcaaatatttgattattttggccaggattatctcatgatatttttctccatgttctttattctgtgtgtatattttgtgaattgaacaatgagctctattatagtttgatagctcaaacaagctattaatattagttgtgtgtattagtctgctattaccatgacagtgctacttaacaaaccatccaaaattcagtgtcttataatgaaagcatttgtttttatcacttatgggtccacggactagcttgcctgcctccgttccaagctgcgggttggctgtagttggctgtaaagttgagtctgggttcaagtctgctccacatgaatccactttttctttgaaccagcagttactcagcacatgatatcttagtggatcacaggagcacaaagtcctagacaacaataaaaacaagaacaaaacgtaagcacgtttaaggcctctggctgcttcatgaccactaacactcattctaaagcaagtcgtagggctaagcctaacatcaagtgcacagaaaaatatactctccattttagtgcagtgcaaagagagatactgaagaattaaaaatcagccagttaagctgggcatggtggcatgcacctgtaatcccagctattcaagaggctgaggtggaaggatttgcttgaccccaagaatacgagaccagcctgggcatcatagcaagtcctcatctagaagaaaggaaggaaggaaggaaggaagggaaggagggagggaggggaggggaggggaggagagaggaggggaggggaggggaagagagatagagagaaagagagagagagaaagagagagagagaaaaaaggaaaggaaaggaagaaaaaagaaggagtgagggaggaagagaggaagggagggagggagggaggaaggaaggaaggaaggaaggaaaggagggaggatggatcagccaatttaccactcaatccatggcaaacacatcagtgatttaaggatgcttgttctggggttccctggaatgtgggtgtgctgctttatggcattagtcatagcagtagtactacataataagtgtgtgtaatggcattcactgggcccaagtacaattgccatcttgcccttatgaacttattagtaacagttaataaacaagtagtgataaatatagcttgaatgtttaaaaataacatttagtttttgaagctgatgattaatagaataatgcccagcaacagcattttcctgtctacctacctccaactcttcagtgctcctacctgcagccctcaccacagcaatgtcctttcacctggtctcatctccttcagtctcgttcccttgcatgtaaaatgctggttctggatcaatttttagatcagacttgattagcaagtgcatcctgattctaccacttatttgattaaaaatctttcaactgaatcccattagccaaagaacacagtctgacagccaaactctgtataatccagcattgaaggccctctgtagaagaccccatcctgttttcccaatcctaattctcattattctccttcatgtgccctattcttttctcagagttatgcttgcccatgcatataatgtaaattcttgcccatttagccttggatcaagagattctttcaggctggaattgccaatgccaattccatttctacatggttttattctatttatgcttcaagacccagatccaaatcacctcctccttggaacagttgagatcctcatagcccaaagtaatcttcatctttttgcaaaactgtaagacgtttctgcctcttttactgaacctatcattttctaaattgcgtcatcattatttatctatgtcttactactaatggactatcacttatctttttctacttaaatactaaatatactttcttgaatattgaaacaatatgtaataaataaatttatcaatccattcataccctcagtcatcgttcttctgtgctacgcatgccaataagcttaagtggtttccttaagtaacagtcagttcacactggaatcaaagctgctcaaactccacaaactccaaccctctcttgagtttgcaggcccatttcagattagcagaatcattagcaacatgtggtgaagcactgcgtattgcttacgtttcagaataattttgtcctatatgacctctgtgaatatatcagggactgggcctttggaagcatttcaactttgggaaatgtctgactatgcaaatactctatagtttcgcctgacttagaagctatggacaggccaagcctgacctactaagtaatgtgcctgtaacaaaaatcaccctgcacgtttgctatctatccattggatttacagacagggttcaggagagccaccattgttcatgtttactgccaaggtccaagtacaaaatcttagcaccccctaatgttgaaagcagtcttttcaccgtgagcagaaaatggaatgagaaaaatagactgaaggccaatcccagcgaagtttaactttggaactagccatgacctatatttgtgtagaatacaagctttatagacattaatttcagcaccagtttaatccctgttcctactagggctattttgagcttatttcaccatttctttcaaaattgtcaataaattgttcatccctttatgctcttcttaaatcatttctgagctgtctgcttaggccatggagtagacaaaactaaatcttatgttctgaggattgtttttttgtattcttttatggtagaccgtttaatcatcttgagattattctttatctctcctttgtatttttattctgaattataaaatttttatctgaaagaaggcctttttcttctataaagattttttcctttagcttctcatgttttggaaaagaaaaagttaaatatagagtgtggctgaatataaactggactgcagtgttaaatgcctctcagcctctttctatcacactgtgtaaataaaagatttgttggcagcaattttcttggtttgttgggtaaattcttcataaattcagttttcagtctgacagtgttcatgaaagcggaacataaaagtaaaacatatgcacattttccaccagctttattatgcaaagtacttgattttgtataaaactggatttttcaaggccaggaaaatcttcaataaatcacatcagcaatcccaaaaacgtctgtagaaccctatgtgttttcccacttctttcagcaactccgtgaataagaaggagacacctgaaggctctgctatggaagcaaagagcgagggaggcaaagatagagtgaggaagggaaagatagactgagggaggcaaagatagagtgagggagggaaagatagagggagggagggagggaaagatagagggagggatggaaagatagagtgagggagggaaagatggagggagggaaagatagagtgagggaggcaaagatagagggagggagggaaagatagagggagggagggaaagatggagggagggatggaaagatggagggagggaaagatagagtgaggaagggaaagatggagggagggagggaaagatagagggagggatggaaagatggagggagggaaagatagagtgaggaagggaaagatagagggagggagggagggaaagatagagggagggagggaaagatagagtgagggagggaaagatggagggagggaaagatggagggagggagggaaagatagagggagggagggaaagatgatggagggagggaaagatggagggagggaaagatagagggagggagggaaagatagagtgagggaggcaaagatagagggagggagggaaagatagagggagggagggaaagattgagggagggaaagatggagggagggaaagatagagggagggagggaaagatagagtcagggagggaaagatggagggagggaaagatagagggagagagggaaagagagtgagggagggaaagacagagtgagggagggaaatatagagggagggagggaaagatggagggagagagggaaagagagtgagggagggaaagacagagtgagggagggaaagatagagggagggagggaaagatggagggaaggaaagatagagggagggagggaaagatagagtgagggagggaaagatagagggagggaaggagggagagatggggcgggtggggggaaggaagaaagaaaagaaaagagggagggaggaaaggagggagcccaggagggaatgatctgatcatgttctcagagtgtgacagaaaatggaaactatgttctttttaaaaaccctccatgtacaatgtaaggtcggttctgtttggtctgcatagtgatgtctttgttttaatgcagggcctcagcaaggatgtggtggttatctgacaggctcgaataatacctttgcctctcctgattctgattcgaatggaatgtatgacaagaatttaaactgtgtatggatcataattgcacctgtaaacaaagtaattcacctcaccttcaatacatttgctctggaggcagcaagtactaggcaaagatgcctttatgattatgtaaaggtaaggctgttttatttttttaacagagtctattcatcccagactctaatatagtgtattccagtttatatcgttacaggaagtcctgctaattttgagtacaggtgctactgctttttaaaatgaccttttcttcagtgatgctacatttaatattatagatgctctatcttcatatcaaattaatctttaatatgggtgactcaaatattttgtgtgactggcttccaacattagcatttaaatctcctattcatcaatgtcttgcaaaagacgatctataggaaggtcggttttctggagagagatactcaaaggacctttggcaaatcctaaaataaacaatgtcagtgacacaaataatcacctcttaatttgtctatttcttaggcttatagatttgcttatcacattatgtttagatattaaaatggttctgaaatcccattaaaagtaaataaaggctgggcactgtggctcatgcctgtaattccagcaatttgggacaccgaggcaggaggatcacttgaggccaggagtttgagaccagcctggccaacatggtgaaaccctgtttctactaaagacacaaaaaattagccgggtgtggcggcgggcgcctgtagtcccagctgctccagaggctgaggcaggagaatcgcttgaacccgggaggtggaggttgcagtgagctgagatctcgccactgcactctagcctgggtagcagagcaagactccgtctcaaaaataaataaataaataaaataaaaaagtaaatcaagaaacttctgttcaatttttaatgactttaatattaaattattatacctatcaggttatataggttcagattacaagtgttaagtagcatcaatcagtatttactactgcactctcaggggaaaaataaaaagtatggcaagatttgtatttatgaggagcttaagtctgattagaaaattatgggatgacacatgcaaattaagaatgcatagttcaggatagtcagcatttaagcgctaatgaatgcattcgatgcaggcttgaagcaatgtgcaagcttagaaggaaagaaagttcatgaaactcgtgtgatcaagaatgacttgatagagcgagggaaaacttactcaggtcaggagagaattcaggcaaggtgaacattttcaaaaaggcataggaattgatacgtgcatgttctcgaaagcgtaaagaggctggctgtgttgaagcagaatagtgctaaagagtagcaagaaataagatggcctacatagagaaataccgagattacaaaggatcctgaaagtcaaactaatgactttagactctgtgcgggtgaaaataaggagtggttgaaggttttccaatgagtgaggtgacaacagcagtagctagggaagactaacctgaaatcagcagctgtgggaactggaaggagaggaggctgggagggctccagagagaggtccctcctaggtgagaaggtcagtcttagacctggatcaggggtgcagccatggcggtgatggcaagaggggtgcaagagaaacttaagttctaggattgcaataaactttagagaaaataattttaaaagaaaaggaaggaaaatttgtggagggaatacccatttgagcacttagttacatgcttttgtttttactatgaaaggggctaaggttgggaggccagaaaaataacagtgtggtttggtgagagcaagacagacaagtgagactgcagtgggcagagaatggaacggggctccggtgagaagacagctccacgaatagagaggacacagcaaagagccttccttccatcaggagaaaggatgctttcttagagggagtcagcatagatttcagagagtcaggctctcagctccaggaaaagtacccagggaggcaactggagaaggcaaaaggcacaggaaaagaacagacgcgtcatgaaaagataaatgtgaagaccaggaatagtgtagtatccctgaagtcaaggggcagggggattcttttacaaagcatgggtggtcaatactattgaattgtaaagtagaggccaagaaagggaaagatgaagaacagcctcattgcactggatgacaaccatttaaataaagtattggcacagaagctggatcagaggagttcatgaaagactaaagatagcaaggaatgtcaattccagtttaattctcctttcctaaaatgagacctggccggccgagtgcggtgactcacgtctgtaatcccagcacactgggaggcagaggtaggcagattgcttgagctcagaagtttgagacaagccctggcaacatagtgagaacccgtctctacaaaaaatacaaaacaattatctgggtgtggtgctgtgcacctacggtaccagcttctcgggagactgaggtggaaggatcccctgaacccagaaggtataagctgcagtcagtcgtgattgcatcactgcacaccagcctgggcaacagagtgagatactttcgccaaaaaaaaaaaaaaaaaaaaaaaaaaaaggctgggagagaccaaaatgactagagcagtcctaaagctgaattcaaaactgtttgagagctctcctggctttacagaaaggtaataaggtttagagacggagagtatggggactctaacccaattttgctgtcagacaaatttcctaatctccccgattcctcatcatttcgtcaatttttctttaaatcacataatagtacctactgtgaaaggcagttttgaggattgaaattatgtgtactagagcgtttagcactgtgcctgacataaattgtaaacaaatttacctccctttttttccccgttggagtaattccaaataggcatgggcactatggaatttctttttcttaaaaactaaaaataatggatttgcatataaaattacaattttaaattcttatagaatgatttgagtatggccctgctaggagagttgactggatttactctcaagatccatttttatggagtgtgatttgataatgtcatcaaaacagcctgtcattgtctgaatttccgcaattcattcaggccagaaactgcaatatcaaaaacaaggagttattttcttgcttcaaaataaaatatcgtttttttcaaataaattctgttcagaactattcttgttttcccccttggaaaagcaatttccttccattggcaacgtttccaactaccactaaactggcagatcaaagaatagcccttggaatgtggagcttggagctttctttattaaagagatttttctgtgataaatgggacggttgattccttttagatttttttttagagattataatcaaatcactttttagaaaagctaatttaactgaactctgtggtagatacacaagtaaaatcataccaattccattattcattcataattctatcatgatcgtttgtgaaagggttgacttggagagtaattacggtaactgaatcacgtagtgaattgtgcatgtcactgagcagtctcttttgaaatccacatcgcatccattgcaggagttagttggcaagggtatgtgccaggccctgtaccagcatcactggagatgtagagagttaaagacatctcttgaagagttcaagcttcttgaggagctgctagtaaagtgtaggagactgacatgtaaacaaaaaacatacatttaaataattacatttaaagtacaaataaaatacatttttttttttagttggagtcttgctgttttgcccaggctggactgcagtggtgctgtcttgcccaggctggactgcagtggtgctatctcggctcactgcaggctctgtctcccgggttcacgccattctcctgcctcagcctcctgagtagctgggactacaggcgcccgccaccacacccagctaattttttgtatttttagtagagatgaagtttcactgtgttagccaagatggtctcgatgtcctgaccttgggatccgcccgcctcggcctcccaaagtgctgggattacaggcatgagccaccacgcccggccaaacacatttaaataacggacatttttttcacattgtataacgtgttgcataacatgacaaaaatcataaatagaaacaacatagaagggcagagcagaagaggctctgattggctttgttttggctaggaaaggctttctagagggtgatggctgagctggaatttacaaaatgaacagaaactcactcccttttgttatcctttacgaaactgagaggagcatgaacctagctgactttttctgccaggaagtatggaaccagcagagagaggtcctcatcctaacattgcccagtttttcctcaaccccatccgtgccccttttctttttctttttcttttctttttttttttttgagacagagtttctatcttgtcacccaggctcgagtgcaatggtgtgatattggcttactgcaacctctgcctcccgaattcaagtgattctcctgcctcggcctcccaagttgctgggattacagacatgcaccaccatgcccagctaatttttgtatttttagtagagacggggtttcaccatgttggccaggcttgtctcgaactcctgaccttaggtgatccacctaccttggcctcccaaagtgctgggattacaggtgtcactgccccttttcatagccaatattttgtaatccttcctttcccacctgaagtgaatgtcatctatgctataacctacccataatgtaatttcagaaaatcactgtactatcccaaaggcaatgaaaaggagaaataaaaggaaagtatataaaatagtgtgtcttcgtatatgtaaatactctaacactgctacacaaagtcacataataaaatagattccttttatatgtagaatggtggtgaataaaaagtataaatgtaaacaaatacgggtgggttatatttgcaacccgcatgccaatagcagcatcaccatctgcaagataagtttccagaatggtggaaaaactcaaaacaaacatttctaaaccaaacaaagtacagtcttccctcagcttacacaataattgcatttctggaaatttggtgcatatcaaaactgtgcaaaaatatttttgtgtttatatataaaatggacttaggttctgggatcaaataattataaacaagtttttttttacacaaatgtctgacaggacattcaaaagttatgtgggacaaaaatcttcactttgcaaaactgtcctgtgaattactaaatgccagttataggcccaaattatagtgatgacccaaaaaccaccacacttgtgcaaaacactccctatggggtggtattgacctcattgagaaggtctgacttaatgcaccgggcttaaccattcagtctgtgtcagacactggagctgaggaggggctgtccatctttggggagaggatcagcagtctatggaaggcatcacgttcctatccacatgaggtcgtacctactattcattcattctttcattcagttcagtgttaattagcatacctactatattctagacattgctgcaagaactagagaagaacattgagattttagaaaacaatactaggaaaactcctgctcttgtagagctgattctaatcattgcttctttgtggctttttcccagacatctgggactagtataacttttttctccagaagattctgaaatgggtcagagtttagccccaaactggaaaagtcactctctattcttcttcccatactaaattatgccctggcatgttgcccagcagacctcatcagaggttctgcaataagatcaaagaattcatgaagatactctaagattctgctcccagtaagaatatcaaaatcctcttgtgatcaaattcccaggaaaatattaaaagataaagtcctaaggatattaatgtatgaaattattacctttgaaaagaattgtagtccaatatcaaagtctattgcccttgtgcattaaaagttcatagaaattaaaatccaaaaattttctttcccagtttttctaactgctcaagtcaatagctgggtgaaatgtgggattttgccgtggttgtagcagagcctgcctgccactaagttatttgtacaatgccttcaggatctttagcagattctaaaatgatcagatttctaaaagttgagaaaatataacattcttctcagcacttacccacatccacaagacttagaacgtaattcaagctccaggtccatcgcagttgtgccaggaaatgtttgctcccagaatgtggcccgtagctgcgtataatggtgtagatcctaaaggcaccatttatatcccagtttatatatgattccccctcctcatcattggatagggcgtcccctgcaacgcattgtagggcaacctggcaaaagtctgtagtgaaggtttagtgttatcagagaacaagagagcagatagagatcttgggtttgaggcagaggagtttagagcctcctatgtcagttatcccgaggccacaagctatttcaactcacttaggagaaatcttactgtggcaatgaatgaactaacacaagaccagcttggggccaggtatgtatgtcatttccttccatccagccctggcttctgcctcctaccttccttcacatttaccagttatccatttaaaacccaaatctgatcttacatcacgtaggatcagatccagactccttggatgaaatgtatggaacttcacagctttgtttgttggacttcgtcatttctcctgttctctcaccctggcctccagggccaatgaagggggtcagaagttgttgacacgtgccatgcatttcacacttccatggcctggcatttattactgtctggctgggatacccttcctgttttgtaggtctggaaggtctttttttttttttttggggacagagtttcgctcttgtcgcccaggctggaatgcagtggtgcgatcttggctcactgcaacctctgcctcccgggttcaagcaattctcctgcctcagcctcccaagtagctgggattacaggcctgcgccaccacatctggctaatttcgtatttttaatagagatggggtttctccattttggtcaggctggtctcgaactcctgacctcaggcgatccgcctgcctcggcctcccaaagtgctgggattacaggaatgagccaccacgccccgcaggtctggaaggtctctacttacatttaagggccaacccaaatgtctgtctccatcacgtgggttctcatgatacactcccattattttattgtagcacttatttttctctattttgtatataatttatatacacatatatttatgtgtatgcatagtgtatgtgcatattacacaaatatatgtatttgtatatttaatttgtagacctttactctcctttgttcatgaaggggtcttatgtcttgaagatctggaaagggctttacatgtccttgtatgcctgggatctagcacagaggcctggcatacaggtcccagaataaaaatgcttgctaatataaatgtgatcataaagacagcaatgattatcatgaaattttaacttgtttaccagaaaaagtgcatgacctaaaacttggcaaatgtgctcttccatgaaacaaaggggtgaagattagaaaactcgagtttcatctgattctgaattaactaaaatcatgtttaagttggaaagacagtgccatctagtggtgcatttctttttcttttacaatgactggttttagtcattcctgtcttacataatcctagcactttagaataatgtcagtggtcatggtcatggctgttctgaggccttgaacacatagctctgttatgaattgaatatttggagttagatacacacagacactcattttagaagtacaatggagattactcagaagaaaacattttctagttatgtgtttcagggaaatccaagcacccactatttcgatggatgtttctagaagggagccatggttgggaattgttctgggtgctggcgacaccacagtgaagaagtcagacagagtctctgtctccccacacgtgggacttacatccttgttgggaaagagaccggacaaagtaaataaacaataaataagatcagttttgattataataggaaaataaaacaggatgatgctatgggagggcaacattcaatagcattggcttctctgaggaggtgacatgtcaggtgagggcccatgacagggagtccttagctgtgtgggttcagcttcacctgaggaaggaagagcagcaggaacagggctgtggacaggagtcctcctgggatgaaggaagtgcagctagcagtgaggtgtgggcagcctgggaaggaggcacaggccagagcagctggggcttgcagactgtgggagggagctggaattttactttaggtgcaatggggatctgccgaagcattttagacagagcaggagcatcacctcattggagtttgcagacatgcaggcagttcagtggagaacactatggctgctccggaattaggcctattaagaagatgtttcagtgggaacaggtgaaggacgatggagatcacctggagatggagccctctgggatatattttgaaggtagattggagtagttgtggagtgaagagagagagagaggaatcagagatgactaaagttgtaggcttgaaacattgaggtaaagatggctctgggagaacagttttgggagggctagtgggacagaggaatcaaagcacttgtttatttatttattagatatttattgagagcctctcacgtgcagacacttttctaaaaactgggaacatggcagtgagcagaaaagaaatctgtacattcatggaacttgtattgtcttcagagagaaagccaatgaaataagcaagtttagcctggacaacataggaagaccccatctctaaaaattttttttaattagctaggcatggtggcatgcacctgtagtcccaggtacttgggaggctgaggtgggaggatcacttgagcccagaagttcaaggttgcagtgagctatgattgcagcactgcactccagcctgggcaacagcgtgagaccttatttcaaaaaaaaaaaaagctaaatatgtagtatatagaagaaggtaacagttgctgtggagaaaaatcaagcaggaaaggagatgggaatgttgggagagtttacatctggaaggccttattgagttggggatatcttttttttttttttttttttgagacagtcttgcactgtcacccaggctggagtgtagtggcaccatctcagctcactgtaacctccacctcctagattcaagttattctcctgcctcagcctcccaagtatatgggattacaggggtgtaccaccacgcccggccgagttggggatatgtgagtaaagacctgaagaaatgcacgaggacaaactatgtggatatacagggaagagcattccaggcaaagtgaacagcaaatgccatacccaagaagcagcaacacacctggtttggctcaagaagcggaatcgaacaaagtgaagacaataagaaattagattagaaaggtcaggggtgggagaggagagaaagccattgtgatgcctttggctgtttgattgagtggatgggaagcagttaggaggatttcagcagagcagtgacatggtgtgacttacattttaacagtatcctctcgatgacattttgaggatacactaaagaggaacacgagcagaatcaggggcttcatgggaggctgcagtgatcatctaggcaagagatcagagcagttggggccatagtgtgagtcggtgcagaggttaaagtagcagtgggtgagcggactctcataacaccttcttttaaaaatcatatatttcccaaagaggaaaaaaatgttaggcgtcataacaggtttttcctgaaagtcataatataatcaatccaattataattctgttcctaaattaagactacctctaagaaaatcaatgtaaaaatgtttaccgtgacctattgcaacttcgcgtccaatttagtgtgaaatatgcaattttttgtaagtaatggagaagtaatgaattgtttttcttctcagttatatgatggggatagtgaaaatgcgaacttggctggaacgttttgtggttccacagtacctgctccttttatctcttctggtaacttccttacggttcaattcatcagtgacttaacattagagagggaaggatttaatgctacatacaccatcatggacagtgagtaaatagaagcatttttatatgttatgaaatacacatgtatttatgcactgaaaagaatgccctgcttattatatcgaaatttcaatgttaattactaaactcaatgtcaattactatctaaactcaatgtcaattgctaaacaccatgttaattactgtatgtttaatctgtggtacaaatttgatacaatctttagtcaaggatataaaccctgaattcttaatagagtaatgaaaatatagctcctccggggtgggaggcagggaagacagaattgcaaagattgcctgagatgagacatgaataaaatgtctcctgtgttgctttttcctccctctccagtgccttgtggtggaacatacaatgcaacttggaccccacaaaatatttcatcacccaattcatcagacccagatgtcccattttccatctgtacttgggtcattgattcccctccgcatcagcaggtcaagataactgtgtgggcattacagctgacctcgcaagactgcacgcagaattacttacagcttcaggactcaccgcaggtaacaattataagatgaatggcagtcacatctagtgaccttttcaccagtatttgcaaaacacttgaagtaatgaagccatgatgaaataattttcttttttttaattatactttaagttttagggtacatgcgcacaatgtgcaagtttgttacatatgtatacatgtgccatgttggtgtgctgcacccattaactcgtcatttaacattaggtatatctcctaatgctatccctcccccctcccctcttcccccaccccacaacaggccccggtgtgtgatgttccccttcctgtgtccatgtgttccgattgttcaattcccacctatgagtgagaatatgcggtgtttggttttttgtccttgcgatagtttgctgagaatgatggtttctagcttcatccatgtccctacaaaggacatgacctcatcattttttatggctgcatagtattccatggtgtgtatgtgccacattttcttaatccggtctatcattgttggacatttgggatggttccaagtctttgctattgtgaatagtgccgcaataaacatacgtgtgcatgtgtctttatagcagcatgatttataatcctttgggtatatacccagtaatgggatggctggatcaaatggtatttctagttctagatccctaaggaatcaccacactgacttccacaatggttgaactagtttacagttccaccaacagtgtcaaagcgttcctatttctccacatcctctccagcacctgttgtttcctgactttttaacaatcaccattctaactggtgtgagatggtatctcattgtggttttgatttgcatttctctgatggctagtgatgatgagcattttttcatgtgtcttttggctgcataaatgtcttcttttgagaagtgtctgttcatatccttcgcccactttttgatggagtggtttgtttcatgatgaaataattttctaagttacttccagcttaatgtgtttttcatccatacacaaagccctccaatcaggtgtgtcgagaaacttgaacttggtcctgcaggtccagagctctcaaagcttcatgtgcctaagaatgcattaagatgcatcttaaaagtgcatcctccctggcccaccctcagagaccgaatcccccatataacacccatttatctgaatttttgacaaacacctctggtgttttggtgccagtaccagaactccatggaccatgcttggagaaatacctctagttagtgggatttatgtataggttgaattgaaagggtcagtacagaacacaagagaatcagtgaagaggctgtttggcactagtctgataggtttatattcatggtaatataagagagataaaaagaaaagggctgggtgtggtggctcatgcttataatcccagcactttgggaggccaaggctggtggattacctgaggtcaggagttcaagatcagcctggccagtgtggtgaaaccctgcctctactgaaaatacaaaaaattagctgggtgcagtggtgtgcgcttgtaatcccagctactcaggaggctgaggtaggagaatcgcttgaacctgggaagcagaggttgcagtgagccaagatcgcgccactgcactccagcctgggtgacagagtgagacttcgtctcaacaacaacaacaacaaaatccattttgagctttaaaaaaggctgagtctgaatttcctctggaataagatgttgaggagacagttggacacaaagtgggttgttgaccaaaggcccaaagatttttgtgcatcatcattatcatgataggtaattgaaaaatgagaagaatgagattatctggggaaaatatgcaaagggattggccacgaactgaggatggataccaggagaacatctgagaatacctggattgtctttctgcagtttggggagcaactaaccctccccagttcattccagtaaaatgtcatggtcaaagccccatatgctggactagtagagtatctgttgtcttctgagttttcagggtccccttcattataaatctggggtcccctgcttctcatgtggtcttgctggggaaagaaaagtccaggttgtgtgactccagagtggagaggcgtgagatgtgctggcagctgaatagaccctggacttgctgagtttggtgcaaagcatatatgctgagatgagctcccaaggtggacaagatgctagattatcgtcattccattggtaatggttttcaggacaaaatctctattacccattggtaccctagaggacttacagccaagtggaacaggccctttgggtgaaagctctctcaattttccctggcttcacgaagctaagacaatggggatcagggtggaccactcagcggggcacagaatggcactttcagggcacgagacaccgtctgaaacataacagcagctggagcagcctcgagtaagacccagtgtttgtcatgactgaataatgttttccactgaatgaatacaggaaacaatcaagggtttcggactgggtaggtagggaggaaagacaaacattgacggatgagctgggagaaactgggattctcggggtatccaagagtagacagagcagccctaattggcagatcatgaaggaatgatgtgtagggtggttacggaggatgttcagtggttagctggcactggagatgaacagagatgcagagatagaaggccctaaggttaagaaatatgaagttgagggtgtttaatggcttgtctataaaaacacagaaacctctaaagggttcagaaaggaaatcaggggcaggagatgactatgagctgagacacctcaagtctttcataaatgaagggaagtaactgggagaaaagtaaatgagagtgacgataatggtaagaatatctttggccagatgtagagaccgtcgaaggagaaccagctttgagacgaggatggaagctgcagtgaggaatgtggagcctccctcccttcccccgaggctggccccccacccttcccactcaatgaactgtggagcatgggtaaagaacagcctctaccaggaggctgctggagaaccaggttttgctaaggccacaaagtggaaaggtgggggatgtataccgagaatgactgacagtgcagttaaagttcacaggatacagcaaagttagacaaggaccaagagcaggagacagtggggaagaggggtggaagccccgagcagttacaggagttttgcaagcagagacgggtggggtgtttcagtaggttcctaagaactgcagatattagagacattcctgtgacagggaggctgcaaataccctgactttggtacaacttgtttttacccaagaactgatgggcattcgactgcatttactccaggcttttgagaggtgatgagggctgccctagtgttacaaaggggaaccggtacctcatgacaggccccggctggcttgggggatgtacagtggaaccaaaggctctgattagatttgctaaggggtagcaagggctggatcagggtgatggtggttgttagtcccatggagctcaggacaatggcaaaagccccaggaggagagatccagtgagctctcaaacagcctagatcctcagagcaatggcacaggcctcagctaggaagttgcataaaaggcgagggatcttattttcagcagggaaatgtctgtggtttcagcagaagctttgcctcccttcctcctgcccctctgggaaggtgcaacttgcatcaattccaaggccaacgtgagtcttcttgcagagcacttccaacagcagagctggtttccatggctaaatatttacaccatgcttttatatgcagtctaatttctgttatggcctgttctcttctaagactaaatctaacatgatttggctcccatttcatttcagggtcacggaaattcaagatttcagttctgtggcagaaatgcttcggctgtgccagtgttttattcttctatgagtactgcaatggtcattttcaaatctggagttgtaaacagaaactctagaatgagtttcacctatcagattgcaggtgaggccaggaacttcatcttttattcaaaaaagctgccatcattaccattattcgtagaataattacaattatttctagaattgactcctgtgagtaaattaggatttgttaacaaaaaccacatccctctcttaactagaacccagcccaatttagcaaattactacagttggtttctaaagagataaagagaatataatactatccaggatggttagaatgctagcattttcttcaaagtatatgtagttgattttaaaaatatgccaattatcttattaattatacacttaaccacattgaatatacatttttatttacaagaaatatatatgtttatttacaaaagctttatcaaaatataattctcatatcatacaatttacccatttaaagtttatatttcagaggtttttagtattttcacaaaattgaaaatcttagaaaattattttgtaaaaatcaaaaagccttgaaagagttacctgattattataagaagtttattttcacagaacactttatttagtacttattttgaattgactcaaatgaaagcttcctttggttaaaacaaacgaaagtacttttggtatttttttaccaaaaaaaaaaaaaaggtaaataacgatttgccacaaataactcaacaatggatttaaaatccttgtgcaaaactctgtcttggaggtagcatccttgtcgaaaagagagtctgaatgctacttccacctcaacgtgatcagaaaagttcaaaggatgctcgagtattcgtctttaaaggagaagcctcctgtgtcatgcttcctgtaggcgtgtttgtgtgaacgagctgttgcattgcacctgtgtgtgctgcttgagcaattcacttcactgctcagggtctcaattatctcaaaggtaaacgaagaagctggattacttttttctaaagtttatcaaatgcaatgatctttttgaatgattcctgtgaagttgaaagagcactaaatattggaatgcgtacattaattatgcctatttttcctctaagattgcaacagagactatcacaaggcatttggcaacctgagaagccctggatggccagataactacgacaatgacaaggattgcaccgttactctcacagccccccagaaccacaccatttccctcttttttcattcacttggcatcgagaactcagttgaatgcagaaacgatttcttggaggtgatatgcatttgaatatcgtttgaatgaattatttaaaagatggtggatcacttaagattttacaccttttatctagtgctgctaatattatatgattcttatttgtttcattaatttattcattaccctttcattccctaaacatctacagagcaccagtccaaacaccggaaattgggaaccttagggcccgcaggagactcctagtctggcaggaaggacagatggggtatagccaattacagcacaatgtggaaaggactaactgagtccagcatgggttggggttcctaactcagtctgggaactagaaggctcaagagggcaatatgtaagttgagacctaaaaggatcagagggaagtctaaggacaacatgctggttctgtaaaatgaagctcaatgatactaaatagctcacctaattttcctgacagctacagtaagtttggggcatcgtcaacatcctctaaagacaagtgtttccttgaataaatgctccctggtctcaggggggtgtggtctgtcctttcttcaccacaactccagagcttgaatttgggcacagaaatgacttcactgtttgcccatcgtccacacacccaccccccactcccaccccaggacacactgagagagaagcccccttgtgcctggagcaggcagaaccatgcgcctcgtgggcctgaaactttggggtcctccagtgcccccgatgagctccctctgtgctctttctgccccatcgctgcattgggcatatgagatggaacatgaacatcatcgctcataggcaggagatagtctgaataagcctcatgtgatgtggacccagtgtgtggaactcagcccctgtgttttgccagaaaaaccccagagctcacggggtttgagctttgcaagctctgtcgaaaatgcattcatccttaggaaatatacttaggtggaacctaaaaaccaagagcataaagatgctgagttcctctgtgagtggagtttaaatctaaacctcatcctgaccgtctctaaactggctttgtaccacacaagagtcttcagtaaagtttccaaaaagtgtgcttgttcctctacccctgatctggagttgtattttttattttattttttttctcactgcctctttaatcaggtcttcattcaaaataagctgcccaagaggatttgacctttgtagcataaagaaatgtaccggtgtaggcagcgggctcctttcattctgtgggacgattctttctagcgggcctctgctcagctgatagtttcttggtagcttcagcctttgttcccaacaaaacatcttctgcttcttagcaccaagggctttctttctttcttttctttcttcttctttcttttctgccctgcaacccccctcatccgatttggctcctagggctgctggcaccttctgcccagcctggccaggaagggtgttctggcatatggtctttgcatatgggtttagcttcaacatgattcctgatgcggagttttatcatcctggaaagctctcccctttggaattcatctaaatcctttattaatcaataaccttaacatatagtgccataaataacactcggaggaagctcatgccttttctaaaggaatactcgccacgacaggagaccgaaagatgtatatagcagggaggaaatgaagaggcaaatacagttattctttgtgccggtcaggttattcaacttggacctgtgtacctcccccaccatggagatccaaatatttatatgaagtgtaaagcagaaagaatgaggagagtgggatctggaggaaagatggaataatcccgttaggttggagtcacagtgcaactaactcttaactcactccagcttgaatggaccattattgatcagagtcaacgtttgccatttgcctgatagatgctgggaagcaaagccttgctttccagccgtggagagtgagaattcctcctcctagctgtccttcattactccacagaatggatctgaaacttcctgtcccataagcaaagaaaggaaaccaccgcttaggcctgtaaaatgtagctccatctggctctcagtgggaaggctgtgggcatagtttcttggcagctgtaccaggaagcctcagcattccgttcttgtgaactgcggtgggaacggaaatgtctgactgagaattctgactgtgttactaccaagcgagggccgagctctagaccatgcttggaatctgttttcatgccttcacctcccctttcaagatcctctgatgtcccagagatgcccactgctctaggtggccccattcttcctaggagaggaaagtgaataagacaagttgtcagcagtgtcagtggaaattagtatcctgctgctcctctcagagcaacggcattttgaaagaggaccctgagggaaaaacgcccaaactcaaaagcgtggtgctggctatggcagccctcccatctactagtggatgactggctactctgtcatggcaaggttactttgtttaaacacttagcagaataatccccaaagcactagaaaggcattattctctcccatgggctactacatcgacctaaaaggaatctcacctgatcaacacagcccagcaagatgtcttaactttgtgacttaagataccagcaattaaccaaagtttaaaccatggaattatatagggaacagaggaacttccaatattttgaatacatagatcagtaaaatcagcatttccgcatgtcaggctggttccaacatacattgcccgcgtaacgtttccgtaagaagcgtcgagagccctcctggaagcagggctggttgtgaatgcagggtagcagccaggctgggggacagaaagtggttcagttcacagtgtagttctctctccccataaaacacaggctcatctcctgtttttatatgtgtctactcaaaaatgagttgaaacaaaaaagcaacaaggcctcggaatgtgtttgtaaaacacatttaacaacagacattgtatagatttataattctgtcctttgcccatacagaaattcctttcgttctgaactttattatactttgcattgtattttttcatagcctctttacagccaagtaattttcaatgggaaacacgtgcacacacacacatacacaaacacacacacaatgagaaaggtgtaatagttgactggaagcagagcaggcaacattgcccccgcccatctccaccttttaaaaattcactttacctacattctccagaatgtttccccaaaagcaaaggctgcaggatcacagcacaaactacggtataaaaaagctgcctggtgttttaattgctgtaggttaacaggtatttctgaatccaaatgcaaatgttttttgatctacacgtggaacatttttcccctttgcaagtgaaggtgacttctgcatgtattttcagaaaacgcttcattcttaactgtataaaaagacaaagcttttccgaccaatgtcatcattcaaattgtctccattttaatgtatataccttagagaagaaagtgtaagtttaataatgaatgactccttcctaaaggtgagaaatggaagtaacagcaattcaccattactgggcaagtactgtggaactctgctgccaaaccctgtcttctctcaaaataatgaactatacctacgatttaagagtgatagtgtaacttctgatcgtggatatgaaatcatctggacttcatcaccctctggtaagacatttgcactttgtacaggaaagcactgtgagaaaaacatgaggtgtctaatagtaaaaggcaaagtaactttatatttttagctacctgtgtacctgattagtttatgttaagaatagagattttaacattgaaagtacagattacttttttttttttgaaatggaatctcgctgtgtcatccagcctggagtgtagtggcgtgatcttagctcactgcaacctccacctcccaggttcaagtgattctcctacctcagcttcccaagtagctgagattacaggcatgcgccaccatgcccagccgatttttgtatttttagtagacagagcgtttccccatattggccaggctggtctcaaactcctgaactcaggtgatccaacctcccaaagtgctgggattacaggcatgagccaccgcgcccggccagattactttaaattttacatttattcattatttctgtttataaaagaatatatattcatatatgaaacatatataaggtaaggtaggaagattcaaaaattccttggtaaattaaattttgttagactttttgacttttggcttgaccatcaaggaagttctttgagaatttaaagaaaaatttttaccaaaaatccaacttatgaacacattctggcatatatatgagtagttgtgcttctcgcaggccctgacatttcttggcggttctggagagaaattgctttttttagggtagtaagtatcttctcacatttttggctggctgtttatcaaacaactaaagaaaatttaagtcatgtcaatacatttaattcaagagaggaggaatacctttataaaatatcccaaaataccaaaataccttcaaaataagaaagataaacagaactcactttaaatatcttaagaaaagcgttctataaagataatcgtgggtaatggaatcttggcacccaaaggaagcttaaaggtgacctccaatgctcaaattttatcaacgagcaaataaaacaccaagattaagctaggtgctgtggctcacacctataatccctgggagaccaaggtgggtggatcacctgaggtcaggagttccagaccagtgtggcccacagggtgaaaccccatctccactaaaaatacaaaaattaactgggtgtagtggcacatgcctgtaatcccagctactcgggaggctgagactggagaatcacttgaacttgggagatggaggctgtagtgagccgagatcacgccactgcactccagcctgggtgacggagcaagactccgtctcaaaaaaaaaaacaaaacaaaaaaaacccaccatgaacccgggaggtggagcttgcagtgagccaagatcgtgccactgcactccagcctgggcgacagagcaagactccatctcaaaaaaaaaaccaaccaaacaaaaaaacccaccaagattaatgagttgcccaaaatgctccactagactgaggtgaaggtgagattagacctcagtggtcagaggcccagccacgtgctctgtaactatgccagccagcttcttcctgtcccagagatgacctggatctccacagatatatagtctaaatcatgacagccttcatatacagattaacaaattgaacaaattaacaccaaaacttgaagtatttgaccttaagtatgtcagttattagcctggtaaagtcacttttataatgaagtcattcctgccgtcacctacaataacgcactccctcttggtttagtgctgaattttacttctaattttacttcactcacatcactggcgtcaactctgggcatgcaaagatctctacaccatcgaaagcacacagacaacaacttgattttctcccacagttactttatcaagtttgttttttttttttttttccattctgctctcaacccccaattttcaaagtacagtcctggaggaagttatccctgggttgtgatatgcaggcaaaggcacgtgtgtggaggatggaagaggtggaggtggcagtgggaagagaggggaagagaggagaaagggtgtagcccaaagaagaggaaaaggaaaagggatttctgcctccattattcttgcagagtctcagcaccttaagaaaataaagtcttattgcctaacaagccagactggacggcttatatgctgttgaatcaaacttcctgtcctgttttccttgcaggatgtggtggaactctttatggagacagaggctcattcaccagccccggctatccaggcacatacccaaacaacacgtactgcgagtgggtccttgttgctcctgctggaaggcttgtcaccatcaacttctacttcatcagcattgacgatccaggagactgtgtccagaactatctcacactctatgatgggcccaacgccagctctccatcctctggaccatactgcggaggcgtgagtaaaacaaacattttatattcccatttgttatttttagacaataatgagtcacttagtgtagactttttttttttttaagatggaatctcgctcttgtcacccaggctggagtgcagtggtgcgcgcaatctcaactcactgcaacctccgcctcctgggttcaagcaattctcctgcctcagcctcctgagtagctgggattacaggtgcctgccaccacactcagctaatttttgtacttttagtagaaacagggttttgccatgttgaccaggctggtctcgaactcctgacctcaggtgatccacccgcttgggcctccgaaagtgttgggattacacgcgtgagccactgggcccggcctagtgtagactttcaaaggcagacacactgcagaggaagaagcacagcctttaacaaattgagcagttttccaacttgcctttctattatgggagcatgagtgccatctggtgggcattgcattaaattactattaagagttacaaaaatcagccctgcgtcagaatcacctgtggagttacttacattagacttccagttcccaccgaaacccactgaatcgggatttcccagggaggagtcacagcacgctgtttttttaaaaaaaagctccctctgtgacgtcagtgcactgcctagggttgaatacccatgtttatttctgcataaatagaactgtagaaaatttggacacgtggctctattttatctacttcttgctgaaaattgcagaaattatttgaagaaatggtgaccgatagtttgtttttgtaaagctctgatatcttccctaaaaaaatcagaatctgacgttgattcaatattgcaggcatctgtgcttacgatcctctcatttgatgtgcaagtagatacttaaagagagtaagggctcacacctgcaatcccaacactttgggaggcccaggcaggtggatcacttgagctcagaagtttgagactagactggccaacatggggaaaccccgtctctactaaaaatacaaaaattagctggtatagtggcacacgcctgtaatcccaagtactccggaggctgagggaaaataattgcttgagccagggaggcggaggttgcagtgagccgagatggcgccactccactccagcctgggcgacagagccagactccatctcaaaataacaagagagtaagtaagggaaaattggctgttggcaagcgggtatctgtttctgatttttctgccctttaatcacttagactttgtaatcaaactagacagagaactgtatcagctggaaatctagatggtttttaaaatataacttactatttataaaattgataaatgctgttttcagaagtatcagaaaataggctaatttttctaaaaccctgggcattctcatatattcttaacacctttctttgaatatatttgcatatattttacatgcatattttttactgtttgatggtgtgttttttctacttaccaatatatcattagtaacatatcaataaaaacactgttgcatcatatttaagttttggagagtattccgttgcacgagtgtggcctaatttatttaatgaagcccctctaagtggacatttaggtctcttgaactttttgcaactacagacaacacttaataaactttttggtagtgatatctttatacatatagttacattacttggtgagaaatggtaatcacaggaccagcagacactgtatcacggggatgcacagaaggcccacagagagagagaccccagtaaatgtgccacacatcagatttagaagctaatcagctcttagacattgaattgaaatttacaaacatttcaaaagggaggaaaagaggcaattttaacaataccatgactttatattggtaggggtttttttgtgggcatggttttcagtggcttgcaaacatacaaccccatttgatccccacagtgacactcccataaggtggaaagaacaagtatatcctggacttgtataaaccgagttcaggtttatactgaacaagtataaaccgagtcactgagagaagtgacggccatttaatccaatgccacgttaagttgaagtatatagcgagataacatcaatttttttaactgttggtgtttacggtattttcccagttttacatttttttataaatgtggatataatttcatgtgtaattgttttttttcttaaaggtaccactgatttctttaacactttatcaatgttaaacataaatgaaaaaatgtaaaacataagtataaaacatgaagtacagaggtagctcttgttttgctaatatttacatacaactttttgtaagttgtaatattttactaatatttacatacatactttcacatgttacatacatacatatttacatgcataattacatacatatgaaagttgtatacttttgtatgtatactccttaagtatacaattcaactttttatgtatgtaaatatgtttgttaaacttgtaatatttatatacatacagtatttaaatacatacagtgtacatacagaggtagctccttattttgctaatataaacacaaaccctgatttggagatattttatattacggtaaataccattgttcacagggaaatcctatatcccttgcagctgcagaaaatgaagatctagcaaatgagagaataacgggacaaacaaggagaatcaaaggagattctaaaacttctgttgaccgtctgttgacatactagtttgtcaaaataaaagaagttattgaaatttggaagcagattaaaatgggagtaaaaagtagatgtgtataggaataaaaatattgtatattccttgatgtatctcttacagaaaaaaaaatctacactcacttgagtaagtgagtatcttggaaataagcctgtgttttgatgacttggggtagggctgaggcaggagaagccagtcatgtaagcatcatgagagcagggctttttgcctgttttgctcattttttaatgtcttaatacctgcagcgtggcagtgccttgatcaatatttgccaaatgaatgaatagaaagtgagagacaacggggacccatgtatccccccaacacacacacacacacacacacacacacacacacacacacacacactgttccacagaagtatatgaaaataaatctcaagaggaaaaactataaacactgaggatgaaaatactatattttacttaataggatcattttaattatatatgtttgtttcagaaaaattaaatttgcagtaagaacttgaataagaagttcaagttttttgataacagttttattgagatacaatttcaataccatccaattcatctccttaaagtatacaattcagtggtttttcgtaggttcacagagctgtgcggccattatcagcacagccaattttgggacactttcattaccccccaaagaaacccagtacccatttgcagtccttccccattttccctcaactccccacgcccagaaatattcctttgtaaagcatttgcattcattctttgcaaggttacttcaagaaatatatgcaggttcaccataaattctataaagtttctttatgtggtactttgttactaggctaacattcctagaaaaacgttcaaatatgtgaaatatataattggatactttttttttcaattttaggacaccagcatagctcccttcgtggcttcctcaaatcaggtcttcataaaatttcatgctgattatgcacggcgtccatccgcattccgattaacttgggacagctaagtgggtaacaactcgtgttcactcagcactttccctctgcagcacgctggacagcactctgccatcctgatacatgacccctgctgatgccacagagaataagctgaacttgtatggtttttcaccaaaccatggatagaatcaatatttgtaggccaggcgtggtggctcacccccctgtattctcagcactttgggaggccgaggcaggttgatcacctgaggtcaggagtttgagactagcctggccagcatggtgaaacctcatctctctaacaatataataattagccaggcgtggtggtgggtgcctgtaattccagccactcgagaggctgaggcaggagaattgcttgaacccaggaggcagaggttgcagtgagctaagatcacaccactacactccagcctgggcgagacggcaagactccatctcaaaaaaaaaagaaacaaaaaaaaccagaatcaatatttgtacattttctcgaacatagaatatagcttctttagtcttgagtgtgcatttcattctaatattttgagctgaaatttaaaaaaactttgaaagagttggaaatgattatggcatatgtgacatacatttttaaaagttaataataatagccaggggcagtggctcatacccataatcccagcacgctgggaggccatgatgggaggattgcttgaacctaggagtttgagaccagcctgggcaacaaagtgagacctgatttttacaaaaaatcaaaaaattagccaggcatggtggcatgcacccgtggttccagctacacaggaggttgaagcaggaggatcacttgagcccagtaggttaaggctgcagtgaaaccctgtgaattaaccactgtactccagcctgggtgacagactgagaccctatctcaaaaatgacaacaagaacaacaaaagttaatgataatatagaagcataaatttcctgtgaatgttcaattacacataataaacattattgaattgtacacaa

SEQ ID NO: 346 - DNA, 14203 bp, Homo sapiens
  source 1..14203: mol_type = genomic DNA; note = NC_000011.10:c65059020-65044818 NAALADL1 [organism=Homo sapiens] [GeneID=10004] [chromosome=11]
aaagaaaacaggtgtagagaagctgagtggattgcccaaggtcacacagcttacgtccagcaagaagggggatctcaactcaaaatctgctcaggcaggtagggctgggtatgctgtagatcggctgccttggagggaggcagaggcagtgagggtgggcagtgggcacggccctgctgtgaacacaggagctctgagttccagccctggcttggcctctgttttcctgggacaccctggatgagccccttccctctcggcttcagtgtccctgggtgaccttgctgcccttggagagccattccaggcaaatggtgcaggatgtggtggatgtggatggctcctggctctcactgcgggatgttccctcactctccctgccagctgggggtcaaagggcagtgccacccatggggtaatgtttaaccaggcacaacaccccctctatagggaataacctatagaccagtcctaccccagctggccaagagtccgcaggatgcagtggacgaaggtgttggggctggggctgggggctgctgccctcttggggctggggatcatcctcggccactttgccatccccaaaaaagccaactcactggccccccaggacctggacctggagatcctggagaccgtcatggggcagctggatgcccacaggatccgggagaacctcaggtgagaagtggggccatctgctcctccgtttgccagaggccccctccctgatgctggccctgcccctccctctgcccaccctgcagagaactctccagggagccacacctggcctccagccctcgggatgaggacctggtgcagctgctgctgcagcgctggaaggacccagagtcaggcctggactcggccgaggcctccacgtacgaagtgctgctgtccttccctagccaggagcagcccaacgtcgtggacatcggtgaggtcctgcccagtcttgggaatgcccgggggtggggagctgctgggcccagccatgatactgccacccctccaacagtgggccccactgggggcatcatccactcctgccaccggactgaggagaacgtgaccggggagcaaggggggccagatgtggtacaaccctatgctgcctatgctccttctggaaccccacaggtgggcccagaaccccccctactgctctggcccagctcccttggttccacccagggttctccccaccctgacccagggaacgtgcctcaactggggcacagcgcgccctccggaatttactcaccgggacactccatcgctgctcctttcctccatcagtcattcaacaaacactagtggctctgctcaaggccaggtctgttacagggcacccagacatggaggaaatgaggggtgactgttcttggggagcttacaagctctgggtgaggtgggggaacagaatctaaattctccctcctgccatgcaaacttccaccccccttccccacccacacttcgctgggcccagctctaaggatcaccccctcttgggactagggcctcctcgtctatgccaaccggggcgcggaagaagactttaaggagctacagactcagggcatcaaacttgaaggcaccattgccctgactcgatatgggggtgtagggcgtggggccaaggtgagtggcagtcccccagtgcaggaggcctcggtgaggaaggggctgggcagtggactggaggaagtgaggggaaggggaaggagaagaggcagtgttgagtggggaaccaagccccagggtggggcaggaaaggcaaggtgttttcgggttgtcccaccaatgggctgtgtggcctcggatgcctccctgaccctctctgagctgtaggaaataaaggggttgagtacaattttcaggtttggtattccagaagtctaagtcctcctgtgaaatagttttgaatattcaacttaagtccctcctgttggccctctccctgccatttcttttccatcaaaaattctgactaggggccgggcgctgtggctcacgcctataatcccagcactttgggaggccgaagtgggcagatcacctgaggtcaggagatcaaggccagcctggccaacatggtgaaactccatctctactcaaaatacaaaattagccacacatggtggtgcatgcctgtaatcccagctactggggaggctcaggcagatgaactgcttgaacctgggaggcagagatggtagtgagctgagattgcaccactgcactctccagcctgggagacatcgagactctgatttaaaaaaaaaaaaaaaaaaaaaaaggctgggcatgggcgtggtggctcacgcttgtaatcctagcactttgcggggccaaggcaggcggattgcctgagttcaggagttcaagaccagcctgggcaacacggtgaaaccccatctctactaaaatacaaaaaaacaaaaattagctgggtgtggcagcgtgcacctgtagtcctagctactcaggaggctgaggcaggagaattgcttgaacccaggaggtggaggttgcagtgagccaagattgtgccactgcactccagcctgggtgacagagcgagactccatctctaaaaacaaaaaacaaacaaacaaacaaaattaatataaaaagagtagaatgagagaggggaagggatagttggtatttaatggggaccgagtttcggatttgtcagatgaagagttctagagatgaatggtggtgatgttgcacaatatggatgtactgaatgccactgaactgcatactccacatgctaagtttatgttatgtgtattttaccacaatttttttaaaagtgggctggacgcggtggctcatgcctgtaatcccagcactttcggaggccaaggcaggtggattacctgaggtcaggagttcgagaccagcctggccaacatggtgaaaccctgtctctactaaaaatacaaaaaatagccgctcatggtggcaggcacctgtaatcccagctactcagaggttgaggcagcagaatcacttgaacccaggaggcagaggttgcagtgagccgagatcatgccattgcactccagcctgggggacaagagcaagacctcatctcaaaaaaaaaaaaaaaaaggtgtccataataagagctgggaaaagagaaagaaagaaggaaggtggagagaaaggaaggaagaaaagaaagggaaaaaaggaaaagaaaaagaaaggggaacaagcagtgtagaaatacacagattattaattaaccatcaccactacccatttccagaaccttttcatcatttcaaacagaaactttatttaacaataactccccaggtccctgccccagcccctattctattttctgtaacctcaattctactttctgtctctatgaatttgcctattctaggtacctcgcataagtgaaagtataagatatttgtctttttatgtctggcttatttcacttaacataacatcttcaaggctcattgatgtatcagaactttctttctttttaggctgaataatattccattgttttttgtttgtttgtttgttggggtttttttgagacagagtcttgctctgtcacctaggctggagtgcagtggcatgatctcagctcactgcaacctccacctcccaggttcaggcgattctcgtgcctcagcctcccaaatagctgggactacaggtgtgtaccaccacacctggctaatttctgtatttttagtagagacaaggtttcaccatgttggccaggctggtcttgacctcaggtgatctacctgctggtcttgacctcaggtgatcccacctcaggtgatctgcctgcctcagcctcccaaagtgttgggattacaggcgtgagccaccccacccggcctccattgtatgttacagcccacatttggtttagccattcatctgttgatggacacttgggctatttcctccttttggccgttgaggataatgctgctgtggacatgagtacacaactgtgttattttatgcagcttcatggtattccactgtaggatgtccctgttattcaaccagactccactgataggcacgggcttggctgtgccgaactggcctttactgttgcaagaggcactgccataaatgacttgtgcaaacgtcatcttgcccatggaagattggtctatcctggcttccacagtcgaggaaggaggaagaggaataggacatatctggtcccggtccctcccttacacacagcctcctctgcccactgcaggctgtgaacgctgccaagcacggggtagctggggtgctggtgtacacagaccctgccgacatcaacgatgggctgagctcacccgacgaaacctttcccaactcctggtacctgcccccctcaggagtggagcgaggctcctactacgagtattttggggaccctctgactccctaccttccagccgtcccctcttccttccgcgtggaccttgccaatgtctccggatttcccccaattcctacacagcccattggcttccaggatgcaagagacctgctctggtgagtttgtgccctggggtgtcctgcccagccccagtggcctccagacttcaagccccacactcacatttaccctgaagggcctcttcctcctccccagtaacctcaacggaactttggccccagccacctggcagggagcactgggctgccactacaggttgggtcccggcttccggcctgacggagacttcccagcagacaggtgagatgcagccagaccaggtctccctcagttgccctctcccccaactcgcctctccccttcccttgtgatgatgttccctctttccacttcaaagcctgacctttttccctttcctctctctcccagaccctctcctgaccccaaaatatgtcttgtttttggggaagcccgtgaaacagctgctgctgtttcctgtggggattcccctgcccctcccacctcatcttgacgtctgtaactcacgactccctctcttgaagatgccaagctccttcccaaatcagggcccctgccactcccaacctgcaccaacctccctccctacagcacccactggcctccaggtgccctctcctcccaggccccttcacccagctgttcctgtcctcctggtctgtctcactcaggagagggaggccccacgagaaccaggtccacatctgtcaccgtcattgcccagagactagtcagggactaagtacccaataagtacctacccagcgagtaggcaggagagcctggctccagccttgctgcctctcttggtacttcggggccaatgaatggccttgccacgtcactttccagctccgggcctcagtgtctcctgcactgggtcgggggcagtgggcaaggccaagagtcttctcacacccttcaccctccccagccaggtgaatgtgagcgtctacaaccgcctggagctgaggaactcttccaacgtcctgggcatcatccgtggggctgtggagcctggtgagccctcctcttgctgcctgcaccccaggcccctgctctgctctggatgccgctgtcctcatccagccctgcccttgccaccacccagcccagctccccctgcccacctctccctctcctctggttctctgccccttttcctctggccagatcgctacgtgctgtatgggaaccaccgagacagctgggtgcacggggctgtggaccccagcagtggcaccgccgtcctcctggagctctcccgtgtcctggggaccctgctgaagaagggtgaggcggccccctcccctggaccagggaccttcgcccccggaggtccccttcctgttccacctcctctccctcacactgcagtgctccttgtgccatgcctgagggccctgggggcagacatgcatgacaccagccttggcctgcagcagcccagtgtggtacagggaatagactgtgggttgattcatgtgccgcttccaagtgcctcccgtgtgcctggatggagcaaggcccgatgctgctgtgaagcaggcagcgcccaggctctgccctccgggaactttagctcagctgggtcagggacggcagccgattgttaactctgatgtctctaatgtcttgtgtgcctttgacatggcaggccaggttgggacaagtctctcagtggaggcagcacttcagcgtttcagtgcttcagggaaggagaggagggcaaggaggtggcagccagaaaggaggtggacagggctgggcgaggtggcagagcaggcagggccaggccaggctgaggagtttggagttcagtccaagggttgtgggaagccggtgaaggatttcacgcaggagagggacatgatagagtcctcatgttaaacggctcctggccaggcacagtggctcacgcctgtaatcccagcactctgggaggccgaggcaggcagatcacgaggtcaggagttcgagaccagcctggccaacatggtgaaaccccgtctctactaaaaatacaaaaattagcagggcatggtggtgtgcacctgtagtccctgctacttgggaggctgaggcaggagaatcatttgaacctgggaggcagaggttgcagtgagctgagatcgcgccactgcactccagccgggagaatggagcaagaccccgtctaaaaaaaaaaagcggggagcaggggaagggcactccacataggggggccaggcagacgcttgtcattccagggctggagatgctgtggggcttggaccaggatggagggcagtggggcagggacaggctgctgggcccgggtctgctggctccaggggcaagagggaggacaagtcgagggctgtggtctaagcgactcgacattagtgccatttaagaaaaataactgggtggatctaggacagatctagaaggaagatgtgaatctgggtcttcccatattaatttcttgttttagttttagttatttatttttatagagatggggtctcgctgtgttgcctaagctggtcttgaactccaggactcaagtgatccacaggcattgagtttccacgccaggccctctttcgttagttttaaaaattcatggtaaaatatacataacaaaattgaccagttttacgtttgtaagtatttgattcagtggcattaagtacatttctaaagttgtgcaaccatcactgccattggctccagaacttcttcatcttcccttacatataatatcccagagtgctaagcatggcatttgaaccgatacccactcaactgtaattgcacacaaacacgccactgctgtcaaactccatccccccccttgtatgatatgatgtcgcagttcagaaatgagacctgaagtctggccacagtggttcatgcctgttatccctgcactttcgaaggctgaggtgggcggattgcttgagcccaggagttcgagaccaaccttgtgagaccttgtctttacaaaaaataaacataaaaaaatagccaggcgtggtgacatgtgcctgtggttccagctacttcggaggctgtgtgggaggaacacttgagcctgggaggttgaggctgcagtaagccgtgatcacactactgcactccagcctgggcaacagaaaaggaccctgtctcaaaaaaaaaaaaaaaaaaaaaaaaaaaaaaaaaaaaaaagaaagaaagaaaggagagagagacttgagagatgacttggggagttggtagcaaaacagtctgtgaaaccacaggtgttgctgagatcagctcagaagccaggggtggagggagtggacaagcttgtggagagaggctgggctttcgactttacccttatgggtagcgcagaaattcccatatttttttgtttgtcaaagtgttgtatgttgaaataatttcagacttacagagatgtaaaaatagtacaaagaagcctcttatacagacactcctaatattaatgtttcatcacgtttgctttctatctctgtataatatatgggccaggcacggtgactcatgccaataatcccagcacgttgggaggcagaggcaggaggatcgcttgagcccaagagtttaagaccagcctggggaacataccgagacccctgtctctacaaaaaataggggaaaaaagccttggctatttataatataactatatatgtttttgtctgaagtattattattattattattttgagacacagtcttgctctgtgacccaggctggagtgcagtggcgcaatctggctcactgcaacctctgccctccaggttcaagccattctcctgcctcagcctcctgagtagctgggattacaggcatgcgccaccacgcctggctaatttttgtattttcagtagagatggggttttaccgtgttggccaggctggtgtcgaactcctgacctcaggtgatccacccgctctggccttccaaagtgctgggattacaggtgtgagccaatgtgcccagccaattttccacaacttttttttttaattatttagacagagtctcgctctgtcgcccaggttggagtgcagtggcgccatctcggctcactgcaagctctgcctcctaggtctgcaccattcttctgcctcaccctcccgagtagctgggactacaggcacccgccaccacgcctggctaattttttgtatttttagtagagatggggtttcaccttgttagccaggatggtctcaatctcctgacctcgtgatccgcccacctcagcctcccaaagtgctgggattacaggcgtgagtcaccgcgccagcccccacaacttttaaatgcttccagctgggtgtcgtggctcatgcctgtaatcccagcactttggaaggccggggtgggtggatcacctgaggtcaggagttcaacaccagcctggccaacgtggtaaaaccccatctctactgaaaatacaaaaattagctgggcgtggtggtgggtgcctgtaatcccagctactcgggaggctgaggcaggagaatcgcttgaacctggggggcagaggttgcagtgagctgattgcgccactgcactccagcctggttgatgagagtgagactccatctcaaaaaaaagaaaaaaatattttttgagacagggtctcactctgttgcccagcctggagtgcagtggtgcagtcagctcactgcttgctcgacctcctgggctcaagcgatcctcctgcctcagcttcctgattagctgggactacaggtgtgtgcgccaccaagccctgatacttttttactttttgtagagacaaggtcttgctgtgttactgaggctggtctcgaactcttgggcttaagtgatcctccttgcctcagcctcccaaagtgttgggattacaggcgtgagccactgtgcccagtgatgaccttgatagcaaaataattttttggcccaagctccaatccaggatcacactagtgatctggttactagtttcctttagtctataataattgtttagctgttctttgtctttcatgatcctgctattattatcctattattttgtcaaataaccctcaatttgggtttggctcatttgatttagattatacatttttggcagaaaaaattgtaaaaatgtataattgcaagcgtgtaatcacatcacactgaaaaattcttcatttgctggttgcggtggctcacacctgtaatcccagcactttgggaggctgaagtgggtggatcacttgagctcaggagttcaagactggcctgggcaacatggacaaaccccatctctaccaaaaatacagtaatcagccaggcgcggtggtgtgtgcctgtggtcccagctacttgggaggttgaggtgagaggatcgccggaccccaggaagttgagggtgtggggagccgagatcgcaccactgcactccaacctgggccacagagtgagactcagtccctcaggctggatgcagtggcacgatctcagctcactgcaacctctacctcccaggctcaagcgattctcctgcctgaacccgggaggcagagcatcctgcaacctggcttccacctccagtccctatacccacagtgtggagccaaatatctggatttgaaactggctctgctgcctaccagccgtgtgaccctgggaaagtcatttagcttctctcagcttcttcaactgtgaaatggaaataataatagtatctccctcaaggcattgttgtagggattggttccacgtggataatgccctaacaggaaatgttcctgtgttatcaccaagtgaagatggctatggagtttggcctggaggcgggggttgagggtggagggtcggaagtcttcccagagcatgcccacagagagagaggggcagtaggcattctggtagaagggaccacccgacccttcagggggcttggagttggggtcagtgtttggtgcgggagcctcctggaaggcctggctgcagggtgccaggacatcctgtcaccagctgccccgccttttcccgctctcccctcctcacgtcagcagcctttctcctaaggcaccctaggatcaggaggaccctgtcctccaaccctctatcccccattcccaggcacctggcgtcctcgcagatcaatcgtgtttgcgagctggggggctgaggagtttgggctcattggctccacggaattcacagaagtgagtggccctacagggtaggggatcgaaaggggttcccaggacagaacggcgcggggctgacgtcgcccctcgcacccgcaggagttcttcaacaagctgcaggagcgcacggtggcctacatcaacgtggacatctcggtgtttggtatgtgggtggtggggcaggaaaggggaggagacggcgggacgactgggtgggtaaaagaaggggctggggcccaaatagtctttctcccctcctcccacagccaacgctacccttagggtgcaggggacgccccctgtccagagcgtcgtcttctctgcaaccaaagaggtggaagggggcaggccgggcggggctgaactagctggggcgggccgcgtgcggcggacggggccgctacgggtgggcggggctggggagtggtactctctagatctgctggggctggactgaggctggggcaagcctcgtaaggactggaccacgggtgggcaggagaccggtggagaacccgccctgttgttggggctggggagggccgcgcaccgagactaaattctccttccggccagatccgctcaccaggccctggcgacctgagcatctacgacaactggatccggtacttcaaccgcagcagcccggtgtacggcctggtccccaggtaagcccagggacagaagggggcccggagcgaggcggtccggcccagcgctctttatcccggcccccttccttcccgcagcttgggttctctgggtgctggcagcgactatgcacccttcgttcacttcctgggcatctcctccatggacattgcctatacctatgaccgggtgagcaggcgcccctccgtccctgcctcggtaccttgctgcatgcgccccctcctctctttgtggctgttctcatacagactgaaccctgcacctttactcattgctacctctgccaagtttcttaaaaaaaaacacacacacacacagaaatacacacacacgttttatatagacgaagtcctgctttgttgccaggctggtcttgaactcctgggctcaaaccatcctcccgcctcagcctcctaaagtgctgagattacaggtgtgagccttggtgcccggcctctgccaagtttaaccttttcaagcacctctttatgctcatctatgttattttatcaaatgtaagatactactgattataagatgtgccgttatgttatgcaatattcaggaaaggaaaaaaaaccaccgcttccaaccagttgtaagatggcattgcctgtgagaagcattctgtttccaaagatcttaaaatgtaggggcgggggtgggaggggggaagttaatctcagcatcgattaactcagaccattggcgtgagcgttggcatgaaggtaaaaacaagacaaggggtgcagagtgcccagctggcacctccctgtttgatgctccaaaaagtatgttctccacctcacagccacagcgattcttggtagtagagctgggatttgaatctatctgaccccaaagccccaggttcttctcctttctgtgaaactggaaactggcaccagacccagctcttccactaattagctatgtgatatcagcaggttaacctctctgagcttcagtttccttttctgtgggaattctagaagccacctcacagacatggccaagattcagtggagataatgcccacattttgcagctcactggaggtacaccttctcccacttcccatcccaagcctgtcacctctgggctttgttcccccagagcaagacttcagccaggatctaccccacctaccacacagcctttgacacctttgactatgtggacaagtttttggacccgggtgaggagggagacaaggggcatcctgagaccaggacaggagaggctgaagactgagccctggccttgtcaccttgccgcaggcttcagcagccatcaggctgtggcccggacagcggggagtgtgattctccggctcagtgacagcttcttcctgcccctcaaagtcagtgactacagtgagacactccgcagcttcctgcaggcagcccagcaagatcttggggccctgctggagcagcacagcatcagcctgggtatgcacagccctgaccctgaggtatggggagccctgcacccccatgactgagccactgcttgttcctcacagggcctctggtgactgcagtggagaagtttgaggcagaagctgcagccttgggccaacgcatatcaacactgcagaagggcagccctgagtgagcaagggcagcgggcaggggctgggagggcagcacccagggcaggataccaggctggtagctgggctgctggctccagggtgactggcagttcctgcctccccaccagccccctgcaggtccggatgctcaatgaccagttgatgctcttggaacggacctttctgaaccctagagccttcccagaggaacgctactacaggtgagtctgtcccagagtcctgggaggtgcctccaggtggggccggacaatggctccccacctgagacgaggtggtcagcttctctgccctttagagtgcaacccagcccctgaagaagatgggaatgtaaggctcagggaggggaggaaagttgcttgagggtccctctgggagctaggactggaacccacatttcctcccccgaccgccactgctgtaagagctccctggccttcagagacaagtggacgggggtgcttttctgcctcgctgcgtacaggagctgagccagttctaggcccaggcttctctttcctggcccctgactgactgaccctgatcctgtcccatttctcttgtcagccatgtgctctgggcacctcgcacgggctccgtagtcacattcccgggcctatccaatgcctgctccagggccagggacacagcttctggatctgaagcttgggctgaggtccagagacagctcagcattgtggtgacagccctggagggtgcggcagccaccctgaggcctgtggctgacctctgaccccagccctctttcttcagccctccctttactccaaccctctcctgcctgctttcctgagatgtcctggtcttccttggtgccagaagagggcactaccacaggaccctctcaagcttctcaggcaacagcttgaggtccctgaggggagtggcaagccctaatgcaactcaccctcatcctggtgcttaggtggcagagggtgggcagcaggggacagggatgggatggcaaaaccaccaactgcccttggtggcaggtgggtggagatgggatgcgtgccaacctcagatgccaactcaggtcatcaaggccaaggaccagtggcgaaagtgagtcttggggtaccttaggccttggctagtctgcgttcctctccctgcatgctgtgtatcctaactccctacaacagcccctcaaataaatcacatctagtgactggtaccaacaaaa

SEQ ID NO: 347 - DNA, 14042 bp, Homo sapiens
  source 1..14042: mol_type = genomic DNA; note = NC_000011.10:c57542505-57528464 TIMM10 [organism=Homo sapiens] [GeneID=26519] [chromosome=11]
atcacgaaggagagagaagtgcttccccaaagctgggatggttgggctacattgacatgacgttggatggtgttcacctgatgcccctcggtaggttctggctttggctttaaagaacattgaatcacataatgccttttcagtcatgttgcctctttttgattaagccactgaggtggtcacaattttattgtattatttattttttgagacaaggtctcgctctgtcatccaggctggagtgcaggagcacaatctcaggtcactgcaacctctgcctcctggggtcaggtgatcctccaacctcagcctcctgagtagctgggactacaggtgcttaccaccacacctggctaatttttgtgtgtgtgtgtgtgtgtgtgtgtgtgtgttttttttttgtagagatggggttttgccatgttgcccaggctggtctcaaactcctgagctcaagcaatccacctgcctcggcctcccaaggttctgggattgcaggcatgagcagtgcctggtcacagttttatactggcatcctagaacacctatggaacaattgctactctcccctgagagcctaggcaagcagaagtatctagatagaattgaataacaccattttgtttccattgtatttatttttacagttactttctatctctggtaagtgatactgagtttccatttccaacagtgatacagtgtcttttaaaaatacatttactgaacttaaaaataagttgattcaaaggaagtaattcaggaaactggaatataggcagtgcagatgtagcaaaattatagaggtggtgtataaaaatggctgaaatttgggaaccccagggccaactggtctctggagctttgccagctctaccagcctgtggtttttggaaaaggtgggcctgggcaaggaagcgtttccttgagtgaagaatggagccgtactctccctggcctctgctgagcaatctgactctccaactgcccccgggagcatgggggtagattatgacatcttaactcggagtttcctatttaagtactgtatatactggaggatctacaaaaacaggtgtgtgggggccccgggttagctccttcatgctcctgccctttttggggggtgtagttacaaagaaaacaatccccaaatagggctcagggcatgactcaggcagtaagaaaagtggacactcctgtcacacactaaaaataccccctgcccttggcagtaccatctttctcagtgatagtaccgagggcacctgggtaattgggcagaggacaggaggcaagaagacagggatagggcttttttcccaccacccactggggtcttacccagagtcctggggttcctgaattcgatgccctcactatttcctaaaagtaggctgggatttgtaaagatgctcacactgtcctctgattcctgctagagccccttcctggttcagcggctccagcaatgtcttaaagtaagagggaagatgacgccgggcatggtggatcacacctgtaatcccagcactttgggagcccgtagcgggcagatcacaaggtcaggagttcaagaccagcctggccaatatggtgaaaccccatctctactacaaatacaaaaattagctgggtgtggtggcagacgcctgtaatcccagctacttgggaggctgaggcaggagaattgcttgaacccgggaggtggaggttgcagtgagccgagatcgcgtcactgcactccagcctgggcaacaaagcgagactccgtctcaaaaaaaaaaaaagagggaagatgagccagggggatggacgcacatcagcagagatgccgggaggtgtgaagttgtggagctggctgtgacctgcatcttccagtccccactgagacctgagcaagtagttttccctctctgggcctcagtttcaactgacaatgatggggttcatctggatcaggttctccacattgtgttctgtggaaaactagggtctcccgtgacatggatagggttttctgtggggttgggagaaaggatattctctggctaaggttgctccacaaaaaagcctactctttaccctcttagagatatacagtttcagccaggcgcagtggctcatgcctataatcttagcattttgggaagcctaggtgggaggattacttcggcccaagagttcaagaccagcctaggcaacatattaaattctgtctctatagtaaggaaaataaaattaaacaaaacaaaacaaaacaaaaacagatatataacttcattagcatttaaatagattttagaaaccagatagtcaagaaacctaaaccttgcttaaacttcatttaactcacttttttccaaacctatttgaccatgacttttttttttcctccctttgttttcttttctttttgctttgattttccctgaggagcatctaccactctctctagcagcagaagaaagcatggcaaatgctggtctaacacaatcccttcccctctttctctctgctcttgtttggaaggtgacatggactagcagtgaaaatcattgattctggtgtcttcctgtgatgggatctcagctcccatgggttactaattgtgttaaccttgagcaagctatccatcctctctgtgttttgatttctgcagacaacaataggtcccatcccatagggatggtggaggattaagaaagcccatgcttagaaaatatctggagccagacgtggcggcacatgcctgtggtcccagccactcaagaggctgaggcaggaggatcacctgaggccaggaggtcaagcagtgcactataatgatgcctatgaatagccactacactccagcctgggcaacaaagtgagacctcagctcttaaaaaaacaaaacaaaacaggattcagaggcatgcttggcatgaatgagtactcagcacccatcagctcgtatgatgtgggttggctgtgcccagccctgtgccagggcaaggtcctgacccagccttgagggcatttatcagtgagtcaaggcagagagaactgaatgccagtaggatgataacaagccctttttatacctcaaagtatgacactatttggctaagacatagctgagtgctccagtcatcttttatttttaagagacagggtcttactctgttgcccaggctggagtgcagtggctcaatcatagctcactgtgacctctacctcctggactcaacggatcttcccacctcagcctcctgaggagctgtgaccacagatgtgcaccatcacacctggctaattttttgttttttattttttttatagagatggggtctcgctatgtttcccaggctggtctcaaactcttggcctcaagtgaacctcctgcctcggcctcctaaagtgctgagtttataggtatgagccactgagactggccgctctaaccatctttccttctgcctacacgctgcatacttagggtggtggaggggaagggtaggtgcacgcacacggacacacacctcggctatcctgcgtgtttatcacctcagctttccaccctccaggcttgtcacaaatagaaaaggagtgaagatgctcagaatgctgagaaaccaggacgccaccacccacccccagcattcacagccctacagcagtttacagcttatgctgcggaggccctgctttctcttggtcatttcttgctccgacccttcagaataggttattggccccattagggagccaatggggatttcaggctcagggagttgaagtcccttgactaaagttataggacaagtggcctggctctctatctagaatccaagtatcccaacttccactccagagctcacatcaaatatatgctcccactagctccgcagcccagtgtccctacaaaggccctggcccagagtgggggcaccccaccagttgggaagggcagtcagattcagccgaggagttcctccctctttcttctaggtgcacagtaggcccttcatgaaagtttctctgcccccaccttcctttcttattctctcctttccttcctccttccttccccaggaagtctccaaaccatccctgttttgtgtccaaagcagcactgcagatatctcccctccctctctcttcctgtttcttctggcagaccaggaggaaagggacccaggagcccaagatccaaactcccagtagtataaacactggatgttctgtggtgcgtctgccacccactgcagcctcatctgtcatctggttgtcctaaggcttccaccttccccactcagccaggggccctcccttggagaggccgacctcaattgcttagactaggggtatccaatcttttggcttccttgagccacactggtagaagtagaagtgtcttgggccacatgtaaaatacgttaacactaacgatagtggatgagctaaaacaaaaattgcaaaaaaaaaaaaaatctcataatgttttaagaaagtttatgaattcatgttgggctacattcaaagccatcctgggccacaggtagcctgtgggctggacaggcttggcttagacagtctaccccccaacccagtttgactcttgagactcccaaggtcccctcccctgctctgtggcctcctcgtggatggccacttgcagtctgctctgtaggtgctctggtgcagggctgagaccccaggcatctaaagagagtagacattgtggtggagagaattagaaaggagcctggatttctccaaatggggggccctcctgggaggctctggcccttggacagtgggagtgagaattggcagatggggagggacccttagaaagggtgccagggcttctcctacctgtggggcttctgcctgtggcttgggagctgtctctttgctccagctgagtggcctcactcccaggctgcctttaagccccagtggcctctagcccccagctctttggtcccgcctccccccttcctctccctcttccaccccacccccacttcaagagtcttgggctgcctgaagagcattgtttactggcctgttggtacaacactttaccctagactgggaggctcggatttcccgtggaagatctgacaggtggcacctttcaatcacggcacgtcccttccgccctgagcctggcagcatccgtcctgtggtcatctttctccccagtggactctcctaaccctagggaccttgacaaccatcttcaggactcatttagagcatggccctggcctccactgctcatccagagcccaggcgaggcctcttgtgctcccttcacacccaccccgccacgttccttacatagcccctttccctcgtcctcagacaaaagcagctgcttaaggctgggctaaggagggggcgagtagggcagctgccaacacaggggatgtgtcttggggctcacagttgactgagagatttggagggggaggggcagagagggcaaaagtgatgggacaagctgacggatcactggacggagcctggaaaatacaaaactcctgagttctattttgagctgaagtgacaggtacacagtaggctctgaacacatttttatactgaactgacattttgctaagaaaaaaacaaaacaagcctgggcatggtggctcatgcctgtaatcccagcactttgggcagccgaggcgggtggattgcttgaagccaggagttcaagaacagcatggtcaacagggtgaaaccctgtctctactacaaatacaaaaattggccgggcttggtggcgcatgcctgtaatctcagctacttgggaggctgaggcacgagaactgcttgaacctgggaggcagaggttgcagcaagtcactgcactccagcttgggtgacagagactccatctcaaaaaaaagtcttcactttctctgtgtgttttacaatctaagaaaggcactacttttggagaatgggtgcagaggacactcccacgaagcttgggatcccccccagtcctcctaccccaagccccaccactgggccacactggcctccttcctattccttaaataaatccatcccttttcagactcaggactggtttttccttctactctttgtaagactgcctccctctcattcttctggacttagctgaaatttcattccctcagagaggttttccatgaccttcaattcctctccctcatttcagcagtttttattgtcctcataatactaaatctaaaattaccttattcatttccttattatctgactctctcactaggctttaagctccatgagggcagggattttatctaccatactcatggctgtatgcctagatcccagcagaattgcctggctcatattaggtacttgataaatacatactgaatgaaataactaattaattaacagaaatatgacaggaacttggaggtcttgcccgggatgatctgaaagagagatctttctgtgcatctaggtttgggtactagtcatgaaatagtccaatattaatggttgccagccggctctagtaatacttgaaacccggctgggattataggcatgagccaccatgcccagagtattttgctcttttcaatatctaatgacagtaggataagagaaatgaatttaaacaaaaaaccagcaagccagagagagatgtggaaaaactcgccaatcttgggcagatatactctggatggatgctgttttgagaataaagtgaagaagcatggatagaagtggggagagcagtcaggagacaaactcagtgaccctggtgcaggatggtggtggcttggaccacagtatcagccatggaggtaagaagaagtgatgggaaacagtaatagtgcagacagtgattaagccagggccagctttttcttcaagtgaatagaatgacgtaagccatttcatcacaagggaggttacaggaaacctctgtttttgtattctctgcacctctcatgagtggtcagggcccacttgaagtgattctagatgaaaactctgcatctcttcttctggggctggggtcccacccaagaggacaatactgacccacgatgaatgacaaatatacaactcacctttgcaaggttgggaaggggtagaatgcagggtagaatgaggagccagagtttcagcatggtgttgacagagatcagtagctttggatgacatatctggagtctaaggatatcttcaaagtctgaggctatctaaactgtcttctacaagaagcaattcaactgggaccattggagattcctacctgtaggtctccacatagaggaaagacacagtctcatagtaaataatcataataacaatagcatcatcatcaataagagcaatggttttccagaggctgagcagctggggagatggagagttgctgttcaatgggtatacaatttcagttatgcaagatgaataagttctagaaatctgtgtacaatatggtacatatagttaacaatactattttgtgcacttaaaaatttgttggccgggcgcggtgtataaagcactttgggaggccaaggcaggtggatcatgaggtcaggagactgagaccatcctggccaacatggtgaaaccccatctctactaaaaacacaaaaattagctgggtgtggtggcatgcgcctgtagtcccagctacttgggaggctgagtcaggagaatcccttgaacctgggaggcagaggctgtagtgagcggagatcgtgccactatcctccagtctggtgacagagcgagactccgtttaaaaaaattttttttgttaagcagggcccagtgcagtgactcatgcctgtaatgccagtgctttgggaggctgaggcaggaggatcgcttgaggccaggagtttgaaaccagcctggacaacatagcaagaccctatctctacaaaaaattttaaaaaccactcaggcatggtggcttgcgcctgtagtcctagctattcaggaggctgagatgggaggattgcttgagcccaggagtttaagctaacagtgagctatgattgggtctctgcactccaggctgagcgacagagaccctgtctcaaggaaaaaataaataaataaaagggctttatctgttagagataaaaatagatgaagaaaatatggacaaatgttaacaattcctaagtcctggtgatgaatatatggaagctcaatgtcctgttctctctgcttttctgtatgttttaaatattccatctgggcatggggtggctcatgcctgtaatcccagcactttgagaggccaagacaggaggattgtttgagcccaggagtttgaaaccagcctgggaaacatgatgagaccctatctcttaaaaaaaaaaattagccaggcatggtggctcatgcctctagttccagctacttaggaggctgaggtaagaggattgcttaagccaaggagttcacgattgcagtgagcactgatcataccattgcactcaagcctgggtgacaaggcaagatcctgcctcaaaaatcctaagtaaaaataaaaataaatttgccccagtgaaagtttaaaaatgaaaaagaatgaaaacaatgatttatttttattgagcatctaccatggactaggtactttacttacacaatcttttatataaatatttttctttctttctttatggccagctcttactcatacttgtataatcttatttgttttcttttttgtagagatttttaaaactttttatttagaaataattatagtttcacaggaagttgcattaatagtacagagaggtcctgtacgccctttaccaacttccactaaaggttaaatctaacataactatattcaatatcaaagccagataatttatattggtacaatgtgtgtgtgtagtagttctatgactttttttttctttcttttttttttttagaccgagtcttgctctgtcgcccaagctggagtgcagtggcacaatctcggctcactgcaacttctgcctcccgcctcccgggttcaagcgattctcctgtctcgccctcctgagtagctgggactataggcgcatgccaccacacccggctgattttttttattttagtagagacggggtttcaccatgttaaccaggatggtctcgatctcctgacctcgtgatccacccgcctcggcctcccaaagtgttgggattacaggtgtgagccaccgcgcctggctttttttttttttttgagacggagtctcactctgtcgcctgggctggagtgcagtggcacgatctcggctcactgcaacctccacctcccgggttcaaacgattctcctgcctcaggctcctgagtagctggggttacaggtgcccgccactacccccagctaattttttgtatttttagtagagacggagtttcaccaacaaggctggtctcgaactcctaccttgtgattcgctcgcctgggcctcccacagtgctgggattacaggcgtgagccaccgcaccctgccagttctatgacatcttatcacctgtgtagattcttgtaaccaccaccacaatcaggatacagaattatccatcaacacaaagatctctcttgtgctaccctttacaggtacacttctatctccccatcaaccctaacactagacaatcagaaatctcttctccatctctataattttgtgattttgagaatgttacttaaatgaaatcatacagtatgcaacctttcataaggcccagtagatattgcaagattcctcttgtaagaaaccatctccttttcccacgcagtttcttaactttccataatgtttcttttttgcggggagtggggggtcggagtttcactcttgttgcccaggctggagtgcaatggtgcgatcttggctcactgcaacctctgcctcccgggttcaagtgtttctcctgccttagcctcctgcttagcctcttgagtagctgggattacaagcacccgtcaccacaccgggctacttttttgtatttttagtagagatggggtttcaccaagttggccaggctggtctcgaactcctgacctcaggtgatccacccacctcagcctcccaaagtgctgggattacaggcgtgagccactgcacccggccaatgttgactatattttcaaaggcaaaaaccaaggcaagatatgtccatctgtacaagagtatcatagcagcattattgcataataggcaaaaactggaaacaatccaaacatccaccaacgggagaatggatagatgaattgtggcatactcatacaatcaaacactagacagcaataaaacagaaggaataacagatgcacacaacaatatggaggaaatcttacaggtacattgagctaaagaagtcaggcacaaaatagaaaataatgtataattccatttacacgaagttcaagaacaaggaaaactaattgatggtgatagaggtcagaatagtggttaacttcgagagggggtattgatggggaaggaacacaagataactttttggggtgcaggaagtattttatatcttgatctggatggcggttatacaaatgtacatatatagatacatatatatttaattaagcttaacattcgtgtattttatgcactttatgaatgttataccccaatctttaaaaatcagggcacaagtttggcaaagatgagtcttcaaagcagtagaaaggtcaattgtttaaaattaggatggtcttggacaattagggaagcttatgatgaccacacagaaaatgtctagcccaccttttccaatgggcaatgtgcccttgcgtcattaatttacatcttgtaaatttattttaccaggaaattgtgtgacaaatcaagggactgagtattgtttccttgtttccttctttttagtggggaatgagtgaatggtgcagtttgaagaacacattaagtcttgaaagttggaaagttcaccagtacccttctttccctcacccaagattagccctggtggcagccgaaattgcttttattatctctttgtggctgaggacctctaactgttgaagaaaacatattttacacgtcttgtctttctgcgaacaggaagcctatctcgcttatctttgcaaccccagacggggcttagtgtgacctacacacagcagtaatcgcacaacgtcccgtggagcactgcttctcaaatttggctgtacatacgaatcacctggggaattttaaattgtattgctgcctgaggaattttaaactgtactcccagagattctgatttaattgaaatgaggtgagtcctgggcactgggatgtttaaaaacgttccaggtgattttaacgcgaaacaaaaacagaaccgctgtttgggggcgttcttccttctccacgcctgatttgcgcacaggagtcggctgtctggaacgggggtgaggttcacaggtgtctgtcgccacgcctcttcctacagaaccaataaactgaagccgctcggtgacatcccaaaggacttgaattctgatcgggctgcagacgctctgcaccccgcccaagcttctatggtactttggtgtcctctctagcactggcaagtcgccttcctcttcgcccggcgccagccgctccctctctatgatcgccgagttcccggcgccgtctcgttggtatttaattccggaagcgagtttgaatcaaagaagaggcgggactttcctcccggaagtaacccacgtgcttccgctggagcctctcgggaggcgggtaacgttatagtatttgtcagaagttggggtctccgtgggcattgtgatccgtcccaggcagtggtaagtgacacatgacctctgaattcaatgtggccctgatgatggcgtcgccatttcagaggtgtagcctttgggctgggtcccggtcgcctctgttcagcgtatgatcccattcccagggccctggaggttcaggttcgtgggttagagagttctcctccggtcctcgatctcctgaatagaggtgacctccaggaactggggcatcagagatccggggctcgatttccaggctcgccatagacgtcctgtgcgaccttgggctaggcctcagtttccacatccgtgaaatggggtggttaagctcactgaggttagtggcccgtggtggtctggcgccctgtgagtcctctgtatcctctagccccaggggtaggagagtgaacggcggcggtgggtgctgatggtgatgtctgctcccaggattaggaggccagaaggagatcccttccacggtgctaggctgagatggatcctctcagggcccaacagctggctgcggagctggaggtggagatgatggccgatatgtacaacaggtaaagagaactatgtgctaccctgtcttggaaaataagtcttggtcacccttatcgaaggtgaatgacttatgacaaattccttcctgaatgtaggggagcctgaggcccatgcttaccctccccacacccaccttcaaggttgatcctaatgtagatgcagtaaagggtcactagaatgagttgggcatttagatggggatggaactggcaatgcaggagccaagcaggaagagaaactccaatccaggctctggttaggttccaagaaaagctgagtatttgcctcttgacaaatagcacatagccagcccatttagtagttaacattttaaaaccctttattctgtgtcaggcacttgttaatcttcaaaataatccagtgggttaattttattagtcccgtcttaaaatgaggaaattgatgattctagaggttaagtaacttccttagggtcggcagctggtcagtaacaatgccagaactagcacctcagtctgattctgcaactagtgctcataaccatttggcaaatttgggaacaaatcctggctccaccaatcaccagcagtataattggacatgttacttgcactgtttgacaattggtttcctcattatgaagaagacataatgatacctacctcataggacatcataaatattaaatctaaaaatatatgaaagcccttagcctcaagcccaacacttagtgaaatgtctgctatttttattggcttaagctctcttgattggttggtttatcctgaaggctataaattagaaggatttttaagtgtagactgtgaggtcagatgacctggcttcataacccagctctgtgtgatccttagaaaattactgagcctctgtttgccttaatttcctcatctgtaaaatggggatacatgtctcttagggttattgtaagcattgcataacagaatgcaggtaaagcacttagcaggatgcctggcatgtagccagtcctcaacaaatggtttctacttagttagtcatatacatggacttagacaagtttcctacttgcaaggaccttccagtggttgaggtgtaaactgaggatttacactgctttcttgggggaggtgaaatcaatatagcagggctggaatggtcaaggttcctgggatgtcacaggatgctgctgacatgaccttgcccctccctccctccagaatgaccagtgcctgccaccggaagtgtgtgcctcctcactacaaggaagcagagctctccaagggcgagtctgtgtgcctggaccgatgtgtctctaagtacctggacatccatgagcggatgggcaaaaagttgacagagttgtctatgcaggatgaagagctgatgaagagggtgcagcagagctctgggcctgcatgaggtccctgtcagtatacaccctggggtgtaccccaccccttcccactttaataaacgtgctccctgttgggtgtcatctgtgaagactgccaggcctaggctctctgtagagagtcttcaagatcccggagtggtagcgctgtctcctggtgaaggagtatttgtcacactggaatgtgactgtgtgtgtatgtatgtgtatatatatatatatatatatatatatatatataaacaagtttgttgacaccta

SEQ ID NO: 348 - DNA, 70609 bp, Homo sapiens
  source 1..70609: mol_type = genomic DNA; note = NC_000008.11:11493991-11564599 BLK [organism=Homo sapiens] [GeneID=640] [chromosome=8]
gaaagaacggctgccctggtgcacacagatggcacatggcagagcccaagccctctccatgagatctgcagcgtttgtccacacggcagggcaaattaccttgtagagtcagcatggaggtttgctaactctgccggacttggtgcagaaaaaataccagccgtgctgttaaaccaaaaccccaggagaaaactttctggtgacagaagggcattgtgacccacgttgcccagggccagggacagggcagctgctcatggtccttcctcacgagttttcctggagcagagggatacccccaaacccagggagcccacaggagcttcagaagggctcggctggagggcggggcccctgttgcacttgctcactggggactggggaggctctgatcgcagaccgggggtgctgccacctctgtctgctgccggcagaaagccacaagccatgaaaactgattgagatgagaagaattcatctgggactggcttttgctttaggatggtgttggaagttgctcgttgtcgctaggagcctgctccactgtaagggtgtcaggatctgaagagctatggtgaaacaccactgaagcattgccaaggtgaggccctgcgtcttccgggttctttatcgtcttcctttaaattgtgcaaatggtgctgtaaggcctgtagtggggcaagcaagcaaggacattgctgtgggtgccacagacggaggaagaggcatgaatggatcgctgcctcagctatgaatagattgctccatggtttgtgcatttccagttttgagaatttttaatttataaaaggtcatccatccagggtagattctgctttttggaaaaggcagtgaatgtgccacagaggagagaagggacgtgggatgtagagagggggttgagcgggcacacacaggccactgctgcgctcccggcgagtcactcggcctcttgataggaggtgatattgactgtgcagagctgacagaggttagtggtcacaggcggggagcatctggctcaaggcaaatgactgttgctttcgttttatttgtttgtttctgaatgaagttgttccatttttcaggcattcaggaatggggtaactgaatagatgtaatgatgatcttcttgtttaagagatctatttcaccaggaaacaccaactgtgaaaaggaaagcatagttgatcacatattttgaaaggatttgtgtaaattgtaaggttttgacaacgtttccatttatctggtaatgcgggtggatgaagttcaccctcatccacccacattaccaaggaactaaggaattgtgcgtttgcagtaacagaagaaattgctgtgatatgtgcatatcctcctccctcgggagagtgggacttaattcccctcaccttgagtgaggtttggactaagagtatggaaagggagaaatagtagctctgtagaggagaaacctgcagatgccagcttcaccaagggaccaagcttagcatcaccgggaataagctgggctgctattgtgaactgccacgacagtgcggttcttcccaccaactcataaccccagtcaaatcatgagaaaacatcagacaaatccaaactggggaagattccacaacatatttcaccttcaaaaatgtcaaggtcatgaaaaacaaagaaagacaggcaaagcgtcacagatcagaggagacatgatggtcaggacacccaaacccagaattcgcatcctgtattggatcctaaagcaacaccgcaaaggtcattagtggaaaaataggtgaaattttaacaagacctggggtctcgctaatattgtggtaacaattactgcttagttctggcaaatgtaccatggttacgtaaggtgttcacattagaagaacctggtgaaggaaatatggaaattctctgtgctatcccttgtaatttttctccaaatctaaaattactgcaaaataaagagttaaaaaaaattagactcattcttcctcagagcaggagtagccaaatcctgagcattcttgggaaaactggcgttcatggcctggtgatcacaccttctctttgaacattctggaatatagcaggccttttgaatttttgaccatccatcattctctctcccaacccctacctgattccagaatagctctgtatttgcctctcttcatagtatttctcatggatgattatattgttgttgttggtgtccaatgggttttgtgggggttgtttttcgtttatgttttttgtttttcagagatggggtcttgctctgttgcccaggctggagtgcagtggcaagagatcatcgctcactgcagcactgacctcctgggctcaagcgatcctcccaactcagcctcctgagtagctgggaccacaggtacgccactgtatctggctaattttttaatcttattttttgaagagatggggtctcgctttgttgcctgggctgatctccaacccctggcttcaagccatcctcccactttggcctcccacagtgctgggattgcaggcatgagtcactgtgactggcccagcatgcatttttgagcctttgctctgtggcaggggctgcaggacggaatacactctcatctgcccagcgaagctcactgcactggtgcaggctcctggcaccccaagcacaggcccagctacccagacctgactcctctccaggaaggaagcagaaagccaggaatggagagaatgaggacccaggcccctgggggagtacagaattccagccaggaatctgccgtcctctgggctcaaccaccccacagaatctggtcagccaagtggctgtgagctgggctcgacagcccttcctcgagagtaaactgtggcctctaggatgtagagaggggactcaaagggccagatcccatttgagtgaggattctgaccttgtgagcccacctgcagcctggggtctgcagccttggggactggccaccggtggccagcatcctggcttgcagggttcacgtgtatagagaggtaacagcaagacagagaaacctggcccctcttgcaggcccagcagagcgggtgagccctactcaaaggtgatgctgcgcctgattagagaaaagcttccaaagcaggtgaggaggaagaaaaaatgatgaagccgcaggaagacagcacgtagatggaaatctcaacatactgagatggaaatcaatcacaaaactcttacaggaaaatcacagctaaaagttggtgattacatgtgggcctgcagtgcctttcctgtcacatctgctaccccactgccagcctgctgctaccccacagcagccctcccatttgtggaatgttccctggcgtgctcctgcttgcctgaatcccttccccaccttcccacctaggcaacttgcatttgctctgacgtccagggcaggtgcgaatgtctcctcccagtcacagtgcccaagcccatttgtgtgtccccagcaaccaccagcacacacccagggctctggtttgcaggcctgccaggttctctggaccaaagctcctgaggacaaggacatgccctacatgtgcctccaggtcccagcacccagcgcagtgcctggcccaccaggggtatctggtaaagtggttcttgagttaaagacacaagggcaaaaccttaaatgaaaatcaaggttaagacatgaggatgaaagcttgaaagaggaaaagcaaagataattgaatgatcatccctaatcgtggtgcaccccagtgccatcagcatgctggggttttgacaggacccttggaagaaagagaagaggcatctgaggcctctggcacattccacttcctgtaagacagtgtggtatagatgaaagcattggggcttcctgccagccaggtcagtctggctctgcacctgccagctgggagtgtgaagtgggagcagttgcacccactctcaagcacagacatgagaactgaacagaaccacggaatgggggtccagagcccaagacatagacgaggctcctccttgtccactgtggggcttgtgcaaccccttcatcaaagcgctggtgctttccacattgtaatcaaggaagttttctcacgttccttctcatcacaactagctgctggcctttttgcacactttggcacctaggatgctgaacctggaccagtgggaggcaaacaagacacacctgggatgcaaaatgtaaggaggctcccatgctcaggtcgttcaagtgcaggaaaagtttgtgtatgtgtgaaacgcacaatgccatgtggtgtctataagggcatttgaggttctgtgcttaatagatgaagtgggttctgagcattgagtctgtggattcctgatgagtttcctggtgctctgagctccgtgaacttgtaaacaagcttttgtgtaggtgggtacttacagtttttgtcagattcccaaaggggtctgtgaaccccaaaatatttggaatcacacagtcaaatatctaggaagactactttaattttctctctcagcgtgttgtggatatgaggaagtggaaaggacttggacatagaagtcagacaaagcagccacatctgagtggtctcgtcctgcagtgtagtggttagacggctggccttgtcaaccagagggctccagtgcaaggttcagccctggcaatgtgagcaagtcactgtgtgccttcctgagatgataatagtttgaccccactgtatacgagcagccttacctgtctcgggtaggttaattatatcctctcagtcttatttcttcattcattgataatagcacatcacaggattaacagaattaaattacaaagccctaatttttaggtgagttgaagctgaggagcacacaacttttcttacagggtgcactcaattctcaatgtcagaaccaccagggggtccttgtacttcaaaaagacacatcttacatgacaacttctttgatttacttttatgcccaatattcattttgaaacctcacaaaggagagcatggtgttgttgtttctcaaaagagaaagtaaatttagtaagattgagagccatgaacctagacacagtcacagggcacataagatttcggtcaatcacagactacatatatgatggtggtctcataagatgaagacactgtattttgcctgtacctgttctatgtttagagacacaaatattcaccactgtgttactactgcctgcagtatttagtacagtcgcaggctgtgtaggtgtgtagcctagaagcaaccggctatgccacagagcctaggggtggagtaggctctaccatctaagttttgtatacgatgttcgcagaacaacaaaatcacctaatgacacatttttcagaacagatccctgtagtgaagcaatacgtaactatattttgggaacttcccctgtatccagatagtcagtccaagagctgtgtgtttggatctcacagtgcttgagatcctgagagaatctcatttcctgagtcagatgtgggcattctttcttggcatgggtacactgccgtggcttgtgctgaaggctgcataagaaacagaggttggaaactcacagtggaatttattgctgagatgacgttaagctgttcgcattccacccaggacctccacaggagaagcccagagaggatgactctcagactccagatccaggaaatccatgcctctctggagcaatggatgtcttacagacactgtgactcttcaaactgattattttcttctttgtgcttggactccaggacacttagaacccaatttgcatctaaccactagcagtttggtgacagcatgtcacagtttgtatttctgtgcaccagctttatacacatttttttttctgccctaacttaccctttggtctaatttctttatctgtttttctatcctgttgtattgtatgtatttttataagcggtctcaaatcttttctggaaacactaggaaatgaatatataaacaaatacaagcaggacagcatttctgaaagagcctgatatacagtgagggtgctcactaaggattagttccctatctgtgtacaaaacagaaaaattcactgagggagccaacctgcagtcaaatgtccagctgtgagtctattacagttatagaaatagcttatttttacacatattccaccttagattgatttggggggtgtttgtttttgttgttgttgtttgagacaaggtctcactctgttgcccaggctggagtgcaatggtttgatctcagctcactacatcctccgcctcccgggttcaagcaactctcccacctcagcctcccgagtagctaggactacaggtgtgcaccaccacgccctgctaatttttgtatttttttgatagagacagggtttcatcatgttggccaggctggtctcaaactctggacctcaagtgatctgcctgccttggcctcccaaagtgttgggattacaagcataaaccactgcacctggcctgtttttttgttttgttttattttgtttttgtttgtttgagatagggtctcgctctgcctcccaggctggagtgcagtggtgtaatcatggctcactgcagcctccacttccccagctcaggcaatcctcccacctcagcctcccaagtagttgggaccacaggtgtgcaccaccacgcctggctaattttggtttttgtagagatgggtttttaccatgttgtctaggctggtctcaacctcctgagctcaagcaatctgcctgcctcagcctcccaaagtgctgggattacaggcatgagtgaccatgcctggctctaccttttatgttaaagtttatataaattatttcattttaagattcttttattcctgccatttctgtggtgcaattggatttttacataaagttaaataatactttttattttggccaggcgtggtggctcacacctgtaatcccagcactttgggaggccaaggtgggaggattgcttgaggtcaggggttcgagaccagcctggccaacatggtgaaaccccatctctaccaaaaatacaaaaattagctgggcatggtggcaggcacctgtaatcccagctactcagaaggctgaggcaggagaattgcttgaacccaggagatctcagcagtgagctgagactgccgctgcactccagcttggacgacagagtgaaaaaaattaaaaattaaatgatacttttaattttatttactattttatttgaataaataaaaggatcctttaaaaagtattacacacgaaaatagggtcaaaagtcatagcccattttcttgattttatttggtgctttatgggaaaggctaaactctctctcttttttttttttttaacacattagcatggaaaggaatcatttctactttgtggtgtctgtctgtctgtctatctgatgggctctctggcacctgccagcacactgggggaagtgtgaggtcaagataggcatcttgtagatgaagagcatggcgtcctggtaaacgtttaacaaccagctttccaggaaacaaatgtattgtatacatacataagtttatagtaacatgtactgatataaaggatgcgtagcacttaatttacaaataataacaaaatatgcaatagtctctgtcctaaataccgcagaggtgattgagtctcatagaaagctctcgtgactttgcactgtcatatccgtagccaagcattggttgcagcagatgagcaagtgtggtgttggcacaaacactgaaatgttcattcatgttaaggagcagatcaaagtgaaacaacaaagagttggggcaggctgcagccttagtgccatgagcggcttctttgttgaactgggtagtagtttttcaatattcagaaaagtttcctcaatgttttgtgctactcacagtgttctagctacagacaagatgctcttttaagcatagaaaatccatgaaacaaatcactgccgacctgtagcatttgcctgttcctgttgtataaatactcccaccagggccaatttcaagttgctaacatgacttgcgtgaacatgggttcgagatgcgcagcagcacagcacgatagagtacttccgccttatagacacagtcagttaaagaacctcaaagcatagctattattaagatgcagtaaaaataatcaggaagtgatgaggtttaagtatttataacctttgttttaatagaatccatttagttgtatcttgtataattcaactttaattttttatcattttaattttatatagtttttttttctttttctttcttttttatttttctttgagaaggagtcttactctgttgcccaggctgcagtgcagtggcacgatctctggtcactgcaacttccacctcctgggtttaagggattctcctgcctcatcctcccaattagctgggattacaggcacccgccaccatgcctggctaatttttgtattttaagtagagttagccaggctggtcttgaactcctgacctcaagtgatctgcccagttcggcctcccaaactgctgggattacagacatgagccaccacgcccggcccgtatagtttttataccttaatcttgcataatgatttgaataattcagctcacaaaattcctgagaatttaacaaccggctctagcataccggcacaagctggcccccagtgcatcactgacggggaggccgagtgtcttgaggccacactgcagatcagggtcctgcctgcagccaagtggggacaagtggagaataacttgcctcctgggctctcctgagtcccgagcctgacagcggaggcccaggtgggtgaccctgctttgtgctcggtggcaggggaaggggggtgggcctgtgggcctggatggagaacctgtccccatggctgtcatgtccctacaccagctgctgccagccactgtggggttcgcaagtccccactcgcaaaacggctactgttttccacaaccatgggatacaaggatgtccccttgggctccttctcatctctactctctgctggcctctttgcacagattgatacctgggatgctgagccaggaccagagggaggtaaagacacacctggggtgcaaaactgaaggaggccctgatgcttgaggttgttcaagtgcagagaatgtttgtgtatgtgtgaagcacacaaccacacgtagcatctaaaaggacatttgatgttctgcacttaatagattaagctggttctgaccttctagcccctgggcttctgatgagtctcctggtagcctgtcagctcctgatcttggatgggagcttgtgtgtaggtgggcactcttctgcaaagtgcgtttatggcttttatctggtttcctctgatcagaaagatctgggggtgctggcacacccagacgactagtaactcccaaagggagaggtgcagctttgtcacctgcccctgtgtcaggtgggacgtgagatgctctatttttttctgctccatcctgtgcccaagccttatacagggtgacccttttcagagaggcctttgccaccaggtcagtgtgagcatgtggctgggtgatttcctgccgtggaccagggatctgtgtgctgtctgaagtaagcaagggtgctctttcttggcaaggtctgagggctgagacttgcaaggagacacctgctctcttggtcaccagactggaggttcctatgtgcaggtgtggaggatggaagaggtcactctgtcctctttcttgcctgggcctcacctctgctgaggctgctggctgccctgggctcgcagtgaaaggggccatcttccaccctcccctgctggtcaagtgcatctttccaggttccggcactccacgttgccacccagacaagtgtcctgtgggaactagcaagtgggaatcaaaactacccccagagaggctcctggccgggagatgaagggatctaccctggggctaaagtctccccagcctttcttggagcttaggtcctggctttagaaagatcccattcacatccaggcacagtggcacacacctgtaatctcagtactttgggaggccgaggcaggcggatcacttgaggtcaggagtttgagactggtctggccaacatggcgaaactgtctctactcaaaatgcaaaaattagctgggtgtggtggtgtgcgactgtaatcccagctactcaggaggctgaggtaggagaattgcttgaacccaaggaggcaaaggttgcagtgagctgagatcgcaccattgcactccagcttgagcaacagagcgagattccatctcaaaataaagaaaggaagggaggaaggaaggaaggaaggaaggaagaaagaaaagaaaagaaaagaaaagaaaagaaaagaaaagaaaagaaaaaaaaaagaaaagatcccattcacctgcacaaaagccacacccctttgtggccaaggaaagggccacagaagaagaagtaggcccttcagaagggggagaagtaggcgccttcagaagctggttatccgtgtgtaatgccatcacagggacgtgcgtttaagatcttttatcagtcttcgtagctaaatacttttagttaattgcaggcgggaggggctactagctcaggctacatggagcatgtgctcaaaaactgtctccaatatggtgacttgctgtttgaggacggtctaagcgactgaggagtgtgccccctgttcccacccttgagatgaggcctgataagggtgctggcatatttagtgttgggcaccctggtgctctccagcatgtggtgtttggcctaagtggcccatgtggactttgtttcaaggattttacgacaagaaacaccaaaatgaggacatctctgtggccatgtttcaggcaagggggtaatggatacagagcatatgtacacacaaacacacatgcacagagacacgtacagacacatacatgcacacagacacatagatacagacacatacacataagaatacacacagaaacacacagacacccacacatatacacacatgcacagacatgtagaaatacctagacacagaggaacacacaaagatacacaggcacacatacaggtacatctacatgcttatcaaaaacaacagcaaaaccacctaccatgacaaatactattgcagcaaaactgaacaaataaattctgtgccataaagtttcctaaacctcatctattttgtagaaatctagtcacttgagtatcatccttcacaaagttctttctattctttctactgtacaaagttttctgttgtcaaatagcaagagatctctgttttctacttggaatgggcctggagaagggagacagcacccgctccctccaccccttgtccctgagcacagcatggtgacctgccaagccagagggtgacctggacactcataactcaatgcagggccaactgtagcctctggccggtgtccctgagtgagggcaaagttgtaataacacttgttctctcctttctccaatttgctcccaagctccattgctttcgttcaggccctcccccttctagactgggcagttccgcatccttggagctcatttctctgtcttcagaatctgatgctccaattcatcccatgtgtggctgccaaggtctttctaaaactcaaatgtggccctatcaccgcacagggtaaagccaccataaactcctctgtgtttgagaacaagggccaagtctcccattgaggcctccagggagtggacagtctgggtctcctttcttctccaagcacgctgggcccatctgtcctgtccctgaggactccctggcacacatgacacttcagagcttttgccaactccactccctgcctgaaatgcccatctccttcagagagcttctatgtatccttggaggtccagtcctaatgtccctgcctccgataagacctctccccatcttcctctcgccctgctcctgtccccgccaggcatgacaaatctcttcccacagtgggcccaacagggaggcagatggtagaacaggttttgggccaggtgccaggtgcacgtggctcttcatcctggttccccaccgcacacctggagagctgagtgcttttcctgaggtcacgcagaaggttaccagcctggctctggagctgtctctttgccacatcgtggggtgtctttaaggtgaccttgaatgtgcttgaagctgttttatgtcctatttgcagacctaggggaggacaatgccagggctttttgccttcccaaggtcacagcctgaagacactcagaaagatgtagttggctcatttatcattttttagaaaaaaagaaaacaacagaatgtgctgaatccttgtaactgttggccatggcactagtttcatggaaggtggaagggcaggttaggcttcttatgagggcgttcctggcctctggaggggtgtgggtgggctcaggtgaatgactgacagactggatttacgtatgttgagtgtgaatctcagtccacagcttggtgtgcaaaaacagaaaagctatctggtaatagctacatctctgttggggagaggaaactgacctctcaattcagggtcttcatacctttctccagggtggggtctaagttctgggagcctcatgagtctcaggaattctggggtggcctatttggtctttgtcatcagtccatgcagggggctgctagaatgtcatgtcagcctctgaccctggccaagccccctctcagagattccaggccacatcccaggttgagggatgcatcctcccactctggggccccccaggtgggactctcagggaggccacttgagacgcggttgcccaaactgactcaacaagatctctcagtcacgggctgaaagatctgcatcacgggctgaaagcaggaaagttcttttgtctctctttctgctttcctgtgacaatgggtgcagaaccatcgtgaatggttcaggtgcgggtagggaaaataacaaataggaggaagaacaatctcagaaaggcaggtagcctgtcccatctgctgacagagcagtgtgtaagcatcactgagcttgtgacattgatgttttttccaacatgcagtataaatgtacactgtgattttacaaggccaggagccaagtaacaacacccttggcagaggaagagtgaagtggggaaggaaactgaagcgggctagggaggaaggacagcttgacaactagttagaattggaaggacgatggactaggattgtaaaagaataaggcagaatgtcctaccttcccaccttggcaaaccctgcccctgggagtggtcctggatttgcagtggccctggcctggaccaccatgtagatgtcactaatggatcctcccaggggacgggcctgtcatggccctcaagaaaggcagggatgaccaccccaactgcaggggaagacaccacccaccctgagggcttttgggagcttttaaaagaaggcaagtcacgctttaaaagaactttgaagagacaggagcttagtggacccagtggagataaaaggtccaggtaaggagtggccaagcacttggaatttagaagaggcgaatcagaaagtcccaatggaccagcttgggggtttgggggttactgggtccatgtcaacatacagctcagtgggtgccaaagatcagccaggcctagggtgcagatgacagtgaggcaggatggtgacctggattaggactggagggggaacctgaggccaggagagcagggaagagattgctaaagacagtcaccccatggcaagctagttttctccccgagccagcatttctacacgtgagcactggccttgctgtctggctgggtgacttcctctctctggggttcagggcccagcactgctaatcgggggtagagtcaacggccttccagtgcaccctttggtggctctgtgtggcacatcaggcacactggtcaagtagggggtcatcaccaggccttgggtgcttctcaaacctaaagtcatgtggtcctcacaacagccccgtgatgtcatcaggaacctgcccactggcccagggctgggaaggactagagccaaagtgcaggctcaggactgtttgaccccaaagccagtgctctgaaccctccatctgtcttcattaaccaccgcctctgccactactgtaaggcaagagaagcgtgtcacggcgcgaaggctaagcacatgctgggaaatcacccgtggcttgcagacacatgcacagctactgggggtagatcaagagccaagaacgggtgagctcaagctgtgctcacatggggcgcgtgctaggtgactgtaggcctcagaaaacctgggatccagaacagctttcctccgctagggggctctggcacaagtttgcctgaagacatggccccatggcgaagccatcatgtgtgggaccttccttggccccctcttggtgagccacattcctgtccacgcagtagctccagcccccacccgtggcttttcacttcttccttgctttccacttctgaccaccctataccagaaggtacttcatgtcagtcctctcccgcattccctctgccttcgggtctcctggaattggaactgtcactagtcaatcattacttacggggatgtgcagaaagccagacactgtgctgggcctcgggcggcagaaataagacagccactgtagtgtcagctgtgtgcacccatctctccttctgacccaaacgcaactgtgatgggggccggtcctgccctttggggccatcagacaagggagcaactgacatttgcagaggccagaggagccgtggtggaggggttttctcagggctcgagggaggtgcctgcccatccactgagagctttgggaaggaaatgctgggcgccttttgtgcctcctactcatcaattccccccagctgcaggcaagggaggtcgttagcagcccagcctgtggggagcaagcaggccatgagctgcatgcagctggcactgctattacttaggaggcatcacaacaatgactcaggtgctgaccataacccttaaccaggtcacagtggctgcctaactgttgaagctgctacccctcctttaggttacaccgcacgaaaagttggcaatcctctctctcggtggctgctgtgggagcagctaacctcacagcacccgaagggatgtcatcgggaccccagctcggtttccagcatcagctgatgccagcaagaagccagccaggcctggggcttggcagcccagggactttaccatccaccatccacagggctgttgccctggacaggtcattgatatctgactcacagccaattcatggatgacgtgaatccaaaaatcagaggcccacgtggatttagacatggaaatgcctcaccagcttccatgagccagtctctgtgcggcagacttgaactgcacgggggctgataggaagcagggtgggcgctgggatgtgactgcgcccttgccagtgtttccagtctcccagctcgggttctgtggttgtctaagcctgggggtgctctgccgggtctgtggcgacccggctgccttttcagcctaatcaccagagaagccacagaaagagctggaccacttagaggggcagtctggccacagccacttggaagaacaggctgattttgtacagatgtgtcattttctcctgacttttaaactgtaaacattatataataccctagaaaattttgaaaatagatataaaccatcaataacactggcaacctaacacttttacctaagagctacccattttgatttatctgatgcgcagttttcattgctggaatcataaagacatagcaccttagattcttctcttttctttttctttctttttattataacataagcatctttcccactgctacttttgatcacttttgaggactcaaaatgatcatttttgggcctgcataatatttcactgtgtgaactctatcaccatttcaatcaggtgtttcgtttgcttccatatttttgtatcaccatagcaggtgatgattgaaaaaataaatgcagcttgcaaagtcattctgaattacatcgtggagctggagagtgttctttcctaatcccttcaaggaattacgatgatatggggagatgaaacattcatttgggggctggcgtggggtaagctttaaattgcgtttaaagtcagtgtgatagtgacttgagtttttcatctcttttctccagctccttgacggccatatttgctggccagggttactggtgtggtctttggccagagagcagactttcctctctgtgaaatgaaatgactcataaggaaacaaaccccaaggctttgggtacatttgtcccatcatctaaaccagggtttctaatcagaagtccatgaatgattgtggggctttgtcgggggagaggtcctgaagctgagcacaaaatttggcatgtttgtgataagtgtattttatagggatagtgtctgtagttccatcaggttctcaacgggggctgtggccccaaaaatgttttttaaaaaacccagctttctctctctgtctctttccccctttctgggaatccgagattgaaatgaaagaaatcgaaagatctttgcctacatacagaggtccagtaatgggatagggaatatattatccccgggatagcgccactgtactccagccaggatgacagagactccatctcaaataaataaataaataaataaataaataaataaataaataaatacataaataaagtgcctctttgttaaggcagttgcttctatttctacttttttaaccaaagctaattgctaatgtgttaaagtacgagattctgccttgattatggccgtccgtggttcttaactaaaggaaatgctttggcattttaaaacacatggatccccgtaagctttgcatttctcaccagggagtcagactgacacacaaatatttgtggttagttaattgttctttcctgctacaaacactcaccataggaggtgagctgtgtttaccaaactgaaatgttactatttgaggctgaaggagccaaagaaaccttgaaattcaagagaccaaacccaaaagttccacccaacggagtgggagacttcagctcattgaattcctgaatacagctcggtcttttgtcttcacacagcaatgagaacacatggacacaggaaggggaacatcacacaccggggcctgttgtggggtggggagagcggggagggatagcattaggagatatacctaatgctaaatgaccagttaatgggtgcagcacaccaacatggcacatgtatacatatgtaacaaacctgtatgttgtgcacatgtaccctaaaacttaaagtattaaaaaaaaaatcagtttctgttaacaacaaactctggcaccagtcagcgggtttgacttcctaaaaaagtttgatttgctttctctcttagaaattctgtcttaaatttccttaaacacaagtgtgtatacctggagcaaagaacatggggtgtaattcaatttctcttctcctttcttcctctgggaatctctgctaggtttcccacttattattgttgaaaactagcagtctttaaaggggatggacttcctgaaatacggcaaacagtcatgcaacaaaaaggagaaaattatattttcattttgggcgtcttagatgtagtgcaacattcaacatgagatcaatgtgccctcttgaccccaaagtattggctaatgatccataatcaatatttaggataacactggttgggagtatgaatgacatctttccaccattgtcttggtaaatgaaactatttactctttctggcagtggatgctgtcgggaggtggaaaagtaagcattttcttacgtttgggttttctgtgattgtttgattatttaatttattcgttcaaagaagagaaagatttactgcatgtctacaatgtatcaagtggtaagatggggcctgaaaatacaaagataaacaaccaaacaaacaaaatggcttttccttgaagagctcaggaggagtctggtttagaaggcagacacgcaagttctatgctactggtctgtaagaagcgctgtgggatcagaagaagggatgacttaatgggtacagagttggtgatgtgtggatgacctcgtgaacgaagactagttcttcaagcagacctgtggaggacaccacagaaaactgtgttgtttgtttagctcttttccagaacttgttatgatctcttaacaaggtctagccaatatcattataagcacgtaaaattcctcatcctaaaccccaccctgaaatcactctgacgacatgtcagccatctgacacagatgtggatagtctgaaagcccaacagttctaatcatttaggttcaattgggtctcaacagagatttttacatgggacttcatgttttacaaattattttagtattatcaatttgatcctttaaggcaggcagaaaacatatttccaccctctactttatagataaagccattgaggctcagagagattttaaaattttactgcaaattacacaggcttctggttttgtttgtttgtttgtttgtttgtttgagacagagtcttgctctgtcacccaggctggagtgcagtggcacaatctcggctcaccgcaacctccccctcctgggttcaagtgattctgctgtctcagcctcttgagtagctgggactacaggcgccacccaccaccatgcccagctaattattgtatttttagtagagatggggtttcactgtgttggccaggctggactcaaactcctgacctcaagtgatctgcccgcttcggcctcccagactgctgggattacaggcgtgagccaccgcggctggtcagattattcaattttaaggtcttacgggccacataacatgattgcctttctaaaagaattatttattcatggaagtctgaagcaagagtctcttgaagttcttttttgtccttgataaaatatttacttttcttgttttatcctcctacgagatccctactgtccatgcccacggcctagattggtctctggccttgagccttacagagcatgctgggtcccagggcttgtcctcaatgcaccacacgcagttggctgatgaactaggacctctgtgtcttgaagtgggagtggatggtaggaagggggagatggaaaagcaggggtacaaggctgatgctggcagcaatgaagaccttggtgattcgtggaccatagtggagactgagagggagtggagagacgaagagaaaccagagcatcattcctgatggagccctgtgttacccccaggctcctttagggcatgagagtgccagggctggaccatctccaggctgcacactttttctctgcagctgtgagcagagcccaggctgtctgtccctcagcatcccctaaatctgcgatgcaatcatagcccctgaatgttagggctggaggcaactcagagatcatccacccacagccctcgctgcacagagacagaagcaatgagatgaagtgactcgtacaagattgcaccttgggctgcaaaattcataccaagtgatccagggaggcctttgaggcattgcattcccaaagtgccttctaaatagttagccagagttatagagtggtgctcagaacaggttgtggacgtttattgaattccatgtgatttaagtgtggttggcgggcagtccacaccaccgccgcgcactgcatgagaaccctgtgtgaagggggcttggggtaatggagcagctgggcccgacccaggtggattcagagtctcccatcactcggagaagcctgcaccttggaaataattcaactccttggtctgacttttgcaagggaaatgtttggggcattttataggtctccatggctgtggtgttttatgacattgaacccaataaaactcgtaatgacacaggatctgccaaggggatcggaccttcccttctggcacaaggaaccattctgttttggtatcccaggaaatgagtggaggaaaatccttgttatttcaagtgaacagggtctgggcaaggtctctgtccctggtcaccttgaccatgtgctacctgtcactgagtctaacggttgctccaattcagctgaaagacaggactcagcaaatagagccttgatctgtccacagggtactcctgtccactgttccagcaaatgtgagaaaacccacttgtcctttgcgagagagaggcaatgctgtcttagtcccatcctaaaggcagaaggacgctaaacaagggtgtttgcgggctacaggcaagagccccgcaatggcctccccgagggatctgaggcccagcaggccatcccaggtctcagaagccttgtaagagcacagtggaggacccttcttgcacgctgagctctgagcagtgaggggaacagctgggagagaggctggggtacaagtgacacagtgcagagatgctgctcccagccgaagctgccactgtgggccttctccatccacccagcccctgtgattgcactgcccccacctctgggctcgagtagcccgtgagcctgctttctggacccatcctggcaagttgctggtggatatacctatgcagcagggcaactacaggcttaggagggctccattccagccctggctgagcatcagaatgggggtgagaggtaaaaaatacagattcctggccctgtttcatactttctgtatcatatgcaggagcccaagaagctattacagtcccagatcatttctgatccaacccaccagtcagcaatacctgctcaaatctaggagtcactgacctcagccccctccccttcctggggagctcccactccagggttgaggcacgcacatgactttcacctcttctggagtcctcccctccacattccccgacaagctgctgctctgagattcttcccctagtctctccacacaggccagcagtcactgcaaacgcccagttgcaatgcaccaagaactttcagggttttgccctgttttgctggttggtgccaggagatggaagctctcgagtggggtgtgctgtcccctgggctgggtggaggtggccacagcagagaaggaagatgggtcctggaagtacaggcggtctgggcttacatcctccctgtgccactcccggctgagggacctcgagcaagcttgacctccgtcagtcttcatttctttacctgtagagtggaggtctggaagccggcctcctgggatgctttgaggatgaccaggagctgagaggtagtgccaggggtcagccatgtcagtggctccacctgagtcctcagggcctgggggagtgtctgggacgaagtaagcagccggcgcacaggggtcctccctgctcccctttaattgcttgcgtctctctggggcattcttttactgtctttggcttcttcctttgctgcagccctcatctggatgcctgcctctatttcccccttccttccattttctttaactgcattatttttctgtctttagaggccagtcacttacctccttaattttcaaagttttgtcttttctaatattgtatcagtgcttaaaatgcaattttccccgccactgtagtgcctcatgtcatatgtgctgcgctgcatgcggggatggcccagaacagcttcctgcagtctgtgttcttcagaacagtggcttcaaacaggaaatcaaacagggaattgctttagttgttcatgaaatcaagtgggctcctgctggcattttaaaaacaaaatcatatagaatagagaatacccaggggcattgcctgtaggaaaggctttgggaggcttttgtatcctggtgtggggatgggtgtgcactcgcgtgcctgggatgtcaggcactgtagatggaacaaaagttcatgcccagatgaactgataagcagatcgtggcctgtacattccatggaataccactcagcctttgaaaggaaggaaattccttcacatactgctacatggatgaaccacgaagacatgacgctaagaggagagagtcagacacaaaggagaaacactgcaattccatttaaatgagtccctggagtagtcccattcagagaacagaaagtagaacgggggtgcgagagcctgacgtctttctcactgacagccacagtaacaaagaacagaaagcccgacagacactgtcgtggatgctcttagaccacaccgcacagtggagacttcacagaccccgagtcctgcacttggtgggtgggtctcacgaccgcccttcccccttgcggtgcaaagaaagttcaccgccctattgctgtctctcccagaggatctttctgacctactcaaggaacatttattaataatctattgagagaaagacaatctagtaggtcttatgcattttctatcttctcccatttttccatgaacgatatctgttatagcagccctgttaaactaactccccgacccagcccccagcccctgacacctgttactctaccatctgtgtcgatgaattgggctactttagggacttcatttaggtggaatcatacagtgtttgtccttttgtgtctggccaatttcacttagcacaatgccttcaaggctcacccatgttgtagcatgtgccagaatttccttcctttgtaagactggattccattgtacatatagcccacactgggcttatccatccatctgtccatggacactggctgctgccacattttagccactgagcaacactgctgtggacacaagtgtacaaatacctgctcaagtccctgctttctgtcattctggatacacacccagaactggcattgctggatcatatggtaattctatgtttaatttgtcgaggagactccatacaggactttgaattttactctgaatgagagggtgacactggggagttctgagtagggaagcgatgtgatgggacctaacatttttatagggtcacagtgggctgcctttgggaataggcaggtgggaggacagggaagaggagagcagggaggagttgctgtgtgtatcctggaaagaatgaaggtggcttagacccggctctcggccaaggcagagagatgtccattcctggctgcctgtggacgggagagccaacagaaatcggggttgcatgtggatttgtatgtgcagaatacgagagaaagagcatgaggaagagaagatggagctgccattcacagcgatggaaattgaccaggaactcacctctggccattttaagtctgagacatttactagaagtccaagtggccacagcacttggtgacattgtcagctggtcctctgacttctaccagccactttccctggcccctttttggcttgagcctcccagctgccaagcacgcctggatgttccagatgttttcaggttcccagagcccttgctgtagcagctcaagccttcctccccggcctcatctgctttccccgtgatgtttgagagcttttctcaggtgtgtgggaggaaacagcatgttgggggccaggagacagccacccagaccttgacaaggcaggggacggcttcagctcccgaagaccctcttgcgttcccagccaagccagaggcttacaggctgctgaacgcacctgaggcagcacccatggtgcagccctggtgctgcaggccaagctcttggtcctgtcacagggagaaagtctatgccccgacagcttgaacctgagtcaagggtcacctttcagagctgaaattgacttcttggaaagccagagaaatgcattttcccatagcattgagggcaccccagccctgtgcccactgagggagggaagggggcttctagaggcatcatcagagcaagatgtgagctggctttgctttgacctcactgtcagggcctgccccagatgccagcactcagagctcactctgcagaagagggaaccgaggctgggaggggcgagagagtgtgcagggtacgcagtgggtgaataagtgagtcaggtagagagcccagttctcctgggccccaggtgtgccagcagcctgcacagagtggccttggcttggcggtctttccccacaaagcatggactctcagaatcagaccccagctgagacgaagcaccagatggattgctttttagacggtgcatcctgttagagcttaggcttcccagagtgaatacgcactttcgtgtgagtttttgcaatgcattcacttttttagaaaacttccctgtagatgcccgctagatactgggttctgattctgaacacagacaccccactgtaggtggattggtggggggcagaagattttaatctttgggaggattgaggggtgtctctctcccttgcacctctgaaggtcactgtcacgctgttgctggcatctcagcatttccatccacttctctatttccactaacaatgccctagctctgccatggccacctctcaccgatctcctgcggtggcctcccatctagtgtcctgcttcacccgcaccccacaatctcctccacacaacagctgcagtgatccctttaaaggtaagtcagctcctccttaaaaccatacaatggtccaacacggcatttggaaagaaatcccaacccttccccagctggtctctgggccctgccctcctctcaccatccctggctgctctgctccaagtgcagggagcctctttctgctctgggaatctgccaagcctgtgcacttttagagccgtctctctgctctgccctctgtgctttgcaaagcctctccttgccactgaagactccagcatacgtcgcactttctgggagaggtctttctcttatctaaatacccctgggcctgtgcgatgattctgtcccgtcatcctgtttgaatttctttgtggcacttacctctcctagaaatcagtggccgtttactttgctagtctgccatctgccttcccctctgctctcctccctgcatcaactagaatatgggctccacggagcaggagctgccagctgtggcctccagcatgttgcaagatctgtctcaaaagttcttgttcaggggataatggattcctcaaaggaaggaatcagaccctctctgggactcccctgggtgctagaggacctcgctaccttcatgtggggctgctaggagccaacactgtcacagcgtttctggacagcaatttggctgtctagaccagaagctccgaaacagttccacggtattgaaccaaagcaatttttcttctgagagcctaaactgagggaaaaattctaaaatgtaggcaataattcatacacaaatattagatgaagctatatacatacatccacatgtagtagggaaatgtcaaaagtggtatttactattagcttgaatgacattaaaaaggtttatggtacagtattaagtaatatgaaacatacaaaagtttatgtacagcatcgtaacagttcatgcttatttagaggacttgtgccagtcaccacatcgagaactttatttacattttctaattctctgaacaaccgtgtgaggtagttattatctcaattgtattgactgagaaaatgagacatgaacagatcaaggaagctgacaaatatggcgtagtttgtaaactgtaatgtgaggatttgaatccagagcctctcactccaagcactccatttaaactctactgtatgctgatttgagtttcataaacaacttgaaaatgtgcatatcccttgccgcccccactatcagaaagactaagaagaaatacaccaaaatattcacagagattgcctctgggtattggggttctgggaaacgttttctttataatttcctgtatttaaatatttttctgtaaagagcacacatcattttcatgtaaagttttgaattttatcaaaagattagtagtcacacacaaaccacagataactttggctaattaatatagagtcaaaaatacttctataaaacaagctatttcaatcaaacatgatgtttaatatgattaaggagggctcattccactgtgaaaagacaacttagcattaagaaccacatagccaggcacggtggctcacaagtgtaatcccagcactttgggaggctaaggtaggaggatcgcttgagcccaggacttcgagaccagtgtggtcaacatggtgaaaacctccctctataaaatttacaagaactagccaggtgtggtggtgcatgcctgtagtcccagctacttgggaggttgaggtgggaggatcacttgtgcccagaagattgaggctgcagtgagccgtgatcatgccacacacttccagcctgggcaatggagcaagaccttgtctcaaaaaaaaaaaaaaaaaaaaaaaaaaggaagaaagaaaaagaaagaaaagaaaaggaaaagaaaaaagaaaaaaggaaacataatcaaaggcatccctgtaaaagcttgttgtaacctaaagaaaaaggaaacttcctagatatcttctgcaagcctatagccagattcagaagtgagagacgcctgctaacattgagataatttaactttgttttgggaattcttgccagtgtaatacaacaagaaaaggtaatacaacatctacacatttcgaaaaaaggcataacagatgatctgtttgtctttcagggaaatctaagacaagtaattgaaaagctattagagctaataagagaactgaaatagacaaaaatcaatagctttctttttttcaacaataacattagcaatgccaattctccaaaaattgtatataaatttaaatttaatgccaataaaaatgaatgcaggaattcatagcttgtcaaaattatagccttaagttaaatcagaaaaatgaatgagaaagaataatgaagaaaatcttttaaaaaagaactgaaactgtatcattaaactggagtaattaatttatgtggttctatgcaggaaaagacagagtccagaaataggcccatgattatgtgggaattgagtaagtgataaggaaggcaattcaaatcagtaagaaaaatggcttttaaaaaatttattatctaatatttgatttgtcaagtcattaaataattatctataccctaaagatatcctgtattttttctaaaagatttaattttcacctttgatttacaattaataaaattttttcttgagacagagcctcactctgtcaccaaggctggagtgcaatggcaccattatggctcactgcagccttgacttcccaggctcaagcaatcctcccatctaagcctcccgagtagctgggactacaggcgtacatcaccatatccagctaattcttctaatttttgtagaggtgaggtcccactctgttgctcaggctggtctcgaattcctgggcttaagtggtacgcccaccttagcctcccaaagtgctgggattgcaggtgtgagccactgtacctggaccatatttatgtctttaatcaatttggattcaatagtcaagaatggttgagcagtaaggccacagttttatgtgaagaaaaaagttttctcagcctcatttatcgagtagctcataccgccctggagacgcacagtgcctccccggcatgtgcatgagggtccgtctgagactctccgttcacttcctgttctatttttacactccctggtccgttccatcttcattactgcagcttttagtaagtgtggacatctaggaggggactcctctctatcttggttttttttctcttcatagatatcttttctatttttgagccttttcttatgcataaaattttgaaaaccagcttgtaaagttcctcaaaaacaccctttggaatatagattggaaacacatttgatttttaagtaatttggagagaatatgcctcttaatgatgagtcctcctaatcatggtaaatccatctttccttctgtttaagcccttctttaacatcgttcagtaaagtttacgtctccatacaagtttgcacatattttattaggtccatttctaggtaaattatgtgtttagttggcattggaaatgagctataaaaaaaaactacatttttctaaatggtcaaaatatatgaataggccgtatacagaggcaaagaatccatataacccatgagcatctcaaatataatcaagggaaacaaattaaaacaaaaagatttaatttattacctattccactagtaaaactaatgtttgacaatacgagttttggtgagaatatggggaaaatgaaaactctcaggtattgctggtgggatgataaatgggttcgatcgctttggggagtgttttgggaacccatagtgccactgagggaacatagcccactgccctgtaagtccataggtaaattaaatatctaaattccctgtgttgttcagagaaactctcacatatgtgcaaaacagggaatgtatgaggttgcccatcccaatgcatttcatcattttgaaacagtgtcccttagaaaatgaatgaataaaaggaagtttattcacttaatagaaaaggatacagtaaaaaaaaaaaaagcactgggaatctgtgtattacaacaaacaaatctcaaaaacacatatttctgaaaaaaaaagcaagttgcaaaaaggttacatacattatgaagccatttttaaaagtctaaaacatacagagtagcaatatatattgtttataattgcttatacatgtcgtaaatgtccaaaatcatacatggttaacacctactaactccatgatcattattaattttggagagaaagagaggagaaaataatgaccaatctttagttgtatcttcatatctggaacataaaaagagagaggaaaaaaagagaaggaagaaagtgtaccaaaatatgaatatctgtttgatcttagcagtgtcacattattttctgtttttttatacatttaaaatattcatagctagtggtgaaaaaatttcttaaatagttgtatatttctatcatctaggagtgaggaagacatttgcaagtgtgaacgacacaggaaagattaataggaaagattaataaattgactaggtagaaatgatagcttttactgcataatacataccatgctgtaatacataatacaaacacaaagttcagttgggcatggtggctcacacctgtaatcccagcactttgagagaccaaggcaggaggatcacttgaagtcaggtgtttgagtacagcatggcgaacatggagataccccgtctctactaaaaagacaaaaattagcgagcatggtggtgggcgcctgtagtcccagttactagggaggctgaggcaggagaatcacttgaaccccggagaaggagattgcagtgagctgcgatggcgccactatacaccagcctggatggcagagcaagactccatctcaaaacaaacaaaaaaaattagtaagttaaaaagcataacctaaattaagaaaaatatttacatttatgacattaatgtaaaaattacacatatttatcacataaagaggtcttccatatcattgacaaaatgataaataccttaatgtaaaaagtggtagaagacgtggatgatcaaatcataataagagaaacacaagtggctaataagtacatgataaaatcaatagaaaagtaaattaatactatgttgttcatcacttttcactgagcagattgacagagttgttttttttttttttaatttgttataaaccattgtccagggactggagaaatggcttccttcatcacggtgagaatgtaaaccagtcttacctttataaacattaatttagcttcatagatcaagatctttaaaaatgtgcatattcttaaacaccataattccggttatggaaacatagcttaaaaatattggacaattgaatatttaccttacaacaatgtttactgtgggtttatttataacagccaaaagttgaaaataacttatttgaccattagtgattaaataaattaatggtaaatttgtacaatagcatgcagttattcatatggttcaaaattacatttatttatatataatttatactgtactgttcacagaaataaccaagttatgacacaatataaacagtttggcccatttttcaagactatatgtatatgtaacacctttgaaaatgcatacactgaacattcacaacgattttccattggtggtagggttgtaactgattttttttcctttgcgtagatgagaattttctaattttctacatgtgcagtacttgcttaataaaaaatgagattgaaaagtaaaagaccacttttttgtaagccagctcagaaaggatgaaaagaataataacccttgtttaagaaagtacagggaactacatacttccatactgctgtacgaaatgtctgaaggacaatttgccaaaatatatcggaagacttagaaaggttatgtatgctcttgagcgtgggaatcccacttgtgggatttttaacctcaacaaaaattaagggaagatatgaggaaagagaaagggcatgagcaaaggacatttttgcagcatgtttatgatcttgagaaaatggaaacagctggggtgtgcggcagaagaagtggggaaaatgacaacggttcattaaacctcacgatcagatgctgacagcccctcacaggttgctgcagacaaaacagggaacgacaggaaaaagatgaccgtgatacgctctgctaaaagcaggtcgcaaaacaggatgtagataatgatcccattttgcttttttacaaaaaaaaaaaaaggccatggaaaattacatatcacgaatgttcagagtggctgtctctggatgatggcattggagttaattttatctttcactctattttctgaatttcctatatcaaaagcaaattgatggtgtgaaggggaaagcatatttaatgtgattcctaaaaggctcagccctccctgcatggattgagcactgaaagaagagggttctgtcacctctttcgtgctgacccttgccttttctaatgttgctcagaggcacacagacgtatttgctttaagtaattgcttgtctgtttttaatatcacattttgaaaaggtatttagacaacatgagtttattactttctgtttaacccaaatccttcagaggtacttaaagcaaaatgtaaagtcctcttatccctttgtgaatttcagtccccagaagtctcactgttagtagtttgatttttaccaaaaatgtccaggtattttcttttcatctgcaaatgtgttaatagactcctttttttaaatttcacacaagcaggattatatcatacaaaacattctgcaatttactcttttcatgtaacaataatgtatcctgggtatttttctttgccagttcagatctcttttatccttttactaatttatttacctatctattcatttgcttaacttgattttattattatacaagttatccatgaatattgttttcaaaaatttaaacagtcagaaaaggtataaactgaaaactcaaaagttcgccttccctgccaccactcatgtgccctcctcagaagcaaggaatggagcagcttttgtggggttttttgttttttctctgagacagagtctcattctgccgcccaggctggagtgcagtggcatgatctcggctcactgtaatctctgcctccctggttcaagcgattctcctgccttagcctcctgagtagctggaattacaggcacccaccaccatgtccggctgatttttgtatttttagcagagacagggtttcaccgtgttttcattagagacagggtttcaccatgttgcccaggctggtctcgaactcctatcctcaggtgatctgcccgcctcggcctcccaaagtgctgggattacaggtgtgagccaccgcacccagctgcagcttttgtttttaaacattcttttcattacagttacaacttcaagaaatactaatgccaatatctctgagctaaatacactgacagatgcagaatgcacttcatcatgctgtctcttttcttacctggctttcacctgcacactcccctctccatttcctagatttttatcagctgttttgtatcctagtgattggctttatgactttaaataatatatttaaatgtttacgtctcaattcattagctttaggcagtatctgaagttaacacctgctcacaaacactgctttcaaattcacatcctacttttttgttatactgttatttttacatattaaggcttatcatatatatattctggctggacttggtggctcatacttgtaatcccagcactttgggaggccaaggcgggtgggtcacctgaggtcaggagtttgagaccagcctgggcaaaatgatgaaaccccatctctaatacaaatacaaaaattagctgggcgttgtggcacatgcctgtcgtcccagctacttgggaggctaaggcaggaggatcacgtgaacctgggaggtggaggttgcagtgagctgagactgtgccagtgcactccagcctgggggacagagcaagactctgtctcaaaaaaacaaaaaattatattctgttgtgttcagtgcttatataattttactgtgtttcatcagtaggttagtactcaaaactttttcagttgaaaatcaggcactacaataatataactatgtaaattttgttctgtagaattaagtgggataattgaatacatagagaaggccatctgatactatgtcattaaaatttgccatttgagggagaatttcccaaatatcaaggttttatgaagcctctttcgttttcttttatgtgcttgggggtcacactcggctatccttatttcttataactcatgtcattcttatttgcagtttcgttagaggacgtcctagtgtcgcttattctttcctgtacgtgcatgctcgcaaggggtctttcactgtccttaaggcttaatgtggacgtctagacagcaataagctttttctaccagcttacaaaactcaacacaccaaagactatacaaaactccatacccttcaatggcttgcaatgctctttttaaaagtcacctctaagggggtgtaaataacattccacaaaattcacccatttggggcacaattatgcatttttgcaaatatatactcttgtataaagtccaccacaatcaaaatggacaacattttcaccaccccaataagtttcctttagccctttctgttcataccccttatgctacctccaaccactgatctactttctagaaccatagctttgccttatctagaatttttctttctttttttttttttagtggggaaggagtttaattgacataagcctagcccacacaggagaactgagttgtcactgaaattagtctccccaaaggtgtgaaggtcaggacttttatggacaatttggtgggcagggtaatagataatgggtgttgctgattgcttgtaaaagaaatcgtaggggtgtggaaaattgcccttgtgagtgagtactcctttgggtggggccacaggacaagttgagtcatgagttttgagtttgggtggggtccattggttgccagaatgcacaagtctgggtgtaaaaaaaaaaaaaaatctcaaaagaccaatcttaggttctgcaatagtgatgttatctacaggaccaaatgggggagtcagaaatcttgtgacctctggccacatgactcctgagcagtaagggattacagaaattatgcctacattttagcagaattcaggtccccccataatcctgttcttgtgggctttcttagtcttacaagggtgatttttgctccctgagcaaggagggggttagttttggggagggactattatcatccttgctttttctttgagacagagtctcactctgtcaccgaggctggagttcaatggcgtgatctcagctcactgcaatctctgcctcccaggctcaggtgatcctcccacctcagcctcccaagtcattggcactacaagcacatgcctccatgcctggctaatttttgtattttttgtagagatggagtcttgctgtgttgtccaggctggtctagaactcctgagctcaagtgatctcccaccttggcctcccaaagtgctggaattacaggcatgagccactgcacttgatgatcattcttgcttttaagttaaactataaactaaatttcttccaaagttactttggtttatggccagcaatgaccaaggagagcttggaggtcagaagcaagatggagtcagccatgtcagatttctcttactgtcataattttgcaaaggtagtttcaatccccctcacacacacttgggcttcagcacccctcaatcctgaggtgttagctacggagatgagaaaaggctaatgattgctctaacttcttcctgctgacagggggcatatttgggggaggggttgaccccagggtaaaaggagtggaagtgtcttgcagttgcctgtatgtattcaagtgcaacttgttggggtccaacatgtgtataacgaaaacattggtgctcttatccacagatttagtacagcatttaagaagaaaaataatgagccgtaaaaaggaacgagattatgtcctttgcatggaagtggatggaggtggaaggcattatcctcagcaaactaacgcaggaacataaaaccaaacactgtatgttctcaattataagtgggagctgaacggtgagaacatatggacacacagaggggaataacacacactggggcctattggggagcgggaaggagagcatcaggaaaaatagctaatggatgctggaccgaatacttaggtgatgggttgataggtgcagcaaaccaccatagcacacgtttacatatgtaacaaacctgcacattctgcacacgtaccccataacttaaaatttaaaataatagtaataataataattagccctaatataaggagtgaaagtgtaaatcgcccagtgggttcaccttgcccgctgcctagacaaagccaatttatcaagacagaggaattgcaaaagagaaagagtaattcacacagagccagctgtgtggaagaccggagtcttattattactcaaatcagcctccttgagcattcggcgatcagagtttttaagaataatttggtgggtggaggaagccagtgagtcgagagtgctgattggttgggtcagagatgaaatcacagggagtcaaagctgtcttcctgcgctgagtcaattcctgggtgggagccacagatcagatgagctggtttcttgatctgggtggtgccagctgatccatcaagtgccaggtctgcaaaatatctcaagcgctgatcttaggagcagtttggggggtgggagatcagaatcttgtagcctccagctgcatgactcctaaatcataatttctaatcctgtggctaatttgttagtcctacaaaggcatctagttcccaggaaagaaggagggttcttctggaatgcgctgttattgtcttcatttttaactacaaactataaattaacttcttcccaaaattagttcagcctatgcccaggaatgaccaaggacagcttggaggttagaagcaagatgcagttggttaggttagatctctttcactgtctcagttgtaattttgcagcggcagtttcaaaagtcctagcttcaggagtccctgtagaactgacctgaagcctcaaggaatccaggtgaataaccccaaaaatcaaccaaatatggggtcatcagcagaagctcaagaacaatggatgaggctggaatctaataacaggtgtgctgtagctgttttgaaacataatttttctctctccagtttatttttactaaagacaagaccaatttatttgcaaaataagcttgccttattatactttgcctaattatttacataaagtgcagcaagaataattattggccatataggctctttttttctaactggctttgctggaatttttttcataaggaatctcagattagaccttttaaaagtctcttgagcccagccaaggatttatttgtgcctgcagatacttgtatgaattgggtgaattcctttcttcttgaggtcccaacaaagcttggagttcctgggcctgtcagaaagtgacattctttatttgccacaggtcgggaatcctgtacaggacaaggtaggaggtcagttcctccaaggggctttcatcatctctgtaggtcagcctcgatttcttaaagcagtctgaaaatatgtcatttcagtcaaagccttggtaaaataagcagtgtctccaactgtgtcttgctacaaaagaaaacacattcttattgaacttactcaagtaactatattgccttatgttaaaaatactcacaaataatttccaaattctggagaaggcaggtaaagagaaagaaatatgctctaaattttgtttacaggagtatattttgctcaattgttaaaagttgtaaatagctcagtagaagttttctttactctgaaaaacaaaacaaaaagaatcagcaacaattttaagtgaaaagtcgaaaagatttttccagttactgaatgttttggttgtttccagctgggagctaattaatatgagtaacaatgctaagaacatatatgtcaagtctttctgtggtcatatgtttttatttctctttgataagcaacaagaagtgaaatatctgggtcacaggttaagaagctcccaaattgtttcctaaagttgtttcgtttcaccttaccatcagcctcaggtgagcattctagtttctccatatgcttgccaacacttggtatgatcggtcatctaattttagcatctgggtggttgtgtggtggcatttcactgtggttttagttgccattcccctaatgactgacgacaccgaacacctgttcatgggtttgtgtgctgctcagctgtcttctctgttcaactgtttgttaaattgaatttttggcttcttttatagagtttaaaagttaattatatattctcatatagatacatgtttttcaaaaatgtcctgcctgtctctgatttagctatttcttttcttaatggtgtttttaaagtgcagaagttcttaattttgaaaagtctaatttatcaatttttcttgtatactttatgatcttctattctaagggaataatctattctaagggaatagaaggtcacgtttgtatgcttctgactcatattctttatatcctttgtgacaccaaggtcacaaagatttccttctaggttttcttctaagaatataatgtacctctttaaagcagcttttaagattgtttttatttatcattggttttcaacaatacgattataatgtaccttggtgtggttttcttcatacttggggttgatattcttgagtcttcgggtctatagcttctatcaaatttggaatttccatttttggtttctttaagtttcatagtctttctggtagcccagttacgtgtcttctgactgcgtgctaatttctccccagtcactgatgctctgttgtttatgttcacctttttctccctgtgcttcactgtgggtactttcaattgcagtgtctccaagccctctgaccttccttctgcagcacccaatgtactattcatcccatctagagttttggttgtttgtttgtttgtttttgagacagagtctcgccctgttgcccaggctggagtgcagtggcaccatctcggctcactgcaaccacagcctctcgagttcaagtgattcttctgcatcagcctcccaagtagctgtgattacaggcacctgccaccaaacccagctagtttttgcatttttagtagagatggggtttcaccatgttggccaggctggtctcaaacccctgacctcaagtaattcacctgcttcggcctcccaaagtgctgggattacaggcatgagccaatgtacctggtcatgtttttttttccttttataaaaaaattttaatatttatttatttatttatttatttgagacaaaatctcgctctgttgcccaggctagagtgcagtggtgtgatcttggctcaaagcaacctctgcctcccaggctcaagcaattctcctgcctcaggctcccaagtagctaggattacaggcacgcagcaccatgcccagctcatttttttttttttttttgtatttttagcagagacagggtttcaccatgttggccaggctggtctcgaactcctgagctcaaatgatcctcctgccttggcctcctaaagtgctgggattacaggcatgagccgccacttctggcctctcttttttcttaatttcagatattgtattttttttaatctctaggagacccatttaatttttttatgtcttcattttctctcttcattgtcttattgctttcagttatatatttgaaccagtttatatatttttgtcatttctgttttaaggcactagtctactaatatcaaaatgtgtgcaatttctgctcatgttcctctcaattaacttttctcctagttgagagtcatgtttttctgtttctttgcatgcctggcaattgttactggatgacaggcactatgagtgctgaatatgattagtgagcgctgaatattatcgtgtttctttagagagtgtcacacttgcatgtggcacactgttaagttacctgtggataaaattggtttttgaataacagttctgtgacttactgtaccttcagcaagaccttaagcctcaaggagcctgagtttcttcatctgtaaaatgggaaggtatatgtctgctgtcagggctacatataatacatgaaaagcatgcagtaaaatgcccagccttgagtcagaaggtgtactaggcactgtgccagcatcattagtattcatgttttatgtgataggcaaatcctgcaaccgttttatgagttaattttaaatctctgcctctctagcaggacatctgtgtctctagatccactcagtaattacaatcaacccaagcatgttaaaggcctgagaccttttcttttctttttctttctttaacattttccaatctcatgtttgaaagcataaaagagaacctttcagtctaaatgttctcctgcaccctcaaacccgatggaggtgcttctcactgcacgctcccttcttacacattccacctctgggttctgccaaggaaacattggagaaacagctccaaaggattgaatgatgtccagggccttttaagagaggttcaagtcgtgaccagatgtgtatctgggtaagatacgtgtgaacctccgtgggaaagaccaagggtttgaagtcagagatgtggctcaaatctctcttctgtgcttcagtttcttccctgtctgccggaggaggaggaggaggaggagaaggaggaggagaggagtaggaggagggggaaggggaggtggaggagacggagggggagagggagggagatggggagggggaggatctatctagtttacagggtcctcatgaggctcatgtgggaaaatgctttgcaggctggaaagtaccacagaggtgtgagttattataaaaagggaagttatttccctctgtcaaaaagctatgcagaaatatactaatatgtaagaaatgtttgtatggaggacagaaataattcatttcatggagagacaagaggatcactggcagtaaaactgcaggcattatttatgggagactcaaaggagggaatgccccgtgttggcgggcctgcctttcaatccttgtcacaagtcatgatccagaagctcggccaattgaagaaagggtctccatgaagtggagctcatgacctgcctgcatcagcatcactgggggcattttttaaaaatgcagataccagcactgctggggctggggttgggagtctgcaaactcccctgctggttaaaatacaaactgaggtttcagaactattgtgccaaagaatcataactgactccattgggaagtaatgacccatgatttgatttctcatttaatttttcaaaatgcaaacaatgcaaaaagttaaaaattgaaaaataggttaaggcccatagtctcatcaatacaagacacaactgtagttggattaacattttggcatattgctaacatattttaataatcactactgtgagagttttttaaaacataaatttacatggtgttccccccccaaaaaaattcactcacataaaggaattttatccgtccccagaattacctaatgaatttcaagcttctctgttagcagaatcaaatgtaggtgactcgataaacaagtgtctgtctttgacttaacacagctttataaaaatgccttcttccttccttcctgaaggtctgctcagcaccctcaaactttttaccacctgaaaatcttttctatcaattttaccacaatggggggaggtgaatttccacaaaagatcttttcactttaaaaaattgaaatggccacataatttctcctcctaactgtgccgaagtacctaaaagtcacaggttggcattgctaggtcagccttttgcaggggccacacgtgcccaaggcccttacacacccagccaggtgttacagagcagcctctcaccatcaggctctgtgctagtgctgggaaaagattctgctggcatttaaaagtattgcacaaggaggccagatgcagcggctcatgcctgtatccaacccagaactttgggaggctgaagtgggaggattgcttgagtccaggcattcaagaccagcctgggcaacatgatgaaatcccacctctacataaaattgtttaaaaaattagccaggcatggcagcacgtgcctgtggtcctagctactcgggaggttgaggtgggaggatcacttgagcccaggagttcaaggctgcagtgagccatgatcacgcctctgcactccagtctgggtgacaagagacagacagatgaatgaaagaaagaaagaaagaaggaaagaaagaaagaaagagagagaaagaaagaaaaagaaaagaaggaaaggaaagaaagaaagaagaaagaaagaaagaaagaaagaaagaaagaaagaaagaaagaaagaaagaaagaaagaaagagaaggaaaagggaagggaaggaaggaaaggaaaggaagggatatattgcacaaagcattagctgtgaatgactgtagcacacactctacaatccagcaatggaaaagctttgttttctgaacgtgttttctatcttcatgtgtttggaaaaacacctatttctgaaatactacccaaccctgttgggagtgtgcctggtatttttttctagtgttcccagtttctcatcctttgctctttcaactcccaactaacaagtgtggaaggactgatggaatcagagcacgcccattttgtaaccactaatgggacttttaaatgtcggtgaggaacttgtcaatggaggaatagggatgcctgagcctcgacctatcttagcatcactaaaatggtgcaggtaaacactgtgagcctcctggtaggatgcaacatggagcacagatcacctcctcgacagcatctctaccaagaggggctgagcttgaatctaatggagcctacagaggtaactctatgtgtaagaaggacgagagggaagagcaagtgatgaaccatcacaaggacgcaaaatccaaaatggagaacattctataggactggcctttacaaatcaaaggcttgaaactaaccaaagtcagagcagaagggactcctgtttaaaggaaacctaagacgttgagttatatacgaaccttgtttgaatcctgagtaggacaaactaagcaagaagctatttttaagtcaattgttaaaatgtgattatgaattgggttcaatggctggatggttagatgataccatggaaatattgctagttttgttagatgtgatgaagtaacattggggttatgtgagcaaatgtctccatgctttagaaacaaatgcaaaatatggggtggtgaaatgacttgcttcactacattgatttcatgttgtttccaagtttcattcatttagaggaaataaaacgatatgatgtaaaatactgcaacccagaaaacaattttaaagataattattgaatgtgggtgatgagtgtagaagagttctattattattaatattattattttatttatttttttgagacagtctcactctgtcaactaggctggagtgcagtggcaggatcttggctcactgcaacctccacctcctggtttcaagcgattctcccacctcaacctcccaagtagctgggattacaggcatgcgcctggctaatttttataggcacgtgcctggctaatttttgtatttgtggtagagacggggtttcaccatgttggccaggttggtctcaaacccctgacctcaaatgatctcccacctcaacctcgcaagtgctgggattacaggcatgaaccactgtgcctggccaatattcttgactttagtatattttggaaggtttcataaaaaatagttttcatctaaaaaaatctgttgtagccatccttctcaggtctggctagcgttttctcccaggtggaagtaatttctttttgctgagctcacaaaacactttacccaggcctctctttggtacagaatcatgcccactctgaactgatggaatcgggtgcatgcctttcctccttattttcctgtgagagtgggctccatccttgtttcatgcctgtaccttccgctatgcctgacatagttcatggttgacagcaactgaatgtctgtggctgaatgaatagaagaacctcgttgctaggaactgttatcggggctgtttcaggttcacatgtggagaggtcagtattagggcaaaggtgaggaagcctcatttcagtggtgttgtcctgagttgagacatgaaacatgaattttaactcaaattctttggccccttctttaattcagagccataggccaatcaccgtactttcttcatttacaagatgagtatagcattggtggtttgtactgggagaatttggaattctggatgttggtgagatgctccatatgggatctcatgccggcagctagcatggcattgtgatcgcgacacccagggtgagtcccagctttgccagtaggtacccctgttctacctggatgctacccacctatgtctggcaggtcaaatcagaaaggcaaagcctccagcacataacatggcaaggcttccagatacaaaatagcaaaactattttgccacaggggagatgatagggaatctgaactgtcccctccaagggacacagagcctcaggcagggccacaggtgcacctgttttgtgcagagggctcaagcagccctggagacagtaacaccctccagctgccagctctgccaccttcagcatgaccttaccaagccacctcgcctcgccttcttcagtggtaaaatgaggataactgtaaccaatttatcaaggctaacatgtattagaaaaaaagaaaaactcgttatccgtcaagtgcttttcaaccatgtcatgctagccaagtgcaaataaggggtttctagtttctctatttttagttgatgcctccaccacaccccttgtttgactgaagctgtgtttcaggctttgagcatctcccaaagcaaacattgactgccctgctctggtgaaagtctgcattagagggcctagctggtttcaaataaacaaacaactcccctttcccacttcccctcctcttgctgactcccccgactagacacacatgcacacggtgcacatgcatgctctctcacacatgcatatacacgtgcacacatagacacacacacacatatatacacacacatattcaagcacatacacacatgtgtattcacacgcatgctctcgctctcacacacacacaagtgcacataagtgtgtatgcttcctctcccactctctcacaaacatacacagactcacacccttcccacaatgcagcaaagccatctggagccccagccagtgtgtgatgcgttttgcctctgtctggacttctgcacttcctggcttcacccaacctgaaactgctgggtgcagcccgagcaccagtgacagccctggttgtcccatggcctcttgaggaacccaggtctccagtcaaagccactggagtagggggacccatagagacctgaggtactcatgagacccatggaaaatcatctgcacacacactgctaaggagtcaaaggacagaagtgtaagtagtgggtcatttaatcttaggaattttactttctgtccggttctttgttcaataaattgaacaaccaatgttcaattatgttgtctcagtggacacaggtgtttgccaggaagcttaaagtcaatggcaatatggctggccagactaagaaagacaagagggctggtcacctgggcagatgcggaagtatgagtccaagtctggggaatatactaggagctgctgaccactggcccttcgttgagtcagggaggctgagagaggccacgaaaggcctgaggttcaggcagccctggctggccacttaacggtcattgtcaagaactgcaggctggccctggctccaggccttatgctcctctgttgctgggcaaatcactcaaatcctccttttatttttctgcttgtatcaataatatatgcttagtattaaagaatttaagaaatatatacaattaaaagaaagaaagtcaaagtcacatgaagtcttataatccaaaatccatttagaaaatactttggtgggacctgctttgcattagcacacacaccgttttttaagtccgctggttttttttttgttttgttttgccttacaccacacctctgttttgtactctcccttcctctaacaataaccacagtaaacaacttggtgttcatcctccccagcctctttctgtgtaatatgcaaacatatctacacgcctgaatagaggtttcttttcatttggtgtttgcaaatatgggattccctcatgcacctctttgggtcttacttttctcgtgtaacaacatggtaccgaaattcctcttgacctcactggtgaagatccagcacattttttttagtagttgtatgagagatttatagagtgtagatttattcaacaagtcttcaattgctgggcagttacattgttgttttctgtttgggattttttttcgggggaggggattgtttttccaactattactacaacaaacattttcatctctcacatgtgtctatataatgatgttttattaacctgagatagtccagagtgggactgaaaatcaaaaggtatgtgtgcttttttattttaacagaatttaaaagattgccctttaaaagaatttaaaagattgcttcttccaataatatttcatgttttgtctaataaatatttattaagcccacactctgtgccagacattggtttagcaatttggattcagcaatgaataaaacaaagattccagctctcacagaagattaatcctagaaatggagcgtgaaggaacaaatgaaacaataattataacaaacattttactatttgggtttgtgttgcactaacttcctatttcttatctttacacatttttctattgaatgaattatatgctgcaatatacttcctgtcaaaagtttatgagctttgtatatattatgaatacacatttatctgatgctttgcaatctcttacccaatctattgcttatctacgaacttcatgagtagtttcttataccatctaatatttttaatgtttatgaatttgtactttttttgttctctcttcgcttctgggtattttatctttgttagtagttgtctccaaactctgggttatatacacagtttcttacatttcttttaattacatttttgttttttatttttttcagtcatacacctagaatttattttttaatatcatgtgaggtaggggttcaattgtattttccttaaggtaaatagtcattttcctaataccatttattaaaataaactatccactttctactgaattaaaatgctatctttttcacatacgcgattcctgtatttaccaaaatctgtttgtatgttttttattctgctctgatgattgttgtctacttttattattccaatttcatgcggttttgattacaatcttctatttcataattataaagctaggttaagacttaatttagtcatgtaaagcttcagatgattttatgcaattacaaattataattttaattaaaagaacattccatttatattaggaacaagaaaaacatcacaatcaaaaaagagaacagagtataataattacaagacaatgctacataaaactatggcaacagattggaaaatgtagatgaaattaaagatctataaaccatataaatcatcaaaatggcacaaagaggagaaaaaatgggaatagatcattcctatagaagaaattggaaatgtctttaaagatttactatttgaaagggccccagacacagatggcttcacaactgagttctatttagcctgtgaggaacagataaccccactgttatgaaaccactcaagaagatagaaaaaaaaaaaaaagagagctcctcaatatctgttacaaagccagcgcaccttaatgctaatgcctcatagacaaatctcccttgggaatacagattctcattctaaataaaatattagcaaatagggccgagtgtgatggctgacacctgcaatcccagtactttgggaggctgagatgggcaggtcacttgagctctggagtttgagaccagcctgcatgacatggcaaaaccctgtctctaccaaaaaataaaaaatttagtagggcatggtagcacatgcctgtcatcccagctactcgagaggctgaggtgggaggatcaccttagccttgggaggcagaggttgcagtgagccaagattaggtcgtgggactccagcgtaggcaacagagtgagacactgtctcaaaacaaaataattagcaaataagaatccatccatgtgccaaatagactaatatgctgtaatcaaatagtatttttccaggaatgtacagatgtttcaataacagaaaatttaccaacataatttattacattgacaaattaaaggtgaacatacatcatattgatcgatattgtataggcacctgctaaaattcagtagccagccgcaatacaaacccatcgtctctctctcttttttttttttttcgagatggagtctcactctgttgcccaggctggagtgcaatggcatgatcttggctcactacaacctccgcctcctgggttcaagtgattcttttgcctcagcctcctgagtagctgggattacaggcctgcaccaccacacctggctaatttttgtatttttactagagatggagattcactgtgttagccaggctggtctcgaactcctgacctcaagggatctgcccgcctcggccttccaaagtgctgggattacaggtgtgagccaccgtgcccagccaaacccataatctcttatccaaacttctgaaaccctaaatctctgaaaactgaagtgatacttgtaaccctggcactataattcacttagtggtaaagctgatctgagctcacataaagaaatacttagatataaaaagtgttggtctttaaaactgtgaattattatgtgttctgtatgtaaggcatacttgaaaaaacatacttgtgaatttttcgcttctgtggcttgctgtcctatatcgaaatttgttatagtgttttctttttcaaggtgggtttgaggagcaatgacatgaggaatgtgctttcagctctctggaagaaatgcatgactgtgtttcacttaatcgaagacgccactgataggaaggctagcatttaattatgtatcactaaaagagaaaaaaaatgctgctactagttatactgcaaagcatcctccattgtgagacacctcccagttcagagatattgaaaagtgaaaaaaggtccatcttagaattgatgaaatatggtgtgtacatccaaaggaaatcaccactaacaacacgcccttctgacacgcgtggggacttgggtgcttcctctctatgatgtctgcatctcaaggaagagcccgatgtaagtgcaggagtgcagtggtctcaggtcagactggactccagagctggctctcacgggccagttgtttgaccctgagcaaactccttaacatataaatagcagcccctggaatgaggatggtgacaacatggtggtgttgatggtgtcaaaagggcctgtcccacatctgccatcctaaaattctttaccaaagaaaaaaacctgaccacatcttcccccctttaaggagacccctgatattactgtgaggccacagctaggcctcgatgcctgtgctatcaatctgtcctaaatgtatatagtgtctcacccaaaaatctgagagggagagaacgttagtcatcttctaacaaagcccctgctgtttaccaaagagctaatgggtcggagagaaaatgtcactttcccaagtgacacagccagagacaaaatgaaaactaaacccagagccccagacacattggtgggctctttctagaacaccacgtggcctcccgctcaggctcctgtcacctgaggacctggatccaccccagtggtttccagcggttatctccagccagaggatttctgtgtcctaaatgcagtgctttctgctgtatgggcccccgaaaaaagatggacacccatttagctcacccacccgcttctacccacgttctgactttgaggtctttgctgcacccacttccaccccacctttctaaccagcctcccggaaggggccagggatcccctctgtgcagaggatctgaggccccgctctctcatgtcctctgtctgctgtgtgtctccgacaggatggggctggtaagtagcaaaaagccggacaaggaaaagccgatcaaagagaaggacaagggccaatggagccccctgaaggtcagcgcccaagacaaggacgccccgccactgccgcccctggtgagtgattgcccacccccaccaagagcagattacttacttctcctatgccttaatgtccaagtttgtaaaatgggtatagcaaaagtgccttcctgatagggatgtaacgatctgcaatgtataagcaggtgtgccatgcaatataacacgcacaggacccggcctggttagctcccaataattcttagccagagctcatttctcgagggcagccttgaaaagaaaaagaaatgtaaaaaggtcagcttggggagagggtgtcgtaaggaaggatccgggtatctagctgcagctactacctctcttctccccagcagctcctggagacccttgtcccctatgtggcattgctgctggcattccaaagagcctgctttcctgggataagcatcatgaaacaggagggtgcctgtcctcacctcccgagcaggctcttaagttttcctggaatcccatgggcattttaaatgaggaaaactttccaaaggaaaaaaaaagtgaaatttcaagtgaaaaggtcttattgctggggaatgcattttcctagtcatgcagtttgatttgtttataaaacacttagctccttttgatggctacagcatgtctgaagatgcatttttttttttttttgagacagagtctcgctctgctgcccaggctggagtgcagtggtgggaccttggctcactgcaacctctgcctcctggattcaagtgattctcgtacctcagccttctgagtagctggaatcacaggcacacatgccaccacacctggctaatttttacatttttagtagagacagagtttcaccatgttggctagattggtcttgaactcctgacctcaggtgatccacctgccttggcctcccaaagtggtgggattacaggtttgagcatccgtgccgggcctgaagatacatttttagatgattctttgtgctctctccactccctgaccagtgacccccttttggtttggggcagttgggagccttgccgcgaccccctctcctgtgctgtccacatgtccacgtggtcatctctttatcctaacagggacctgatggggagacggggattactaatcccacttcctagatgaacccaggcatcttacctatctgtgtcccagtttagcgccagtctcagcgcacaaccacaagatgtttattgaataaataattgatcaaatggggaaacttggacttagactgattgagtaatttccccaaaattatatgataataagtagtagcacctggaatttttttcacttaaaagagtcacataatatgtatatggaaaaaattataattactcattattccactatgtagagtcaccagagttgcctcgagacccttcttccgtgtgttcatttcatgtgttcctatttttaagagaaacatacatgcacatcattttgcaaaatgctacttcaaaattgtgttcaataaatatggaattaagaaaagaatatttgtaacatatgtcaggttgaaagaatacaccaaaacgcacacttgtatagccacctcccaacttcagacaagaaagagactcgttcctttgaatctccctcctccctcccctgtttgtacccttcaccccaggccccaatacccagaatctgtttatcattccttagctttgctttttaatattatcacatatgtattacccctaaacgatatttagtttcattattcatgttgtaaactttaaatcaactacatcaaacagcgcatatgcttctgagactggggttgtggctccgtgttacgcatgtgaaacatatcgacgttgatgcacgtggctgttgctcattaattttattgcctgagtatactgtaatttgtttattcttctgtcatgagggttagttccacgttttaaaattgtttatgtatcggtcgggcatgatggctcacgcctgtaatcccagcactttgggaggccgaggtgggaggatcacttgaggccaggagttcaagatcagcctggccaacatggcgaaaacctgtatctactaaaaatacaaaaattagctgggcgtgatggcgggcacctgtaatctcagctacttgggaggctgaggcacgagaattgcttgaactgaggaggcggaggttgcagtgatccgagattacgccactgcactccagcctgggcaacagagcgagactccatctcaaaaaaaaattgtttatgtattatgatttttgctaggagccctcttgtacacattcccttgtacactcttgtacacatacacagaagtttctctacaggatatatacctacaaatatgtttgtcgagttttggggaaatatgctttttaaatattttttcttgtcaacaaatacccgtttgcagtttgatcttgtaatggtagagccaggatgttaagcccaagtggttgggctttccctcattgtccacagctgtctcatatccacattggggcatcccccagcgcggtcagggcaaaggcagcagagggcgggggtctgtctgagggtagtgctggtccctgggtacagaatgtccctgagcagcccccacaggcagctgcctctcctccttcagtaggtccctggagataccctggctgcccggctcagcagtctcaacccccaggccccacccacgcagcagggactgaaataactcaagtgtgtgttttctacccaaggttgtcttcaaccaccttactcctccaccgcccgatgaacacctggatgaaggtaagaagggtggtttgggaagctgaggctccacagccctctcccctaggtggcagctttgtggagttggaaaaaggttgagtcaggagcagcttgagggctggagaagagaaaacggggaagctgagagaggccccggctctgtgcctcttggggcgtctcttcaggaaccaagaacaagtttcttcagtatgcctgagcctgggtgggacttttaaaacatgaaagactttacaaactgtaaacaagaacaaaaacaagagtcccagggaagacacacagcatcatcaaacccaagttttaaaatatgctaactctcaaacgcaaagggctgggccagtggctccaggcccttgcctccagcccctgtccgctctatgtggagggcaccttcttgtttcccgctcccagtcacttcgagagtcccgctgctgaccacctaaccacccacgcccctacctggtccccagactccacttggttttttttgagacagagtctcgctcttgtcacccaggctgcagtgcagtgacccaacctcagctcactgcaacctccacctcccgggttcaagagattctcctgcctcagcctcccaagtagctgggattacaggtgcacacaaccacaccgggctaatttttatgtttttactagtgagggggtttcaccatgttggccagattggtcttaaactcctgacctcaggtgatctgcccgcctcagcctctcaaagtgctgggattacaggcgtgagccactgtgcgtggcccctagactccacttctgctctggtgggctggcctgctgggtactgtagggaatgagctcagcctttctgggccagaggctccacccctggggactcccaagagggtggcctccttcaaagtgacttcccgcagcctcctcatcatccatgtccacacagcatggggaagggatgcctcggccagccgggccccacccattaacctgctcatatgatgtgtactgggcattcagcacacagagcccagctctgtcccaggaatggcgaaggggtgacaacaggtagatgcgaccccttccctggaaaagctcagaatctgtcacacttgtgagcagaacctgaatcttaaaacttcagggaaccactgtcacccattctgaccctcgctttcctgctgagaagaggtgaccagcccgaggtcacaacactcagctcagtgacagagcggagccaccccacccggggaagctaagtgctctccaggtgaccttcatcaggtgggtcctgtggctcccagagctgtgcagagagcctgcgtcacagcagggctcacttgaagatggtgctccaagctcctgagccctcttcctgccttccatccagggcccgccagcaaggtggggggcccggcagggtcactggcagccatagacagtgtggctggggctctgggcacagacagtggagaggccagggctccagctgccacgtggcaagaccacccctactggggatagaggcaggcggggcagaggaggaaaaggataagaggaggcttatgggcctccgagggcaggtgtagaataagaagatgagggctcccagcactatgtccgaatgtgggcctgaggccaccagcagcccggcagtggctgcctccctgtggctgacctctggccatcagcttcctcacacacgccttgtccaggtcatagggcttcttagtgggtccacaacggaggacaggatgggctctggggggcagcccatccctggtggggtcacagggctgggggtgggggcctgtgctgggtgagaacatcatttccatcgtgggcaagcagaagcctgtcctccttggtagccaggctcaccccagccccaccttcccgcttgtgggcctgagtggtggtcatctctcccttgttcattttagacaagcatttcgtggtggctctgtatgactacaccgctatgaatgatcgggacctgcagatgctgaagggggagaagctacaggtcctgaaggggtgaggttccaggacaccatcccctgtccctgcaggacccccctcccccacatctctcctttctccacccaccacatcctccatggctgaccctggaagtcttctccatcgccctgcccccagccctggccccagcattttcttgaacttggcccttttgtcttcctctccaaaatctttccggtgaagtaatttccattcacaacctcctgctcatccttcaaagtccacgttccatgccaccgcctccatgcagccctcctgactcttttgggcatgtggaccttgtcctttatgcaggctggtctggctgttccgtgaaagccttgcatttaagccagttgtgtccatatttgtctccttttcaagacaggagcccacactgatgacacacaccaatcccgctttagctcatttcccatgtccttctcagaaactccttctaggtcagctctctctcagtggccaggcttgtcctgtggagctctgagggtctgatttggttcttgaagttctccaaaggccctgagccaagctcacgaaggtcctgactgctgattctatacagtccacgccaaccgtgtttttctcaagcctgtccccagtccctcaccaagctctgaacacgtcccattcatcaagaggaaggctgctggctggatccttgtgccctcttggctggtcaggctgtgtagataagctcttccccctagaacttgcccggatagccactgtaccactgagcagtgggcacaagccccttcctgcctgccgtactctctacccctgcggattctctgccctccagggagagatgactttgaggaggcctgagagctgcccagtgacgggcctacaggggccatgatctcatctctgtttcccctgctcccattagaactggagactggtggctggccaggtcactcgtcacaggaagagaaggctatgtgcccagtaactttgtggcccgagtggagagcctggaaatggaaaggtaggtgggcacgggaacccccctcgagccaagatgcagtcactgtttctgctccctgggctgttaggcagggcagggccagagtgggactgaccagggagcctgcaggcactagcaaagaggggacaggaaatgagctctgctgggaaaggcctctctgctggctccagacgacattcagactgctgtgtgacactgagcaagccgctcttcccagctaaacaagagcggtccttctcctggctcccctggatggaaccggccccagtgtctgatggcctcgaaggctaccagggaggcactatgaccagcatcccctcccctacagcctccatgggcaggactcagggctcagccctcgggggctcccaggagggtggcgttgttcagaactgattaatactcccaatcttctaatcccccagcccccatcttctcccatgtccccatggcactgggaatttcggactcggccagccagagcccccacgaatctgctcacagggactagctctgcctgaggactgaggcccagcaacgagtcttctctggacactgtgggccccgcttctttccctggaacagtgtggggaaccgtggggctgtcctgcacagaacaaccccataccgaaggggacatactggggtccctgctcagagagtctcggcagtttgcctaattcagatctcagactgcaaggaggaggcacgtgcctgtgatacgcagctgtgctttggagagagtgatcaggggcatttttccaaagcaaaattaacaaaggtcaaccaactagtgttcttgtttcgttctaggaaaacagtgagtccagggctgacaggaagcggaactggaagggcagcggggcagagggcactgactccatcacggtgtgaggagcagcagctcagggccgactgggaccagaaatgctagatttttatttcttggggacaggcagtgcaggagggaggctgtgtgggaatactccgaggagcagggtcgctctgagtttcacctgttcctgccgttttccaggtggttctttagatcacagggtcggaaggaggctgagaggcagcttcttgctccaatcaacaaggccggctcctttcttatcagagagagtgaaaccaacaaaggtaggcttggtggctttgcctgccttccttgccctgctcctcccgggaaggcgcctccagaggcctggccctggagtgagaggggaaggggtgactgccaggagaaccagcagcttccgggcttgtgtccctcccaattcaggccctgcccgggagttgacatgggggctgtccacacagtcctccctgtcccggctggaaaccacctgggcacaggaagccgggtggacaggggtggtcccacgccagactggccctgctgcccagtcagcaggaacaccgaggccagtgggggccagggaagggggaaccctgagcccttaaccaccagcctctttggaatcaaggattagggggagctcaaagaatccttcaagatcatctcagccagaggctgcaggtagcatatgttaggaagtggcctgtgccgtgatgtaagagaagagggtggtaattgaggggagcccatgccagtctagacactcatgagttcaaatccactgactgagcaaaacagctgccatcaccctcaggggttttctctctttctctgtcatttggctttctttccttcttaatttttttggtgtaaaatataaaacacatataaagcttgcatgaagtatgaatgtgtaattctaaatcatatagggtaataataaacaaatccctgtgtaatgacagccaagagaaagagcatcccagaccaccaggagccccctcactcccccacttgggctccttcctgattcaacccccaccctcaagagctacctgctgtcctgacttggatggaaatccttccttgctcttctctgtggtttcgccaccatgtcttgtctgttttttcagcttgatgtagatagaatcactgtttttgtttctgtgtgtcttgcttctgtcactcagcagtgtttgtgggattctatgttagtttcctgggctgccgtaacaaagtggcacagactgggtggcttccaccacagaagcttattatctcacagctctggaggctggaagtccacgaccaaagtgtcagcagcgttggctcctcccgggagctctctccttggcttgccgatggccgtcttctctgtgtcctcacgtggccgtccctccatgcatgtctgtgtcctaatctcttcttgtaaggacacctgtcaatttggattagggcccacccatatgacctcattttaacttaatcacccctttaaaggctctgtctccacatatagccacattctcaggaccgagggttaggactttaacatatgaattgggagcgcacatgattcaaccagtaacagattcattcatgtggttgaggatggtgagcctgttcatgttcattgctatacagaatcccgggtgtgaccattccagagtcaagttagccattctcatgttgtgggcattgagttgtttccagtttggggctgttaatgcatgtgttgcaccgaaccctattatggtccctggtgctcactggccactagcttttcgtctgtaagatactaatccacttgacagatgaggaaagggagtccctgaaacaggaagtgacttgctgggggccaacagtaagcatcagagcccaaagcaccagtgaccacatcatctaagaggctgagaggcttcccaagctctacaacgtggcaagctagggtgacccaggggcttcccaggcagtatgaagaatgctttgctcatcaggaagctgtccacagggaccaggtacagccttgtagccaattttaactggagaggagatggtgacagtgacatcagaggaggaaagggagagagagtgtctggaatatgagtctggttccctgtggttggggcgatgagaatggacagagttgtcacctggtgggagcacccttgggctgtccattggttccatctgtggctcaagaacagcagccagagtggaaacccagagtatgaaaagctgtcatagcaccctgtgattctctggggacatcatgaggccttggtgccccacaaaggggcaggaccaggttggggagcaggaagggtgcattggaaagctggggtgctctgtgcaggatttcttggaatatgccaatgaatgcatatacatacatatacatacacatagatatatgcattttatatttatattcatattggatattgtcactatttcatttttgtggcagagcacctctgtacaagaaataatttgggaatcactggagatgacataagtgttttattgttgttccaggacatttcaaacatacacagaagtagagaaaatagtttagtggaacccctggtacccaacagccagcttcaacaattatcaactgagccagtcttgtttcatctgtatctcccgctccacccctgttctttcgaagtaaatcccaaacatcatgtcatgtcaccctggaaatgatatttcaaccattgcctattgctaaggtgaaagcctccccaccccctgcccaatctggtgtggaggaagaaggggttctctatgagtctggcatcttttcctgtccatgtccaccccaggaagccagtccaagctgggaataggccatatgggaccagggctgcaggactgttcaaccatcatcaccaccacacgcacatacacatgcacacatgaacacacatgcacatatgcacaaatgcacacatatacacacatgtgcatacacaggcatgtgtgcacacatacacatgcaaacacatacacatgtccacgcatgcacatatacacacacacgcacacatatacatgtgcacatatgcacagatgcaatgaacacgtgtgcaacacatgtacacaccttacacgtacatatgcacacacacacacaactccaaagcaagacccctctgcttctccgagccacagcagtgaatgcaagacagggatggaagcaggggagtgagttctacccttcgtggcctccggggtgtccttgagcctctcaagcctcagtttactggtgtctatgtgaggatagactagtttcacagctcaaaggcaggcggtccttcagtgctgagaaatcttcatctcagagccaggccctgcctgcccagggcagtccagacataccacagaggcaggggatccaggttttgtgaaactgaagctgataggatctgaggtcgtctttacaaaggacaccaaattgtcagaagccatcagggacggggcctcagagcagccaggcaagtgaggggtctaaagcaccagcttgggaagcgtcactgcgtggagagcgggctcctgggctcatcgcccgaggcacccgacacaagtgcagcctacaaaatggagagaaaagcccttgatgaatgaactccctaaggccaggctcgggttccttagagactgggggcacagctgcacccgggcagggtcggggagacagtttgcagcctctgggctgaggctggggtgggggtgtggaggggctgtggcaacagcatggcgtacgcctctgggtgtccttttgcaagtaggtgatgagagaggcacattggctgagggaaactggaggatggaagggggttgaggcaggggaactgacaggagaggaaagagccttaagtcaaacaggaccgcggaaaaccaagcgtccacaacgagaacgaggggtccgtgcctgacccctggcggggaggcgtggtactgctcgaggtaggcgcggactcggggaaccgggagccccccagcctgccgcgaactctgctgggccccagcgtcctcatctcccaaataatgggtaaggggcggggtaaggtcatggtacccaagtagctggacagacgcattttataaaaacatcaagttcatggaaaagcgtttcttacctggaaattcttacctcctaaattgtccttaacccttgacatctgctaccacttgcctgcgggaaaacattaacctagaagacaaaataacaggtgtatgtaacaggcagcaaatgactttgaacagagcccctgggcatagcttattacggtgtccgccatggacatgggtacttgcagctgtgaatggctatctgcttgtaggagtaagagataccctctttagccagaaaataaagcccctagtcactccaacgagactagatttctcaatagtccatgacaaagggtccccgagtgaccagatgcccaagtggggacctacatgattgctgagaaactgtgctgcctgccgcagggctctgtgattccctggctgagttttgcaggatagtggggggatgccaaggtcagagtcagatggaacttacaggggaggcttccaaaagcatggaggttgagatgcagggaaaggaaacttgtggagggagtgctgataatgaagaacagaattggggaacttttttcaaagctttaaaatgaggcccaaatcccagtcccgttttttgtctttgtgccttacttctcgtgtgtgtcttcatgaaccctccaggtgccttctccctgtctgtgaaggatgtcaccacccagggggagctgatcaagcactataagatccgctgcctggatgaagggggctactacatctccccccggatcaccttcccctcgctccaggccctggtgcagcactattctagtaagagggggcgtgcaatgggggcagggacttgtgccaagagcccctggatctctcgctaagattcccaattgtgtgagtcattggtgccaccttgggggatggaaagattatcccaaagttaggcctaaggaggtagcaactctgagcaccgggaattggtggccctaattccctctcctggctcagcagggaaccccttagagagtagcaagcattttcagtcttagagtgagcaggtcgattttagagatagcatgccctgctttgcgcaaacgaagagaaagagttgagtgtgtgtgcatgtgcaggcgtgtgcacacacccatgcagggggtggggtggctggggagtggagggccagctaggaatgatacagctcccaaggtagagcctggctgctctggtaacccccagccctgtcttttcttccctaatgcagagaagggggatggtctatgccagaggctgaccctgccctgtgtgcgcccggccccgcagaatccctgggcccaggatgaatgggagatcccccggcagtctctcaggctggtcaggaaactcgggtctggacaattcggcgaagtctggatgggtgagtgtgtgcacacgtgggagcatttctccccccattccacctgcgccgcatcctgagtccaggttcagcattttcatagcgtgtcatccctcccccagaagtcttgagagggagcgaggacagaggcgaggacactcattttacagaggaggaagtggaggtgcagagccgcgttgtaacagctgggaccgcttatggtggtggcagagcaggaacagaatccagctcacccagccccgaagtcgctccctccttcgttctctgcctgaagctggctttgacaatgagctgcagcggcgcgttaactccccttagcttttcatcacccagatggaaacaggaggttaaacgtgatgagccatgatgttccagagcctgagtgcacaccgagggcagccgtgggactttggccaagtcactgaagctccaggcctggtgtcctcacatttccatcgctgctgacacctgcccccttcccccccccgcccaccaggatataaaactcgtgttccgttttatccctggattggtccatgagtcctcccttacctggggctggtccatgagtgctcccttacctggggctgatgcccacggtgcttttggcaggagctgtacccaggtccctgccaaggcccatgtcctctagaaaagcaagtagagttgtcttttgcccttcaggggacttcatggagtacagggagagtgtggagatacagatagtttaaggagtgggacaggatcgccatggggcttcagaaggagggaaggagacccccatgcgtcatcctcctgcccagtgtaccccaggctgtgtgcttatttccaccaaggagttattgtgtgatagaagagactcattatgtaggggaggggtgggggaaggacacaggttccgtgcaggacagaaggacacaggcccagggtgtggggcaaataggtgaaatgccccccaggcagggtacattcctccactgcctgaggccccatatagaagggacctggaacgcaaggtaggcaccacacaaccatggcctccggaactgcatgttccagctctggcacctggaatggggtggcacctgggcacttaccccgattttggttaagggatcacctccgagcaagctctctgtcttctgattggcttcttcactcccccgggctcaggttactacaaaaacaacatgaaggtggccattaagacgctgaaggagggaaccatgtctccagaagcctttctgggtgaggccaacgtgatgaaggctctgcagcacgagcggctggtccgactctacgcagtggtcaccaaggagcccatctacattgtcaccgagtacatggccagaggtggtgccccccgcagagccgcatcctcagagcgaggcgggagggccgggcttagcaggaggaggagggtccgctgcggtgggttcaccaggccagggggtcctgcagatctagggcatggcacggtgtggggacagggagggatggagggagggggagggacagagggagggtgagaaacaggagggtgaagtggttctgacagagccatgttctcagcccaggagcagttcagacagcatttctggagtgcatcttctgtgcctagcactctttgatgcctgctgggagggacagagcattgcaaagtcagacgaacaccaggccaggcatgcagggacagtactagatccaggtctcctgcctcctggtcatgcaaccatttacaactgtgtgaatattttacaaggatggccagagaggttgggcttgatggcctctgaggtccacggcgtggccaagttctcatgccactttctcaccctcctatgaccctgaccgcacactgctcctataggatcctaacatgcccatgttgatatagctccctaacaactgtcaccaaggggcccccggtcggaggctgtgctgggggtgcctctagcctgcccctagggcaagcatccatccctcccagctttctgattccagggggagctgcatttgtcccctgcaccaaacctgggggacagttctctccattctggtgctttcttgctgatgcctggtcctcagaggcagagggtgtctgccagcagggatcaagggagcgaggccaacacggggggaaagacaagaaggggcatgaaacttcgagtcagaactggggtcccactcccagctcccggctgggtgacttcagacaggtccctgcacctggctgaaacctaacttctgggcaactgctggtatattggctgcctcccggggtgctgagactggcattttgtaaagtggaaggcactcggcagcagtaggtagatccttcctgatgcaccgagagatctgagggtgcaaactcccacttcccgcgcccatggggagccactcacaccagagagaggctggcaccaccaggggcgggtcactttgcagaagggcacttgcaacttctcttttcttaggatgcctgctggatttcctgaagacagatgaagggagcagattgtcactcccaaggctgattgacatgtcggcgcaggttggtgaagtaccaggtgcagagaaagggcggcatgtgccacctgctgcccacaatggctgctcgtgccttaccaccccatcctctcagccagcaggagaagtcagggggtactgaaggccaccttcctctaggcagatatccccaaggtcacccactgcacttggacttgcaaaccctggccactgtgcctcctgccccacgcagctgtgagggagcccagggaatggagccttagacccgggctgctgtgttggaatgaggctattctgttccgaaggaagagagggcgaatgaatgtcatgggaaacacacagagttagcaagagttccattgaacccggcaggcaagtgtgttctgttgtgacctcatctcttccttagatggtgcccacaaacatctcctgtaggacttcccatcccaggggccctcagcctttgcacagccctggcgtcgaccccaggctgatgggcaggcctgagctacacacagatgccagggacatgacttctctgagccctggaggacagccccaccttctgccaccagggaattgcgagtgctggacctccttggctacccaggactggtcctcagtgtccctcacgttcacatgcagaactttctggactccatggggtgaagagcagagtggagaggagggttttagccgagagctctagctggcaggaagcacatctggtggccctgttaaaactggaactctcagcagaaaagttttggtctgtggtcagcctgtgaggcacacacgtgcgtacacatacacacacacatacagctgccaccgagaggaaacgctcccacccaccgcccacatcagccctcccacctcgcccctcgcccagccttacccagtagcgccgctgcaggaactgatgccacaacgcctttttccgctgaggtgggcagacagccatctgggcaggctggttttggaaaatgagtgctggtaaccggcttcaaaccccagggcagtgataagcctgcccactgctgctgcttcctttccccttccttctctcaccctccgctgtctcctattcaatccccactacacccccttgggaaatctcgtgtgacccaggggcaaaggatgtgaaaagccatcggagtttaatacctggatgtagccacagaatcgggggtgaggagccagaaaatcagaacttcccagaagggcagcctctaaccacatgctgaccatgccaatggctctctaagcacacatgtacacacacacactctcacacacataaaaacacagactcacacacacacggacaaacacaaacacatacacagactcacacagacacgcaaactcacacacagacagacacacacacagacacacagactcacacacacaaactcacacagacacacaaatacacagactcagactcaaacacaaactcacacaaacacatttacacaaactcacaaactcacacacacaaacacacacacaaacacgcaaacttacacacacatgagcagacacacacccggcccttctgggctcttcttttcttactccataggaagccatgcaaagtctcgccagacctttcttccaaggccagatctggccaaccccacaggaaccctgcaatcacaatccctcgggccccactttgcagccagatgccaccggttcccatgccccatgcctcgccacccctctacctcctctgcccaggaagccttgaacacttcccacctggcagaatccttatcatcatccatggctcaagcgtaatgtcatttctatgaaggtttccctggacaagaaactgccagagagcccttagctcaggtgttcccggaagcactgttcttgctcagcagatctgggcagcttcttcttgaaagcagatctgggccctactcaacattttttaaaatatatttctggtactgttcaataaatattagttatcagaacgagtactgttagatgctgcccagatatatttagtactcagttttatattccccacagtcccatattagtaaatgagtattgattgcatggtgtagcaaggggatggatggatgcatggatgggtggatgcgtgggtgggtgggtgggtgggtgggtgggtggatggatggatgcatggatggatggatggatggatggatggatggatgcatgcatggatggatgaatgggtggatggatggatgggtgggtgggtgggtggatggatggatggatccatggatggatggatacatggaaggatgcatagatggatggatggatggatacatggatggatgcatggatgtgttgatggatggatgggtgggtggatggatggatgcatggatggatggatgcatggatagatggatggattcatagataaaccaacaaaatgcaagcataaggagaagtggaatcaattctagtgctggcttcttgaagtcgcatgtctgaagaggtaaatggggtctctgctttctgcctcagtttcttcgtccattgattgggtgaataaagccttagtttcctcagctaaaaggtgccaagtagcaccagctgctatccctggcccaggctggtgatcaggggaggagagacaagtctcttcttcttcacagcctctgtccacctggatctgccagtgctccctgggtgcccccacggggcaggcgctgggtgaggttcttggtcacaaatcaacctcgtctaatgcttgcctcaaccccctgccctggagaccacatccctcatgttccatgtcaggactgtggcccctcggggaggttaagcagcttgctagaggtcagcgacttcccgagggcctccagctccaggagctgtgcttccagccagccagtgagagctgcctgtccttgcctcctgctccccctccccctccttccttaccatttcttctcttctccctccctctccttttctcctgcctgtgttcttctatcttccatctctgcagacccttggacacagctgtgtggagcgagaacgaggagggggaggggcacaggtagcccctgtgtctctgatgcccacgttgctgcgttgctgttctgggcttctaggagaggagtttattcggctgaggagcaacacagtcacctttctactccatccaagaaacagctccttccccagcagcccacaggggctgtgcgggggacacagtgtgggctcggtcttggcgtggaggcccccaggctgtccttcaccatgtgcctgttccctcagattgctgaagggatggcatacattgagcgcatgaattccatccaccgcgacctgcgggcggccaacatcctggtgtctgaggccttgtgctgcaaaattgctgattttggcttggctcgaatcatcgacagtgaatacacggcccaagagggtaagcacagcccctaaccacaagggaaacctagggccttatctttcccagctcctcaaagccgcctttaacttctcccagcacagccctgagggaagacacctgagggctatacggtttctacagctctagatcagcatttccttcatttacccaaatgtgttcagcagaatggtagtgccctgagacctcccatggaggaacagctttaggataaggtaggtttggagaaacagcagtccaccctactccctgtcttggagattcccagtgcacatcaacatattaaaggcactgagaagtcctgcagcaaagaaacagtttatgtttgcctcacctagtgcctcccaaactaatttgagctccaaatactattttttttttttttgagatggagtctctgtcacccaggctggagtgcagtggcacaatcttggctcactgcaacctccgcctcctgggttcaagcaattcttctgcctcagcctcccaagtagttgggattacaggcgtgtgccactacacctggctaatttttgtatgtttagtagagatggggtttcaccatgttggccaggctggtctcgaactcctgaatttaggtgatctgcctgccttgacctcccaaagcgctgggatgacaggtgtaagccatgcccaaatactatttttatatagtccctattaaccttccatggaattaggctttcacagagcacactgtgggaaacacagctctcatgtgcgatcagcaaaccaacctgtattagggtgtccacggagcactgttttactctgtgcatataactgaggtggaaatctacgtcacaagagaatctgaaggggtcacatatatttatcaagctagcaagcagtgtctgctgagcctatgagtcagatgacaagcagacaggatatggcttgttctctcgggaacttcaggctggctggggagaccgagaaatggaggccaggggaggctgtgaagtgccaagccctgaggtctgctccaaatgctggccggggctgcagccattgaggtgcttcacagggcagccggatgtgagttcttcctcatagcggccctcggaggtacaagtgtcaccatttccattttgcaggaagggactaacggaggcgcccgcaggtttaaatggcttgcccaggccatgtcttttaaattaaacaaggcccctgtaaggtgaaacaggccccttccatcccaggtggaaacgtggtggctgcccattgaggccatcgctctctttttaaagaaccaaagtgggtgactgtgtggtattggtgtccatatcgtctttctgtgctgctgatgtcgtgtctgcactcacctggtcatgtgtcctggtgtgcggtagtggctcccccgccatgcctggccgccccgccctgtgaggccccgcagtgggggcttgatggaaggacagcaggagcaggggtaggggtgaggatggagggtaggggccaccggccgtggcctcccaaagcttgcatggcttttcccacaggggccaagttccccatcaagtggacagccccggaagccatccacttcggggtcttcaccatcaaagcagacgtgtggtcgtttggagtcctcctgatggaagttgtcacttatgggcgggtgccatacccaggtaggtggctcaccccgcagctcgcggctccctgctttcccggccggccctgatggcaggtcgcctgtgcttggtgcctgtggctgccctgttcttttcagagtgagtcccagagcgaagacggagacccaggcatggcatctggggtggagctctgccccctgcatcactattgctctgggccacagggctgtgtctccttcctccagcagaggtcaaatgagtccctcaaactgaaatcaagacaaagggcacatccgaactcaagtttactcccagtggcttgttctcagttgaggacaggttgtgcctaccttggctttgcacccatagtggattccccaaagccccttcctgtgtggccagaatcgtggacgacagcccccagccccagtcgaagggctccagccacttggcccccacaggtgggcaggctccgggtcacctgctgctgtgtgcacctggcagctgcccatgagtgatgggcttggctgtgcccctggtggtcacaggtaatcaagagagggagggtcccatcttcagaggacctgccccgtactcaggagaaaatctacagcctcatttctaggcattccccaggcaataaaaagtaaataaagggctgtttagagaccgggcagccaggcaacgcacgaggctggagaagtggtctgggactgtgggcactgctgtcccttgcctgggcccactgtgccccgcgggacgctcagggccccccacccaccgaggaccccagcccctcacccccgcttgcggtctcctctgccgcagggatgagcaaccccgaggtcatccgcaacctggagcgcggctaccgcatgccgcgccccgacacctgcccgcccgagctgtaccgcggcgtcatcgccgagtgctggcgcagccggcccgaggagcggcccaccttcgagttcctgcagtcggtgctggaggacttctacacggccaccgagcggcagtacgagctgcagccctagccggccgcgcccgcctgcgccccgtgcccacctctgcgcggacgaccccgacttccgtgccatcccagacgggccgcgaaggcggggtgtcgcctgtgcccttttctcagacccggaatccagtgggcagaggcagcttcgcagggggtccccggacggactccttcaccgactgcacccccgggcgagttacgcggcctctctgtgccgcttcatttgtagagggctgtaacagtgacctcgcacggtcatccggagtactaagccccagtaaggtgttcaggactggtaagcgactgtcatcaagtaaggcccccgtgctgggcaccccccgtgctggccgcgtccccgcctctgcgccctgcgtggaccccgccctgccccgctacagaagccagactgggtcccgcggacgccagcaggggcagccccagcctaggctgcgctccagcactgcggggcttttctgcaataaagtcacgagcgttcga

SEQ ID NO: 349 - DNA, 70178 bp, Homo sapiens
  source 1..70178: mol_type = genomic DNA; note = NW_018654717.1:c1853694-1783517 BLK [organism=Homo sapiens] [GeneID=640] [chromosome=8]
agaccgggggtgctgccacctctgtctgctgccggcagaaagccacaagccatgaaaactgattgagatgagaagaattcatctgggactggcttttgctttaggatggtgttggaagttgctcgttgtcgctaggagcctgctccactgtaagggtgtcgggatctgaagagctatggtgaaacaccactgaagcattgccaaggtgaggccctgcgtcttccgggttctttatcgtcttcctttaaattgtgcaaatggtgctgtaaggcctgtagtggggcaagcaagcaaggacattgctgtgggtgccacagacggaggaagaggcatgaatggatcgctgcctcagctatgaatagatttctccatggtttgtgcatttccagttttgagaatttttaatttataaaaggtcatccatccagggtagattctgctttttggaaaaggcagtgaatgtgccacagaggagagaagggacgtgggatgtagagagggggttgagcgggcacacacaggccactgctgcgctcccggcgagtcactcggcctcttgataggaggtgatattgactgtgcagagctgacagaggttagtggtcacaggcggggagcatctggctcaaggcaaatgactgttgctttcgttttatttgtttgtttctgaatgaagttgttccatttttcaggcattcaggaatggggtaactgaatagatgtaatgatgatcttcttgtttaagagatctatttcaccaggaaacaccaactgtgaaaaggaaagcatagttgatcacatattttgaaaggatttgtgtaaattgtaaggttttgacaacgtttccatttatctggtaatgcgggtggatgaagttcaccctcatccacccacattaccaaggaactaaggaattgtgcgtttgcagtaacagagaagaaattgctgtgatatgtgcatatcctcctccctcgggagagtgggacttaattcccctcaccttgagtgaggtttggactaagagtatggaaagggagaaatagtagctctgtagaggagaaacctgcagatgccagcttcaccaagggaccaagcttagcatcaccgggaataagctgggctgctattgtgaactgccacgacagtgcggttcttcccgccaactcataaccccagtcaaatcatgagaaaacatcagacaaatccaaactggggaagattccacaacatatttcaccttcaaaaatgtcaaggtcatgaaaaacaaagaaagacaggcaaagcgtcacagatcagaggagacatgatggtcaggacacccaaacccagaattcgcatcctgtattggatcctaaagcaacaccgcaaaggtcattagtggaaaaataggtgaaattttaacaagacctggggtctcgctaatattgtggtaacaattactccttagttctggcaaatgtaccatggttacgtaaggtgttcacattagaagaacctggtgaaggaaatatggaaattctctgtgctatcccttgtaatttttctccaaatctaaaattactgcaaaataaagagttaaaaaaaattagactcattcttcctcagagcaggagtagccaaatcctgagcattcttgggaaaactggcgttcatggcctggtgatcacaccttctctttgaacattctggaatatagcaggccttttgaatttttgaccatccatcattctctctcccaacccctacctgattccagaatagctctgtatttgcctctcttcatagtatttctcatggatgattatattgttgttgttggtgtccaatgggttttgtgggggttgtttttcgtttatgttttttgtttttcagagatggggtcttgctctgttgcccaggctggagtgcagtggcaagagatcatcgctcactgcagcactgacctcctgggctcaagcgatcctcccaactcagcctcctgagtagctgggaccacaggtacgccactgtatctggctaattttttaatcttattttttgaagagatggggtctcgctttgttgcctgggctgatctccaacccctggcttcaagccatcctcccactttggcctcccacagtgctgggattgcaggcatgagtcactgtgactggcccagcatgcatttttgagcctttgctctgtggcaggggctgcaggatggaatacaccctcatctgcccagcgaagctcactgcactggtgcaggctcctggcaccccaagcacaggcccagctacccagacctgactcctctccaggaaggaagcagaaagccaggaatggagagaatgaggacccaggcccctgggggagtacagaattccagccaggaatctgccgtcctctgggctcaaccaccccacagaatctggtcagccaagtggctgtgagctgggctcgacagcccttcctcgagagtaaactgtggcctctaggatgtagagaggggactcaaagggccagatcccatttgagtgaggattctgaccttgtgagcccacctgcagcctggggtctgcagccttggggactggccaccggtggccagcatcctggcttgcagggttcacgtgtatagagaggtaacagcaagacagagaaacctggcccctcttgcaggcccagcagagcaggtgagccctactcaaaggtgatgctgcgcctgattagagaaaagcttccaaagcaggtgaggaggaagaaaaaatgatgaagccgcaggaagacagcacgtagatggaaatctcaacatactgagatggaaatcaatcacaaaactcttacaggaaaatcacagctaaaagttggtgattacatgtgggcctgcagtgcctttcctgtcacatctgctaccccactgccagcctgctgctaccccacagcagccctcccatttgtggaatgttccctggcgtgctcctgcttgcctgaatcccttccccaccttcccacctaggcaacttgcatttgctctgacgtccagggcaggtgcgagtgtctcctcccagtcacagtgcccaagcccatttgtgtgtccccagcaaccaccagcacacacccagggctctggtttgcaggcctgccaggttctctggaccaaagctcctgaggacaaggacatgccctacatgtgcctccaggtcccagcacccagcgcagtgcctggcccaccaggggtatctggtaaagtggttcttgagttaaagacacaagggcaaaaccttaaatgaaaatcaaggttaagacatgaggatgaaagcttgaaagaggaaaagcaaagataattgaatgatcatccctaatcgtggtgcaccccagtgccatcagcatgctggggttttgacaggacccttggaagaaagagaagaggcatctgaggcctctggcacattccacttcctgtaagacagtgtggtatagatgaaagcattggggcttcctgccagccaggtcagtctggctctgcacctgccagctgggagtgtgaagtgggagcagttgcacccactctcaagcacagacatgagaactgaacagaaccacggaatgggggtccagagcccaagacatagacgaggctcctccttgtccactgtggggcttgtgcaaccccttcatcaaagcgctggtgctttccacattgtaatcaaggaagttttctcaggttccttctcatcacaactagctgctggcctttttgcacactttggcacctaggatgctgaacctggaccagtgggaggcaaacaagacacacctgggatgcaaaatgtaaggaggctcccatgctcaggtcgttcaagtgcaggaaaagtttgtgtatgtgtgaaacgcacaatgccatgtggtgtctataagggcatttgaggttctgtgcttaatggatgaagtgggttctgagcattgagtctgtggattcctgatgagtttcctggtgctctgagctccgtgaacttgtaaacaagcttttgtgtaggtgggtacttacagtttttgtcagattcccaaaggggtctgtgaaccccaaaatatttggaatcatacagtcaaatatctaggaagaatactttaattttctctctcagcgtgttgtggatatgaggaagtggaaaggacttggacatagaagtcagacaaagcagccacatctgagtggtctcgtcctgcagtgtagtggttagacggctggccttgtcaaccagagggctccagtgcaaggttcagccctggcaatgtgagcaagtcactgtgtgccttcctgagatgataatagtttgaccccactgtatacgagcagccttacctgtctcgggtaggttaattatatcctctcagtcttatttcttcattcattgataatagcacatcacaggattaacagaattaaattacaaagccctaatttttaggtgagttgaagctgaggagcacacaacttttcttacagggtgcactcaattctcaatgtcagaaccaccagggggtccttgtacttcaaaaagacacatcttacatgacaacttctttgatttacttttatgcccaatattcattttgaaacctcacaaaggagagcatggtgttgttgtttctcaaaagagaaagtaaatttagtaagattgagagccatgaacctagacacagtcacagggcacataagatttcggtcaatcacagactacatatatgatggtggtctcataagatgaagacactgtattttgcctgtacctgttctatgtttagagacacaaatattcaccactgtgttactactgcctgcagtatttagtacagtcgcaggctgtgtaggtgtgtagcctagaagcaaccggctatgccacagagcctaggggtggagtaggctctaccatctaagttttgtatacgatgttcgcagaacaacaaaatcacctaatgacacatttttcagaacagatccctgtagtgaagcaatacgtaactatattttgggaacttcccctgtatccagatagtcagtccaagagctgtgtgtttggatctcacagtgcttgagatcctgagagaatctcatttcctgagtcagatgtgggcattctttcttggcatgggtacactgccgtggcttgtgctgaaggctgcataagaaacagaggttggaaactcacagtggaatttattgctgagatgacgttaagctgttcgcattccacccaggacctccacaggagaagcccagagaggatgactctcagactccagatccaggaaatccatgcctctctggagcaatggatgtcttacagacactgtgactcttcaaactgattattttcttctttgtgcttggactccaggacacttagaacccaatttgcatctaaccactagcagtttggtgacagcatgtcacagtttgtatttctgtgcaccagctttatacacatttttttttctgccctaacttaccctttggtctaatttctttatctgtttttctatcctgttgtattgtatgtatttttataagcggtctcaaatcttttctggaaacactaggaaatgaatatataaacaaatacaagcaggacagcatttctgaaagagcctgatatacagtgagggtgctcactaaggattagttccctatctgtgtacaaaacagaaaaattcactgagggagccaacctgcagtcaaatgtccagctgtgagtctattacagttatagaaatagcttatttttacacatattccaccttagattgatttggggggtgtttgtttttgttgttgttgtttgagacaaggtctcactctgttgcccaggctggagtgcaatggtttgatctcagctcactacatcctccgcctcccgggttcaagcaactctcccacctcagcctcccgagtagctaggactacaggtgtgcaccaccacgccctgctaatttttgtatttttttgatagagacagggtttcatcatgttggccaggctggtctcaaactctggacctcaagtgatctgcctgccttggcctcccaaagtgttgggattacaagcataaaccactgcacctggcctgtttttttgttttgttttattttgtttttgtttgtttgagatagggtctcgctctgcctcccaggctggagtgcagtggtgtaatcatggctcactgcagcctccacttccccagctcaggcaatcctcccacctcagcctcccaagtagctgggaccacaggtgtgcaccaccacgcctggctaattttggtttttgtagagatgggtttttaccatgttgtctaggctggtctcaacctcctgagctcaagcaatctgcctgcctcagcctcccaaagtgctgggattacaggcatgagtgaccatgcctggctctaccttttatgttaaagtttatataaattatttcattttaagattcttttattcctgccatttctgtggtgcaattggatttttacataaagttaaataatactttttattttggccaggcgtggtggctcacacctgtaatcccagcactttgggaggccaaggtgggaggattgcttgaggtcaggggttcgagaccagcctggccaacatggtgaaaccccatctctaccaaaaatacaaaaattagctgggcatggtggcaggcacctgtaatcccagctactcagaaggctgaggcaggagaattgcttgaacccaggagatctcagcagtgagctgagactgccgctgcactccagcttggacgacagagtgaaaaaaattaaaaattaaatgatacttttaattttatttactattttatttgaataaataaaaggatcctttaaaaagtattacacacgaaaatagggtcaaaagtcatagcccattttcttgattttatttggtgctttatgggaaaggctaaactctctctctttttttttttttaacacattagcatggaaaggaatcatttctactttgtggtgtctgtctgtctgtctatctgatgggctctctggcacctgccagcacactgggggaagtgtgaggtcaagataggcatcttgtagatgaagagcatggcgtcctggtaaacgtttaacaaccagctttccaggaaacaaatgtattgtatacatacataagtttatagtaacatgtactgatataaaggatgcgtagcacttaatttacaaataataacaaaatatgcaatagtctctgtcctaaataccgcagaggtgattgagtctcatagaaagctctcgtgactttgcactgtcatatccgtagccaagcattggttgcagcagatgagcaagtgtggtgttggcacaaacactgaaatgttcattcatgttaaggagcagatcaaagtgaaacaacaaagagttggggcaggctgcagccttagtgccatgagcggcttctttgttgaactgggtaatagtttttcaatattcagaaaagtttcctcaatgttttgtgctactcacagtgttctagctacagacaagatgctcttttaagcatagaaaatccatgaaacaaatcactgccgacctgtagcatttgcctgttcctgttgtataaatactcccaccagggccaatttcaagttgctaacatgacttgcgtgaacatgggttcgagatgcgcagcagcacagcacgatagagtacttccgccttatagacacagtcagttaaagaacctcaaagcatagctattattaagatgcagtaaaaataatcaggaagtgatgaggtttaagtatttataacctttgttttaatagaatccatttagttgtatcttgtataattcaactttaattttttatcattttaattttatatagtttttttttctttttctttcttttttatttttctttgagaaggagtcttactctgttgcccaggctgcagtgcagtggcacgatctctggtcactgcaacttccacctcctgggtttaagggattctcctgcctcatcctcccaattagctgggattacaggcacccgccaccatgcctggctaatttttgtattttaagtagagttagccaggctggtcttgaactcctgacctcaagtgatctgcccagttcggcctcccaaactgctgggattacagacatgagccaccacgcccggcccgtatagtttttataccttaatcttgcataatgatttgaataattcagctcacaaaattcctgagaatttaacaaccggctctagcataccggcacaagctggcccccagtgcatcactgacggggaggccgagtgtcttgaggccacactgcagatcagggtcctgcctgcagccaagtggggacaagtggagaataacttgcctcctgggctctcctgagtcccgagcctgacagcggaggcccaggtgggtgaccctgctttgtgctcggtggcaggggaaggggggtgggcctgtgggcctggatggagaacctgtccccatggctgtcatgtccctacaccagctgctgccagccactgtggggttcgcaagtccccactcgcaaaacggctactgttttccacaaccatgggatacaaggatgtccccttgggctccttctcatctctactctctgctggcctctttgcacagattgatacctgggatgctgagccaggaccagagggaggtaaagacacacctggggtgcaaaactgaaggaggccctgatgcttgaggttgttcaagtgcagagaatgtttgtgtatgtgtgaagcacacaaccacacgtagcatctaaaaggacatttgatgttctgcacttaatagattaagctggttctgaccttctagcccctgggcttctgatgagtctcctggtagcctgtcagctcctgatcttggatgggagcttgtgtgtaggtgggcactcttctgcaaagtgcgtttatggcttttatctggtttcctctgatcagaaagatctgggggtgctggcacacccagacgactagtaactcccaaagggagaggtgcagctttgtcacctgcccctgtgtcaggtgggacgtgagatgctctatttttttctgctccatcctgtgcccaagccttatacagggtgacccttttcagagaggcctttgccaccaggtcagtgtgagcatgtggctgggtgatttcctgccgtggaccagggatctgtgtgctgtctgaagtaagcaagggtgctctttcttggcaaggtctgagggctgagacttgcaaggagacacctgctctcttggtcaccagactggaggttcctatgtgcaggtgtggaggatggaagaggtcagtctgtcctctttcttgcctgggcctcacctctgctgaggctgctggctgccctgggctcgcagtgaaaggggccatcttccaccctcccctgctggtcaagtgcatctttccaggttccggcactccacgttgccacccagacaagtgtcctgtgggaactagcaagtgggaatcaaaactacccccagagaggctcctggccgggagatgaagggatctaccctggggctaaagtctccccagcctttcttggagcttaggtcctggctttagaaagatcccattcacatccaggcacagtggcacacacctgtaatctcagtactttgggaggccgaggcaggcggatcacttgaggtcaggagtttgagactggtctggccaacatggcgaaactgtctctactcaaaatgcaaaaattagctgggtgtggtggtgtgcgactgtaatcccagctactcaggaggctgaggtaggagaattgcttgaacccaaggaggcaaaggttgcagtgagctgagatcgcaccattgcactccagcttgagcaacagagcgagattccatctcaaaataaagaaaggaagggaggaaggaaggaaggaaggaagaaagaaaagaaaagaaaagaaaagaaaagaaaaaaaaaagaaaagatcccattcacctgcacaaaagccacacccctttgtggccaaggaaagggccacagaagaagaagtaggcccttcagaagggggagaagtaggcgccttcagaagctggttatccgtgtgtaatgccatcacagggacgtgcgtttaagatcttttatcagtcttcgtagctaaatacttttagttaattgcaggcgggaggggctactagctcaggctacatggagcatgtgctcaaaaactgtctccaatatggtgacttgctgtttgaggacggtctaagcgactgaggagtgtgccccctgtccccacccttgagatgaggcctgataagggtgattgcatatttagtgttgggcaccctggtgctctccagcatgtggtgtttggcctaagtggcccatgtggactttgtttcaaggattttacgacaagaaacaccaaaatgaggacatctctgtggccatgtttcaggcaagggggtaatggatacagagcatatgtacacacaaacacacatgcacagagacacgtacagacacatacatgcacacagacacatagatacagacacatacacataagaatacacacagaaacacacagacacccacacatatacacacatgcacagacatgtagaaatacctagacacagaggaacacacaaagatacacaggcacacatacaggtacatctacatgcttatcaaaaacaacagcaaaaccacctaccatgacaaatactattgcagcaaaactgaacaaataaattctgtgccataaagtttcctaaacctcatctattttgtagaaatctagtcacttgagtatcatccttcacaaagttctttctattctttctactgtacaaagttttctgttgtcaaatagcaagagatctctgttttctacttggaatgggcctggagaagggagacagcacccgctccctccaccccttgtccctgagcacagcatggtgacctgccaagccagagggtgacctggacactcataactcaatgcagggccaactgtagcctctggccggtgtccctgagtgagggcaaagttgtaataacacttgttctctcctttctccaatttgctcccaagctccattgctttcgttcaggccctcccccttctagactgggcagttccgcatccttggagctcatttctctgtcttcagaatctgatgctccaattcatcccatgtgtggctgccaaggtctttctaaaactcaaatgtggccctatcaccgcacagggtaaagccaccataaactcctctgtgtttgagaacaagggccaagtctcccattgaggcctccagggagtggacagtctgggtctcctttcttctccaagcacgctgggcccatctgtcctgtccctgaggactccctggcacacatgacacttcagagcttttgccaactccactccctgcctgaaatgcccatctccttcagagagcttctatgtatccttggaggtccagtcctaatgtccctgcctccgataagacctctccccatcttcctctcgccctgctcctgtccccgccaggcatgacaaatctcttcccacagtgggcccaacagggaggcagatggtagaacaggttttgggccaggtgccaggtgcacgtggctcttcatcctggttccccaccgcacacctggagagctgagtgcttttcctgaggtcacgcagaaggttaccagcctggctctggagctgtctctttgccacatcgtggggtgtctttaaggtgaccttgaatgtgcttgaagctgttttatgtcctatttgcagacctaggggaggacaatgccagggctttttgccttcccaaggtcacagcctgaagacactcagaaagatgtagttggctcatttatcattttttagaaaaaaagaaaacaacagaatgtgctgaatccttgtaactgttggccatggcactagtttcatggaaggtggaagggcaggttaggcttcttatgagggcgttcctggcctctggaggggtgtgggtgggctcaggtgaatgactgacagactggatttacgtatgttgagtgtgaatctcagtccacagcttggtgtgcaaaaacagaaaagctatctggtaatagctacatctctgttggggagaggaaactgacctctcaattcagggtcttcatacctttctccagggtggggtctaagttctgggagcctcatgagtctcaggaattctggggtggcctatttggtctttgtcatcagtccatgcagggggctgctagaatgtcatgtcagcctctgaccctggccaagccccctctcagagattccaggccacatcccaggttgagggatgcatcctcccactctggggccccccaggtgggactctcagggaggccacttgagacgcggttgcccaaactgactcaacaagatctctcagtcacgggctgaaagatctgcatcacgggctgaaagcaggaaagttcttttgtctctctttctgctttcctgtgacaatgggtgcagaaccatcgtgaatggttcaggtgcgggtagggaaaataacaaataggaggaagaacaatctcagaaaggcaggtagcctgtcccatctgctgacagagcagtgtgtaagcatcactgagcttgtgacattgatgttttttccaacatgcagtataaatgtacactgtgattttacaaggccaggagccaagtaacaacacccttggcagaggaagagtgaagtggggaaggaaactgaagcgggctagggaggaaggacagcttgacaactagttagaattggaaggacgatggactaggattgtaaaagaataaggcagaatgtcctaccttcccaccttggcaaaccctgcccctgggagtggtcctggatttgcagtggccctggcctggaccaccatgtagatgtcactaatggatcctcccaggggacgggcctgtcatggccctcaagaaaggcagggatgaccaccccaactgcaggggaagacaccacccaccctgagggcttttgggagcttttaaaagaaggcaagtcacgctttaaaagaactttgaagagacaggagcttagtggacccagtggagataaaaggtccaggtaaggagtggccaagcacttggaatttagaagaggcgaatcagaaagtcccaatggaccagcttgggggtttgggggttactgggtccatgtcaacatacagctcagtgggtgccaaagatcagccaggcctagggtgcagatgacagtgaggcaggatggtgacctggattaggactggagggggaacctgaggccaggagagcagggaagagattgctaaagacagtcaccccatggcaagctagttttctccccgagccagcatttctacacgtgagcactggccttgctgtctggctgggtgacttcctctctctggggttcagggcccagcactgctaatcgggggtagagtcaacggccttccagtgcaccctttggtggctctgtgtggcacatcaggcacactggtcaagtagggggtcatcaccaggccttgggtgcttctcaaacctaaagtcatgtggtcctcacaacagccccgtgatgtcatcaggaacctgcccactggcccagggctgggaaggactagagccaaagtgcaggctcaggactgtttgaccccaaagccagtgctctgaaccctccatctgtcttcattaaccaccgcctctgccactactgtaaggcaagagaagcgtgtcacggcgcgaaggctaagcacatgctgggaaatcacccgtggcttgcagacacatgcacagctactgggggtagatcaagagccaagaacgggtgagctcaagctgtgctcacatggggcgcgtgctaggtgactgtaggcctcagaaaacctgggatccagaacagctttcctccgctagggggctctggcacaagtttgcctgaagacatggccccatggcgaagccatcatgtgtgggaccttccttggccccctcttggtgagccacattcctgtccacgcagtagctccagcccccacccgtggcttttcacttcttccttgctttccacttctgaccaccctataccagaaggtacttcatgtcagtcctctcccgcattccctctgccttcgggtctcctggaattggaactgtcactagtcaatcattacttacggggatgtgcagaaagccagacactgtgctgggcctcgggcggcagaaataagacagccactgtagtgtcagctgtgtgcacccatctctccttctgacccaaacgcaactgtgatgggggccggtcctgccctttggggccatcagacaagggagcaactgacatttgcagaggccagaggagccgtggtggaggggttttctcagggctcgagggaggtgcctgcccatccactgagagctttgggaaggaaatgctgggcgccttttgtgcctcctactcatcaattccccccagctgcaggcaagggaggtcgttagcagcccagcctgtggggagcaagcaggccatgagctgcatgcagctggcactgctattacttaggaggcatcacaacaatgactcaggtgctgaccataacccttaaccaggtcacagtggctgcctaactgttgaagctgctacccctcctttaggttacaccgcatgaaaagttggcaatcctctctctcggtggctgctgtgggagcagctaacctcacagcacccgaagggatgtcatcgggaccccagctcggtttccagcatcagctgatgccagcaagaagccagccaggcctggggcttggcagcccagggactttaccatccaccatccacagggctgttgccctggacaggtcattgatatctgactcacagccaattcatggatgacgtgaatccaaaaatcagaggcccacgtggatttagacatggaaatgcctcaccagcttccatgagccagtctctgtgcggcagacttgaactgcacgggggctgataggaagcagggtgggcgctgggatgtgactgtgcccttgccagtgtttccagtctcccagctcgggttctgtggttgtctaagcctgggggtgctctgccgggtctgtggcgacccggctgccttttcagcctaatcaccagagaagccacagaaagagctggaccacttagaggggcagtctggccacagccacttggaagaacaggctgattttgtacagatgtgtcattttctcctgacttttaaactgtaaacattatataataccctagaaaattttgaaaatagatataaaccatcaataacactggcaacctaacacttttacctaagagctacccattttgatttatctgatgcgcagttttcattgctggaatcataaagacatagcaccttagattcttctcttttctttttctttctttttattataacataagcatctttcccactgctacttttgatcacttttgaggactcaaaatgatcatttttgggcctgcataatatttcactgtgtgaactctatcaccatttcaatcaggtgtttcgtttgcttccatatttttgtatcaccatagcaggtgatgattgaaaaaataaatgcagcttgcaaagtcattctgaattacatcgtggagctggagagtgttctttcctaatcccttcaaggaattacgatgatatggggagatgaaacattcatttgggggctggcttggggtaagctttaaattgcgtttaaagtcagtgtgatagtgacttgagtttttcatctcttttctccagctccttgacggccatatttgctggccagggttactggtgtggtctttggccagagagcagactttcctctctgtgaaatgaaatgactcataaggaaacaaaccccaaggctttgggtacatttgtcccatcatctaaaccagggtttctaatcagaagtccatgaatgattgtggggctttgtcgggggagaggtcctgaagctgagcacaaaatttggcatgtttgtgataagtgtattttatagggatagtgtctgtagttccatcaggttctcaacgggggctgtggccccaaaaatgttttttaaaaaacccagctttctctctctgtctctttccccctttctgggaatccgagattgaaatgaaagaaatcgaaagatctttgcctacatacagaggtccagtaatgggatggggaatatattatccccgggatagcgccactgtactccagccaggatgacagagactccatctcaaataaataaataaataaataaataaataaataaataaatacataaataaagtgcctctttgttaaggcagttgcttctatttctacttttttaaccaaagctaattgctaatgtgttaaagtacgagattctgccttgattatggccgtccgtggttcttaactaaaggaaatgctttggcattttaaaacacatggatccccgtaagctttgcatttctcaccagggagtcagactgacacacaaatatttgtggttagttaattgttctttcctgctacaaacactcaccataggaggtgagctgtatttaccaaactgaaatgttactatttgaggctgaaggagccaaagaaaccttgaaattcaagagaccaaacccaaaagttccacccaacggagtgggagacttcagctcattgaattcctgaatacagctcggccttttgtcttcacacagcaatgagaacacatggacacaggaaggggaacatcacacaccggggcctgttgtggggtggggagagcggggagggatagcattaggagatatacctaatgctaaatgaccagttaatgggtgcagcacaccaacatggcacatgtatacatatgtaacaaacctgtatgttgtgcacatgtaccctaaaacttaaagtattaaaaaaaaaaatcagtttctgttaacaacaaactctggcaccagtcagcgggtttgacttcctaaaaaagtttgatttgctttctctcttagaaattctgtcttaaatttccttaaacgcaagtgtgtatacctggagcaaagaacatggggtgtaattcaatttctcttctcctttcttcctctgggaatctctgctaggtttcccacttattattgttgaaaactggcagtctttaaaggggatggacttcctgaaatacggcaaacagtcatgcaacaaaaagcagaaaattatattttcattttgggcgtcttagatgtagtgcaacattcaacatgagatcaatgtgccctcttgaccccaaagtattggctaatgatccataatcaatatttaggataacactggttgggagtatgaatgacatctttccaccattgtcttggtaaatgaaactatttactctttctggcagtggatgctgtcgggaggtggaaaagtaagcattttcttacgtttgggttttctgtgattgtttgattatttaatttattcgttcaaagaagagaaagatttactgcatgtctacaatgtatcaagtggtaagatggggcctgaaaatacaaagataaacaaccaaacaaacaaaatggcttttccttgaagagctcaggaggagtctggtttagaaggcagacacgcaagttctatgctactggtctgtaagaagcgctgtgggatcagaagaagggatgacttaatgggtacagagttggtgatgtgtggatgacctcgtgaacgaagactagttcttcaagcagacccgtggaggacaccacagaaaactgtgttgtttgtttagctcttttccagaacttgttatgatctcttaacaaggtctagccaatatcattataagcacgtaaaattcctcatcctaaaccccaccctgaaatcactctgacgacatgtcagccatctgacacagatgtggatagtctgaaagcccaacagttctaatcatttaggttcaatttggtctcaacagagatttttacatgggacttcatgttttacaaattattttagtattatcaatttgatcctttaaggcaggcagaaaacatatttccaccctctactttatagataaagccattgaggctcagagagattttaaaattttactgcaaattacacaggcttctggttttgtttgtttgtttgtttgtttgagacagagtcttgctctgtcacccaggctggagtgcagtggcacaatctcggctcaccgcaacctccccctcctgggttcaagtgattctgctgtctcagcctcttgagtagctgggactacaggcgccacccaccaccatgcccagctaattattgtatttttagtagagatggggtttcactgtgttggccaggctggactcaaactcctgacctcaagtgatctgcccgcttcggcctcccagactgctgggattataggcgtgagccaccgcggctggtcagattattcaattttaaggtcttacgggccacataacatgattgcctttctaaaagaattatttattcatggaagtctgaagcaagagtctcttgaagttcttttttgtccttgataaaatatttacttttcttgttttatcctcctacgagatccctactgtccatgcccacggcctagattggtctctggccttgagccttacagagcatgctgggtcccagggcttgtcctcaatgcaccacacgcagttggctcatgaactaggacctctgtgtcttgaagtgggagtggatggtaggaagggggagatggaaaagcaggggtacaaggctgatgctggcagcaatgaagaccttggtgattcgtggaccatagtggagactgagagggagtggagaggcgaagagaaaccagagcatcattcctgatggagccctgtgttacccccaggctcctttagggcatgagagtgccagggctggaccatctccaggctgcacactttttctctgcagctgtgagcagagcccaggctgtctgtccctcagcatcccctaaatctgcgatgcaatcatagcccctgaatgttagggctggaggcaactcagagatcatccacccacagccctcgctgcacagagacagaagcaatgagatgaagtgactcgtacaagattgcaccttgggctgcaaaattcataccaagtgatccagggaggcctttgaggcattgcattcccaaagtgccttctaaatagttagccagagttatagagtggtgctcagaacaggttgtggacgtttattgaattccatgtgatttaagtgtggttggcgggcagtccacaccaccgccgcgcactgcatgagaaccctgtgtgaagggggcttggggtaatggagcagctgggcccgacccaggtggattcagagtctcccatcactcggagaagcctgcaccttggaaataattcaactccttggtctgacttttgcaagggaaatgtttggggcattttataggtctccatggctgtggtgttttatgacattgaacccaataaaactcgtaatgacacaggatctgccaaggggatcggaccttcccttctggcacaaggaaccattctgttttggtatcccaggaaatgagtggaggaaaatccttgttatttcaagtgaacagggtctgggcaaggtctctgtccctggtcaccttgaccatgtgctacctgtcactgagtctaacggttgctccaattcagctgaaagacaggactcagcaaatagagccttgatctgtccacagggtactcctgtccactgttccagcaaatgtgagaaaacccacttgtcctttgcgagagagaggcaatgctgtcttagtcccatcctaaaggcagaaggacgctaaacaagggtgtttgcgggctacaggcaagagccccgcaatggcctccccgagggatctgaggcccagcaggccatcccaggtctcagaagccttgtaagagcacagtggaggacccttcttgcacgctgagctctgagcagtgaggggaacagctgggagagaggctggggtacaagtgacacagtgcagagatgctgctcccagccgaagctgccactgtgggccttctccatccacccagcccctgtaattgcactgcccccacctctgggctcgagtagcccgtgagcctgctttctggacccatcctggcaagttgctggtggatatacctatgcagcagggcaactacaggcttaggagggctccattccagccctggctgagcatcagaatgggggtgagaggtaaaaaatacagattcctggccctgtttcatactttctgtatcatatgcaggagcccaagaagctattacagtcccagatcatttctgatccaacccaccagtcagcaatacctgctcaaatctaggagtcactgacctcaggcccctccccttcctggggagctcccactccagggttgaggcacgcacatgactttcacctcttctggagtcctcccctccacattccccaacaagctgctgctctgagattcttcccctagtctctccacacaggccagcagtcactgcaaacgcccagttgcaatgcaccaagaactttcagggttttgccctgttttgctggttggtgccaggagatggaagctctcgagtggggtgtgctgtcccctgggctgggtggaggtggccacagcagagaaggaagatgggtcctggaagtacaggcggtctgggcttacatcctccctgtgccactcccggctgagggacctcgagcaagcttgacctccgtcagtcttcatttctttacctgtagagtggaggtctggaagccggcctcctgggatgctttgaggatgaccaggagctgagaggtagtgccaggggtcagccatgtcagtggctccacctgagtcctcagggcctgggggagtgtctgggacgaagtaagcagccggcgcacaggggtcctccctgctcccctttaattgcttgcgtctctctggggcattcttttactgtctttggcttcttcctttgctgcagccctcatctggatgcctgcctctatttcccccttccttccattttctttaactgcattatttttctgtctttagaggccagtcacttacctccttaattttcaaagttttgtcttttctaatattgtatcagtgcttaaaatgcaattttccccgccactgtagtgcctcatgtcatatgtgctgcgctgcatgcggggatggcccagaacagcttcctgcagtctgtgttcttcagaacagtggcttcaaacaggaaatcaaacagggaattgctttagttgttcatgaaatcaagtgggctcctgctggcattttaaaaacaaaatcatatagaatagagaatacccaggggcattgcctgtaggaaaggctttgggaggcttttgtatcctggtgtggggatgggtgtgcactcgcgtgcctgggatgtcaggcactgtagatggaacaaaagttcatgcccagatgaactgataagcagatcgtggcctgtacattccatggaataccactcagcctttgaaaggaaggaaattccttcacatactgctacatggatgaaccacgaagacatgacgctaagaggagagagtcagacacaaaggagaaacactgcaattccatttaaatgagtccctggagtagtcccattcagagaacagaaagtagaacgggggtgcgagagcctgacgtctttctcactgacagccacagtaacaaagaacagaaagcccgacagacactgtcgtggatgctcttagaccacaccgcacagtggagacttcacagaccccgagtcctgcacttggtgggtgggtctcacgaccgcccttcccccttgcggtgcaaagaaagttcaccgccctattgctgtctctcccagaggatctttctgacctactcaaggaacatttattaataatctattgagagaaagacaatctagtaggtcttatgcattttctatcttctcccatttttccatgaacgatatctgttagagcagccctgttaaactaactccccgacccagcccccagcccctgacacctgttactctaccatctgtgtcgatgaattgggctactttagggacttcatttaggtggaatcatacagtgtttgtccttttgtgtctggccaatttcacttagcacaatgccttcaaggctcacccatgttgtagcatgtgccagaatttccttcctttgtaagactggattccattgtacatatagcccacactgggcttatccatccatctgtccatggacactggctgctgccacattttagccactgagcaacactgctgtggacacaagtgtacaaatacctgctcaagtccctgctttctgtcattctggatacacacccagaactggcattgctggatcatatggtaattctatgtttaatttgtcgaggagactccatacaggactttgaattttactctgaatgagagggtgacactggggagttctgagtagggaagcgatgtgatgggacctaacatttttatagggtcacagtgggctgcctttgggaataggcaggtgggaggacagggaagaggagagcagggaggagttgctgtgtgtatcctggaaagaatgaaggtggcttagacccggctctcggccaaggcagagagatgtccattcctggctgcctgtggacgggagagccaacagaaatcggggtcgcatgtggatttgtatgtgcagaatacgagagaaagagcatgaggaagagaagatggagctgccattcacagcgatggaaattgaccaggaactcacctctggccattttaagtctgagacatttactagaagtccaagtggccacagcacttggtgacattgtcagctggtcctctgacttctaccagccactttccctggcccctttttggcttgagcctcccagctgccaagcacgcctggatgttccagatgttttcaggttcccagagcccttgctgtagcagctcaagccttcctccccggcctcatctgctttccccgtgatgtttgagagcttttctcaggtgtgtgggaggaaacagcatgttgggggccaggagacagccacccagaccttgacaaggcaggggacggcttcagctcccgaagaccctcttgcgttcccagccaagccagaggcttacaggctgctgaacgcacctgaggcagcacccatggtgcagccctggtgctgcaggccaagctcttggtcctgtcacagggagaaagtctatgccccgacagcttgaacctgagtcaagggtcacctttcagagctgaaattgacttcttggaaagccagagaaatgcattttcccatagcattgagggcaccccagccctgtgcccactgagggagggaagggggcttctagaggcatcatcagagcaagatgtgagctggctttgctttgacctcactgtcagggcctgccccagatgccagcactcagagctcactctgcagaagagggaaccgaggctgggaggggcgagagagtgtgcagggtacgcagtgggtgaataagtgagtcaggtagagagcccagttctcctgggccccaggtgtgccagcagcctgcacagagtggccttggcttggcggtctttccccacaaagcatggactctcagaatcagaccccagctgagacgaagcaccagatggattgctttttagacggtgcatcctgttagagcttaggcttcccagagtgaatacgcactttcgtgtgagtttttgcaatgcattcacttttttagaaaacttccctgtagatgcccgctagatactgggttctgattctgaacacagacaccccactgtaggtggattggtggggggcagaagattttaatctttgggaggattgaggggtgtctctctcccttgcacctctgaaggtcactgtcacgctgttgctggcatctcagcatttccatccacttctctatttccactaacaatgccctagctctgccatggccacctctcaccgatctcctgcggtggcctcccatctagtgtcctgcttcacccgcaccccacaatctcctccacacaacagctgcagtgatccctttaaaggtaagtcagctcctccttaaaaccatacaatggtccaacacggcatttggaaagaaatcccaacccttccccagctggtctctgggccctgccctcctctcaccatccctggctgctctgctccaagtgcagggagcctctttctgctctgggaatctgccaagcctgtgcacttttagagccgtctctctgctctgccctctgtgctttgcaaagcctctccttgccactgaagactccagcatacgtcgcactttctgggagaggtctttctcttatctaaatacccctgggcctgtgcgatgattctgtcccgtcatcctgtttgaatttctttgtggcacttacctctcctagaaatcagtggccgtttactttgctagtctgccatctgccttcccctctgctctcctccctgcatcaactagaatatgggctccacggagcaggagctgccagctgtggcctccagcatgttgcaagatctgtctcaaaagttcttgttcaggggataatggattcctcaaaggaaggaatcagaccctctctgggactcccctgggtgctagaggacctcgctaccttcatgtggggctgctgggagccaacactgtcacagcgtttctggacagcaatttggctgtctagaccagaagctccgaaacagttccacggtattgaaccaaagcaatttttcttctgagagcctaaactgagggaaaaattctaaaatgtaggcaataattcatacacaaatattagatgaagctatatacatacatccacatgtagtagggaaatgtcaaaagtggtatttactattagcttgaatgacattaaaaaggtttatggtacagtattaagtaatatgaaacatacaaaagtttatgtacagcatcgtaacagttcatgcttatttagaggacttgtgccagtcaccacatcgagaactttatttacattttctaattctctgaacaaccgtgtgaggtagttattatctcaattgtattgactgagaaaatgagacatgaacagatcaaggaagctgacaaatatggcgtagtttgtaaactgtaatgtgaggatttgaatccagagcctctcactccaagcactccatttaaactctactgtatgctgatttgagtttcataaacaacttgaaaatgtgcatatcccttgccgcccccactatcagaaagactaagaagaaatacaccaaaatattcacagagattgcctctgggtattggggttctgggaaacgttttctttataatttcctgtatttaaatatttttctgtaaagagcacacatcattttcatgtaaagttttgaattttatcaaaagattagtagtcacacacaaaccacagataactttggctaattaatatagagtcaaaaatacttctataaaacaagctatttcaatcaaacatgatgtttaatatgattaaggagggctcattccactgtgaaaagacaacttagcattaagaaccacatagccaggcacggtggctcacaagtgtaatcccagcactttgggaggctaaggtaggaggatcgcttgagcccaggacttcgagaccagtgtggtcaacatggtgaaaacctccctctataaaatttacaagaactagccaggtgtggtggtgcatgcctgtagtcccagctacttgggaggttgaggtgggaggatcacttgtgcccagaagattgaggctgcagtgagccgtgatcatgccacacacttccagcctgggcaatggagcaagaccttgtctcaaaaaaaaaaaaaaaaaaaaaaaaaaggaagaaagaaaaagaaagaaaagaaaaggaaaagaaaaaagaaaaaaggaaacataatcaaaggcatccctgtaaaagcttgttgtaacctaaagaaaaaggaaacttcctagatatcttctgcaagcctatagccagattcagaagtgagagacgcctgctaacattgagataatttaactttgttttgggaattcttgccagtgtaatacaacaagaaaaggtaatacaacatctacacatttcgaaaaaaggcataacagatgatctgtttgtctttcagggaaatctaagacaagtaattgaaaagctattagagctaataagagaactgaaatagacaaaaatcaatagctttctttttttcaacaataacattagcaatgccaattctccaaaaattgtatataaatttaaatttaatgccaataaaaatgaatgcaggaattcatagcttgtcaaaattatagccttaagttaaatcagaaaaatgaatgagaaagaataatgaagaaaatcttttaaaaaagaactgaaactgtatcattaaactggagtaattaatttatgtggttctatgcaggaaaagacagagtccagaaataggcccatgattatgtgggaattgagtaagtgataaggaaggcaattcaaatcagtaagaaaaatggcttttaaaaaatttattatctaatatttgatttgtcaagtcattaaataattatctataccctaaagatatcctgtattttttctaaaagatttaattttcacctttgatttacaattaataaaattttttcttgagacagagcctcactctgtcaccaaggctggagtgcaatggcaccattatggctcactgcagccttgacttcccaggctcaagcaatcctcccatctaagcctcccgagtagctgggactacaggcgtacatcaccatatccagctaattcttctaatttttgtagaggtgaggtcccactctgttgctcaggctggtctcgaattcctgggcttaagtggtacgcccaccttagcctcccaaagtgctgggattgcaggtgtgagccactgtacctggaccatatttatgtctttaatcaatttggattcaatagtcaagaatggttgagcagtaaggccacagttttatgtgaagaaaaaagttttctcagcctcatttatcgagtagctcataccgccctggagacgcacagtgcctccccggcatgtgcatgagggtccgtctgagactctccgttcacttcctgttctatttttacactccctggtccgttccatcttcattactgcagcttttagtaagtgtggacatctaggaggggactcctctctatcttggttttttttctcttcatagatatcttttctatttttgagccttttcttatgcataaaattttgaaaaccagcttgtaaagttcctcaaaaacaccctttggaatatagattggaaacacatttgatttttaagtaatttggagagaatatgcctcttaatgatgagtcctcctaatcatggtaaatccatctttccttctgtttaagcccttctttaacatcgttcagtaaagtttacgtctccatacaagtttgcacatattttattaggtccatttctaggtaaattatgtgtttagttggcattggaaatgagctataaaaaaaaactacatttttctaaatggtcaaaatatatgaataggccgtatacagaggcaaagaatccatataacccatgagcatctcaaatataatcaagggaaacaaattaaaacaaaaagatttaatttattacctattccactagtaaaactaatgtttgacaatacgagttttggtgagaatatggggaaaatgaaaactctcaggtattgctggtgggatgataaatgggttcgatcgctttggggagtgttttgggaacccatagtgccactgagggaacatagcccactgccctgtaagtccataggtaaattaaatatctaaattccctgtgttgttcagagaaactctcacatatgtgcaaaacagggaatgtatgaggttgcccatcccaatgcatttcatcattttgaaacagtgtcccttagaaaatgaatgaataaaaggaagtttattcacttaatagaaaaggatacagtaaaaaaaaaaaaagcactgggaatctgtgtattacaacaaacaaatctcaaaaacacatatttctgaaaaaaaaagcaagttgcaaaaaggttacatacattatgaagccatttttaaaagtctaaaacatacagagtagcaatatatattgtttataattgcttatacatgtcgtaaatgtccaaaatcatacatggttaacacctactaactccatgatcattattaattttggagagaaagagaggagaaaataatgaccaatctttagttgtatcttcatatctggaacataaaaagagagaggaaaaaaagagaaggaagaaagtgtaccaaaatatgaatatctgtttgatcttagcagtgtcacattattttctgtgtttttttatacatttaaaatattcatagctagtggtgaaaaaatttcttaaatagttgtatatttctatcatctaggagtgaggaagacatttgcaagtgtgaacgacacaggaaagattaataggaaagattaataaattgactaggtagaaatgatagcttttactgcataatacataccatgctgtaatacataatacaaacacaaagttcagttgggcatggtggctcacacctgtaatcccagcactttgagagaccaaggcaggaggatcacttgaagtcaggtgtttgagtacagcatggcgaacatggagataccccgtctctactaaaaagacaaaaattagcgagcatggtggtgggcgcctgtagtcccagttactagggaggctgaggcaggagaatcacttgaaccccggagaaggagattgcagtgagctgcgatggcgccactatacaccagcctggatggcagagcaagactccatctcaaaacaaacaaaaaaaattagtaagttaaaaagcataacctaaattaagaaaaatatttacatttatgacattaatgtaaaaattacacatatttatcacataaagaggtcttccatatcattgacaaaatgataaataccttaatgtaaaaagtggtagaagacgtggatgatcaaatcataataagagaaacacaagtggctaataagtacatgataaaatcaatagaaaagtaaattaatactatgttgttcatcacttttcactgagcagattgacaaagttgttttttttttttttaatttgttataaaccattgtccagggactggagaaatggcttccttcatcacggtgagaatgtaaaccagtcttacctttataaacattaatttagcttcatagatcaagatctttaaaaatgtgcatattcttaaacaccataattccggttatggaaacatagcttaaaaatattggacaattgaatatttaccttacaacaatgtttactgtgggtttatttataacagccaaaagttgaaaataacttatttgaccattagtgattaaataaattaatggtaaatttgtacaatagcatgcagttattcatatggttcaaaattacatttatttatatataatttatactgtactgttcacagaaataaccaagttatgacacaatataaacagtttggcccatttttcaagactatatgtatatgtaacacctttgaaaatgcatacactgaacattcacaacgattttccattggtggtagggttgtaactgattttttttcctttgcgtagatgagaattttctaattttctacatgtgcagtacttgcttaataaaaaatgagattgaaaagtaaaagaccacttttttgtaagccagctcagaaaggatgaaaagaataataacccttgtttaagaaagtacagggaactacatacttccatactgctgtacgaaatgtctgaaggacaatttgccaaaatatatcggaagacttagaaaggttatgtatgctcttgagcgtgggaatcccacttgtgggatttttaacctcaacaaaaattaagggaagatatgaggaaagagaaagggcatgagcaaaggacatttttgcagcatgtttatgatcttgagaaaatggaaacagctggggtgtgcggcagaagaagtggggaaaatgacaacggttcattaaacctcacgatcagatgctgacagcccctcacaggttgctgcagacaaaacagggaacgacaggaaaaagatgaccgtgatacgctctgctaaaagcaggtcgcaaaacaggatgtagataatgatcccattttgcttttttacaaaaaaaaaaaaaggccatggaaaattacatatcacgaatgttcagagtggctgtctctggatgatggcattggagttaattttatctttcactctattttctgaatttcctatatcaaaagcaaattgatggtgtgaaggggaaagcatatttaatgtgattcctaaaaggctcagccctccctgcatggattgagcactgaaagaagagggttctgtcacctctttcgtgctgacccttgccttttctaatgttgctcagaggcacacagacgtatttgctttaagtaattgcttgtctgtttttaatatcacattttgaaaaggtatttagacaacatgagtttattactttctgtttaacccaaatccttcagaggtacttaaagcaaaatgtaaagtcctcttatccctttgtgaatttcagtccccagaagtctcactgttagtagtttgatttttaccaaaaatgtccaggtattttcttttcatctgcaaatgtgttaatagactcctttttttaaatttcacacaagcaggattatatcatacaaaacattctgcaatttactctttcatgtaacaataatgtatcctgggtatttttctttgccagttcagatctcttttatccttttactaatttatttacctatctattcatttgcttaacttgattttattattatacaagttatccatgaatattgttttcaaaaatttaaacagtcagaaaaggtataaactgaaaactcaaaagttcgccttccctgccaccactcatgtgccctcctcagaagcaaggaatggagcagcttttgtggggttttttgttttttctctgagacagagtctcattctgccgcccaggctggagtgcagtggcatgatctcggctcactgtaatctctgcctccctggttcaagcgattctcctgccttagcctcctgagtagctggaattacaggcacccaccaccatgtccggctgatttttgtatttttagcagagacagggtttcaccgtgttttcattagagacagggtttcaccatgttgcccaggctggtctcgaactcctatcctcaggtgatctgcccgcctcggcctcccaaagtgctgggattacaggtgtgagccaccgcacccagctgcagcttttgtttttaaacattcttttcattacagttacaacttcaagaaatactaatgccaatatctctgagctaaatacactgacagatgcagaatgcacttcatcatgctgtctcttttcttacctggctttcacctgcacactcccctctccatttcctagatttttatcagctgttttgtatcctagtgattggctttatgactttaaataatatatttaaatgtttacgtctcaattcattagctttaggcagtatctgaagttaacacctgctcacaaacactgctttcaaattcacatcctacttttttgttatactgttatttttacatattaaggcttatcatatatatattctggctggacttggtggctcatacttgtaatcccagcactttgggaggccaaggcgggtgggtcacctgaggtcaggagtttgagaccagcctgggcaaaatgatgaaaccccatctctaatacaaatacaaaaattagctgggcgttgtggcacatgcctgtcgtcccagctacttgggaggctaaggcaggaggatcacgtgaacctgggaggtggaggttgcagtgagctgagactgtgccagtgcactccagcctgggggacagagcaagactctgtctcaaaaaaacaaaaaattatattctgttgtgttcagtgcttatataattttactgtgtttcatcagtaggttagtactcaaaactttttcagttgaaaatcaggcactacaataatataactatgtaaattttgttctgtagaattaagtgggataattgaatacatagagaaggccatctgatactatgtcattaaaatttgccatttgagggagaatttcccaaatatcaaggttttatgaagcctctttcgttttcttttatgtgcttgggggtcacactcggctatccttatttcttataactcatgtcattcttatttgcagtttcgttagaggacgtcctagtgtcgcttattctttcctgtacgtgcatgctcgcaaggggtctttcactgtccttaaggcttaatgtggacgtctagacagcaataagctttttctaccagcttacaaaactcaacacaccaaagactatacaaaactccatacccttcaatggcttgcaatgctctttttaaaagtcacctctaagggggtgtaaataacattccacaaaattcacccatttggggcacaattatgcatttttgcaaatatatactcttgtataaagtccaccacaatcaaaatggacaacattttcaccaccccaataagtttcctttagccctttctgttcataccccttatgctacctccaaccactgatctactttctagaaccatagctttgccttatctagaatttttctttctttttttttttttagtggggaaggagtttaattgacataagcctagcccacacaggagaactgagttgtcactgaaattagtctccccaaaggtgtgaaggtcaggacttttatggacaatttggtgggcagggtaatagataatgggtgttgctgattgcttgtaaaagaaatcgtaggggtgtggaaaattgcccttgtgagtgagtactcctttgggtggggccacaggacaagttgagtcatgagttttgagtttgggtggggtccattggttgccagaatgcacaagtctgggtgtaaaaaaaaaaaaaaatctcaaaagaccaatcttaggttctgcaatagtgatgttatctacaggaccaaatgggggagtcagaaatcttgtgacctctggccacatgactcctgagcagtaagggattacagaaattatgcctacattttagcagaattcaggtccccccataatcctgttcttgtgggctttcttagtcttacaagggtgatttttgctccctgagcaaggagggggttagttttggggagggactattatcatccttgctttttctttgagacagagtctcactctgtcaccgaggctggagttcaatggcgtgatctcagctcactgcaatctctgcctcccaggctcaggtgatcctcccacctcagcctcccaagtcattggcactacaagcacatgcctccatgcctggctaatttttgtattttttgtagagatggagtcttgctgtgttgtccaggctggtctagaactcctgagctcaagtgatctcccaccttggcctcccaaagtgctggaattacaggcatgagccactgcacttgatgatcattcttgcttttaagttaaactataaactaaatttcttccaaagttactttggtttatggccagcaatgaccaaggagagcttggaggtcagaagcaagatggagtcagccatgtcagatttctcttactgtcataattttgcaaaggtagtttcaatccccctcacacacacttgggcttcagcacccctcaatcctgaggtgttagctacggagatgagaaaaggctaatgattgctctaacttcttcctgctgacagggggcatatttgggggaggggttgaccccagggtaaaaggagtggaagtgtcttgcagttgcctgtatgtattcaagtgcaacttgttggggtccaacatgtgtataacgaaaacattggtgctcttatccacagatttagtacagcatttaagaagaaaaataatgagccgtaaaaaggaacgagattatgtcctttgcatggaagtggatggaggtggaaggcattatcctcagcaaactaacgcaggaacataaaaccaaacactgtatgttctcaattataagtgggagctgaacggtgagaacatatggacacacagaggggaataacacacactggggcctattggggagcgggaaggagagcatcaggaaaaatagctaatggatgctggaccgaatacttaggtgatgggttgataggtgcagcaaaccaccatagcacacgtttacatatgtaacaaacctgcacattctgcacacgtaccccataacttaaaatttaaaataatagtaataataataattagccctaatataaggagtgaaagtgtaaatcgcccagtgggttcaccttgcccgctgcctagacaaagccaatttatcaagacagaggaattgcaaaagagaaagagtaattcacacagagccagctgtgtggaagaccggagtcttattattactcaaatcagcctccttgagcattcggcgatcagagtttttaagaataatttggtgggtggaggaagccagtgagtcgagagtgctgattggttgggtcagagatgaaatcacagggagtcaaagctgtcttcctgcgctgagtcaattcctgggtgggagccacagatcagatgagctggtttcttgatctgggtggtgccagctgatccatcaagtgccaggtctgcaaaatatctcaagcgctgatcttaggagcagtttggggggtgggagatcagaatcttgtagcctccagctgcatgactcctaaatcataatttctaatcctgtggctaatttgttagtcctacaaaggcatctagttcccaggaaagaaggagggttcttctggaatgcgctgttattgtcttcatttttaactacaaactataaattaacttcttcccaaaattagttcagcctatgcccaggaatgaccaaggacagcttggaggttagaagcaagatgcagttggttaggttagatctctttcactgtctcagttgtaattttgcagcggcagtttcaaaagtcctagcttcaggagtccctgtagaactgacctgaagcctcaaggaatccaggtgaataaccccaaaaatcaaccaaatatggggtcatcagcagaagctcaagaacaatggatgaggctggaatctaataacaggtgtgctgtagctgttttgaaacataatttttctctctccagtttatttttactaaagacaagaccaatttatttgcaaaataagcttgccttattatactttgcctaattatttacataaagtgcagcaagaataattattggccatataggctctttttttctaactggctttgctggaatttttttcataaggaatctcagattagaccttttaaaagtctcttgagcccagccaaggatttatttgtgcctgcagatacttgtatgaattgggtgaattcctttcttcttgaggtcccaacaaagcttggagttcctgggcctgtcagaaagtgacattctttatttgccacaggttgggaatcctgtacaggacaaggtaggaggccagttcctccaaggggctttcatcagctctgtaggtcagcctcgatttcttaaagcagtctgaaaatatgtcatttcagtcaaagccttggtaaaataagcagtgtctccaactgtgtcttgctacaaaagaaaacacattcttattgaacttactcaagtaactatattgccttatgttaaaaatagtcacagataatttccaaattctggagaaggcaggtaaagagaaagaaatatgctctaaattttgtttacaggagtatattttgctcaattgttaaaagttgtattctcagtagaagttttctttactctgaaaaacaaaacaaaaagaatcagcaacattttaagtgaaaagtcgaaaagatttttccagttactgaacgttttggttgtttccagctgggagctaattaatatgagtaacaatgctaagaacatatatgtcaagtctttctgtggtcatatgtttttatttctcttggataagcaacaagaagtgaaatatctgggtcacaggttaagaagctcccaaattgtttcctaaagttgtttcgtttcaccttaccatcagcctcaggtgagcattctagtttctccacatgcttgccaacacttggtatgatcggtcatctaattttagcatctgggtggttgtgtggtggcatttcactgtggttttagttgccattcccctaatgactgacgacaccgaacacctgttcatgggtttgtgtgctgctcagctgtcttctctgttcaactgtttgttaaattgaatttttggcttcttttatagagtttaaaagttaattatatattctcatatagatacatgtttttcaaaaatgtcctgcctgtctctgatttagctatttcttttcttaatggtgtttttaaagtgcagaagttcttaattttgaaaagtctaatttatcaatttttcttgtatactttatgatcttctattctaagggaataatctattctaagggaatagaaggtcacgtttgtatgcttctgactcatattctttatatcctttgtgacaccaaggtcacaaagatttccttctaggttttcttctaagaatataatgtacctctttaaagcagcttttaagattgtttttatttatcattggttttcaacaatacgattataatgtaccttggtgtggttttcttcatacttggggttgatattcttgagtcttcgggtctatagcttctatcaaatttggaatttccatttttggtttctttaagtttcatagtctttctggtagcccagttacgtgtcttctgactgcgtgctaatttctccgcagtcactgatgctctgttgtttatgttcacctttttctccctgtgcttcactgtgggtactttcaattgcagtgtctccaagccctctgaccttccttctgcagcacccaatgtactattcatcccatctagagttttggttgtttgtttgtttgtttttgagacagagtctcgccctgttgcccaggctggagtgcagtggcaccatctcggctcactgcaaccacagcctctcgagttcaagtgattcttctgcatcagcctcccaagtagctgtgattacaggcacctgccaccaaacccagctagtttttgcatttttagtagagatggggtttcaccatgttggccaggctggtctcaaacccctgacctcaagtaattcacctgcttcggcctcccaaagtgctgggattacaggcatgagccaatgtacctggtcatgtttttttttccttttataaaaaattttaatatttatttatttatttatttatttgagacaaaatctcgtctgttgcccaggctagagtgcagtggtgtgatcttggctcacagcaacctctgcctcccaggctcaagcaattctcctgcctcaggctcccaagtagctaggattacaggcacgcaccaccatgcccagctcatttttttttttttttgtatttttagcagagacagggtttcaccatgttggccagactggtctcgaactcctgagctcaaatgatcctcctgcctcggcctcctgaagtgctgggattacaggcatgagccgccacttctggcctctcttttttcttaatttcagatattgtattttttttaatctctaggagacccatttaatttttttatgtcttcattttctctcttcattgtcttattgctttcagttatatatttgaaccagtttatatatttttgtcatttctgttttaaggcactagtctactaatatcaaaatgtgtgcaatttctgctcatgttcctctcaattaacttttctcctagttgagagtcatgtttttctgtttctttgcatgcctggcaattgttactggatgacaggcactatgagtgctgaatatgattagtgagcgctgaatattatcgtgtttctttagagagtgtcacacttgcatgtggcacactgttaagttacctgtggataaaattggtttttgaataacagttctgtgacttactgtaccttcagcaagcccttaagcctcaaggagcctgagtttcttcatctgtaaaatgggaaggtatatgtctgctgtcagggctacatataatacatgaaaagcatgcagtaaaatgcccagccttgagtcagaaggtgtactaggcactgtgccagcatcattagtattcatgtttttatgtgataggcaaatcctgcaaccgttttatgagttaattttaaatctctgcctctctagcaggacatctgtgtctctagatccactcagtaattacaatcaacccaagcatgttaaaggcctgagaccttttcttttctttttctttctttaacattttccattctcatgtttgaaagcataaaagagaacctttcagtctaaatgttctcctgcaccctcaaacccgatggaggtgcttctcactgcacgctcccttcttacacattccacctctgggttctgccaaggaaacattggagaaacagctccaaaggattgaatgatgtccagggccttttaagagaggttcaagtcgtgaccagatgtgtatctgggtaagatacgtgtgaacctccgtgggaaagaccaagggtttgaagtcagagatgtggctcaaatctctcttctgtgcttcagtttcttccctgtctgccggaggaggaggaggaggaggaggaggaggaggaggaggaggaggagaggagtaggaggagggggaaggggaggtggaggagacggagggggagagggagggagatggggagggggaggatctatctagtttacagggtcctcatgaggctcatgtgggaaaatgctttgcaggctggaaagtaccacagaggtgtgagttattataaaaagggaagttatttccctctgtcaaaaagctatgcagaaatatactaatatgtaagaaatgtttgtatggaggacagaaataattcatttcatggagagacaagaggatcactggcagtaaaactgcaggcattatttatgggagactcaaaggagggaatgccccgtgttggcgggcctgcctttcaatccttgtcacaagtcatgatccagaagctcggccaattgaagaaagggtctccatgaagtggagctcatgacctgcctgcatcagcatcactgggggcattttttaaaaatgcagataccagcactgctggggctggggttgggagtctgcaaactcccctgctggttaaaatgcaaactgaggtttcagaactattgtgccaaagaatcataactgactccattgggaagtaatgacccatgatttgatttctcatttaatttttcaaaatgcaaacaatgcaaaaagttaaaaattgaaaaataggttaaggcccatagtctcatcaatacaagacacaactgtagttggattaacattttggcatattgctaacatattttaataatcactactgtgagagttttttaaaacataaatttacatggtgttccccccccaaaaaaattcactcacataaaggaattttatccgtccccagaattacctaatgaatttcaagcttctctgttagcagaatcaaatgtaggtgactcgataaacaagtgtctgtctttgacttaacacagctttataaaaatgccttcttccttccttcctgaaggtctgctcagccccctcaaactttttaccacctgaaaatcttttctatcaattttaccacaatggggggaggtgaatttccacaaaagatcttttcactttaaaaaattgaaatggccacataatttctcctcctaactgtgccgaagtacctaaaagtcacaggttggcattgctaggtcagccttttgcaggggccacacgtgcccaaggcccttacacacccagccaggtgttacagagcagcctctcaccatcaggctctgtgctagtgctgggaaaagattctgctggcatttaaaagtattgcacaaggaggccagatgcagcggctcatgcctgtatccaacccagaactttgggaggctgaagtgggaggattgcttgagtccaggcattcaagaccagcctgggcaacatgatgaaatcccacctctacataaaattgtttaaaaaattagccaggcatggcagcacgtgcctgtggtcctagctactcgggaggttgaggtgggaggatcacttgagcccaggagttcaaggctgcagtgagccatgatcacgcctctgcactccagtctgggtgacaagagacagacagatgaatgaaagaaagaaagaaagaaggaaagaaagaaagaaagagagagaaagaaaaagaaaagaaggaaaggaaagaaagaaagaagaaagaaagaaagaaagaaagaaagaaagaaagaaagaaagaaagaaagaaagaaagaaagaaagaaagagaaggaaaagggaagggaaggaaggaaaggaaaggaagggatatattgcacaaagcattagctgtgaatgactgtagcacacactctacaatccagcaatggaaaagctttgttttctgaacgtgttttctatcttcatgtgtttggaaaaacacctatttctgaaatactacccaaccctgttgggagtatgcctggtatttttttctagtgttcccagtttctcatcctttgctctttcaactcccaactaacaagtgtggaaggactgatggaatcagagcacgcccattttgtaaccactaatgggacttttaaatgtcggtgaggaacttgtcaatggaggaatagggatgcctgagcctcgacctatcttagcatcactaaaatggtgcaggtaaacactgtgagcctcctggtaggatgcaacatggagcacagatcacctcctcgacagcatctctaccaagaggggctgagcttgaatctaatggagcctacagaggtaactctatgtgtaagaaggacgagagggaagagcaagtgatgaaccatcacaaggacgcaaaatccaaaatggagaacattctataggactggcctttacaaatcaaaggcttgaaactaaccaaagtcagagcagaagggactcctgtttaaaggaaacctaagacgttgagttatatacgaaccttgtttgaatcctgagtaggacaaactaagcaagaagctatttttaagtcaattgttaaaatgtgattatgaattgggttcaatggctggatggttagatgataccatggaaatattgctagttttgttagatgtgatgaagtaacattggggttatgtgagcaaatgtctccatgctttagaaacaaatgcaaaatatggggtggtgaaatgacttacttcactacattgatttcgtgttgtttccaagtttcattcatttagaggaaataaaatgatatgatgtaaaatactgcaacccagaaaacaattttaaagataattattgaatgtgggtgatgagtgtagaagagttctattattattaatattattattttatttatttttttgagacagtctcactctgtcaactaggctggagtgcagtggcaggatcttggctcactgcaacctccacctcctggtttcaagcgattctcccacctcaacctcccaagtagctgggattacaggcatgcgcctggctaatttttataggcacgtgcctggctaatttttgtatttgtggtagagacggggtttcaccatgttggccaggttggtctcaaacccctgacctcaaatgatctcccacctcaacctcgcaagtgctgggattacaggcatgaaccactgtgcctggccaatattcttgactttagtatattttggaaggtttcataaaaaatagttttcatctaaaaaaatctgttgtagccatccttctcaggtctggctagcgttttctcccaggtggaagtaatttctttttgctgagctcacaaaacactttacccaggcctctctttggtacagaatcatgcccactctgaactgatggaatcgggtgcatgcctttcctccttattttcctgtgagagtgggctccatccttgtttcatgcctgtaccttccgctatgcctgacatagttcatggttgacagcaactgaatgtctgtggctgaatgaatagaagaacctcgttgctaggaactgttatcggggctgtttcaggttcacatgtggagaggtcagtattagggcaaaggtgaggaagcctcatttcagtggtgttgtcctgagttgagacatgaaacatgaattttaactcaaattctttggccccttctttaattcagagccataggccaatcaccgtactttcttcatttacaagatgagtatagcattggtggtttgtactgggagaatttggaattctggatgttggtgagatgctccatatgggatctcatgccggcagctagcatggcattgtgatcgcgacacccagggtgagtcccagctttgccagtaggtacccctgttctacctggatgctacccacctatgtctggcaggtcaaatcagaaaggcaaagcctccagcacataacatggcaaggcttccagatacaaaatagcaaaactattttgccacaggggagatgatagggaatctgaactgtcccctccaagggacacagagcctcaggcagggccacaggtacacctgttttgtgcagagggctcaagcagccctggagacagtaacaccctccagctgccagctctgccaccttcagcatgaccttaccaagccacctcgcctcgccttcttcagtggtaaaatgaggataactgtaaccaatttatcaaggcaaacatgtattagaaaaaaagaaaaactcgttatccgtcaagtgcttttcaaccatgtcatgctagccaagtgcaaataaggggtttctagtttctctatttttagttgatgcctccaccacaccccttgtttgactgaagctgtgtttcaggctttgagcatctcccaaagcaaacattgactgccctgctctggtgaaagtctgcattagagggcctagctggtttcaaataaacaaacaactcccctttcccacttcccctcctcttgctgactcccccgactagacacacatgcacacggtgcacatgcatgctctctcacacatgcatatacacgtgcacacatagacacacacacacatatatacacacacatattcaagcacatacacacatgtgtattcacacgcatgctctcgctctcacacacacacaagtgcacataagtgtgtatgcttcctctcccactctctcacaaacatacacagactcacacccttcccacaatgcagcaaagccatctggagccccagccagtgtgtgatgcgttttgcctctgtctggacttctgcacttcctggcttcacccaacctgaaactgctgggtgcagcccgagcaccagtgacagccctggttgtcccatggcctcttgaggaacccaggtctccagtcaaagccactggagtagggggacccatagagacctgaggtactcatgagacccatggaaaatcatctgcacacacactgctaaggagtcaaaggacagaagtgtaagtagtgggtcatttaatcttaggaattttactttctgtccggttctttgttcaataaattgaacaaccaatgttcaattatgttgtctcagtggacacaggtgtttgccaggaagcttaaagtcaatggcaatatggctggccagactaagaaagacaagagggctggtcacctgggcagatgcggaagtatgagtccaagtctggggaatatactaggagctgctgaccactggcccttcgttgagtcagggaggctgagagaggccacgaaaggcctgaggttcaggcagccctggctggccacttaacggtcattgtcaagaactgcaggctggccctggctccaggccttatgctcctctgttgctgggcaaatcactcaaatcctccttttatttttctgcttgtatcaataatatatgcttagtattaaagaatttaagaaatatatacaattaaaagaaagaaagtcaaagtcacatgaagtcttataatccaaaatccatttagaaaatactttggggggacctgctttgcattagcacacacaccgttttttaagtccgctggttttttttttgttttgttttgccttacaccacacctctgttttgtactctcccttcctctaacaataaccacagtaaacaacttggtgttcatcctccccagcctctttctgtgtaatatgcaaacatatctacacgcctgaatagaggtttcttttcatttggtgtttgcaaatatgggattccctcatgcacctctttgggtcttacttttctcgtgtaacaacatggtaccgaaattcctcttgacctcactggtgaagatccagcacattttttttagtagttgtgtgagagatttatagagtgtagatttattcaacaagtctttaattgctgggcagttacattgttgttttctgtttgggattttttttcgggggaggggattgtttttccaactattactacaacaaacattttcatctctcacatgtgtctatataatgatgttttattaacctgagatagtccagagtgggactgaaactcaaaaggtatgagtgcttttttattttaacagaatttaaaagattgccctttaaaagaatttaaaagattgcttcttccaataatatttcatgttttgtctaataaatatttattaagcccacactctgtgccagacattggtttagcaatttggattcagcaatgaataaaacaaagattccagctctcacagaagattaatcctagaaatggagcgtgaaggaacaaatgaaacaataattataacaaacattttactatttgggtttgtgttgcactaacttcctatttcttatctttacacatttttctattgaatgaattatatgctgcaatatacttcctgtcaaaagtttatgagctttgtatatattatgaatacacatttatctgatgctttgcaatctcttacccaatctattgcttatctacgaacttcatgagtagtttcttataccatctaatatttttaatgtttatgaatttgtactttttttgttctctcttcgcttctgggtattttatctttgttagtagttgtctccaaactctgggttatatacacagtttcttacatttcttttaattacatttttgttttttatttttttcagtcatacacctagaatttattttttaatatcatgtgaggtaggggttcaattgtattttccttaaggtaaatagtcattttcctaataccatttattaaaataaactatccactttctactgaattaaaatgctatctttttcacatacgcgattcctgtatttaccaaaatctgtttgtatgttttttattctgctctgatgattgttgtctacttttattattccaatttcatgcggttttgattacaatcttctatttcataattataaagctaggttaagacttaatttagtcatgtaaagcttcagatgattttatgcaattacaaattataattttaattaaaagaacattccatttatattaggaacaagaaaaacatcacaatcaaaaaagagaacagagtataataattacaagacaatgctacataaaactatggcaacagattggaaaatgtagatgaaattaaagatctataaaccatataaatcatcaaaatggcacaaagaggagaaaaaatgggaatagatcattcctatagaagaaattggaaatgtctttaaagatttactatttgaaagggccccagacacagatggcttcacaactgagttctatttagcctgtgaggaacagataaccccactgttatgaaaccactcaagaagatagaaaaaaaaaaaaagagagctcctcaatatctgttacaaagccagcgcaccttaatgctaatgcctcatagacaaatctcccttgggaatatagattctcattctaaataaaatattagcaaatagggccgagtgtgatggctgacacctgcaatcccagtactttgggaggctgagatgggcaggtcacttgagctctggagtttgagaccagcctgcatgacatggcaaaaccctgtctctaccaaaaaataaaaaatttagtagggcatggtagcacatgcctgtcatcccagctactcgagaggctgaggtgggaggatcaccttagcctgggaggcagaggttgcagtgagccaagattaggtcgtgggactccagcgtaggcaacagagtgagacactgtctcaaaacaaaataattagcaaataagaatccatccatgtgccaaatagactaatatgctgtaatcaaatagtatttttccaggaatgtacggatgtttcaataacagaaaatttaccaacataatttattacattgacaaattaaaggtgaacatacatcatattgatcgatattgtacaggcacctgctaaaattcagtagccagccgcaatacaaacccatcgtctctctctctcttttttttttttcgagatggagtctcactctgttgcccaggctggagtgcaatggcatgatcttggctcactacaacctccgcctcctgggttcaagtgattcttttgcctcagcctcctgagtagctgggattacaggcctgcaccaccacacctggctaatttttgtatttttactagagatggagattcactgtgttagccaggctggtctcgaactcctgacctcaagggatctgcccgcctcggccttccaaagtgctgggattacaggtgtgagccaccgtgcccagccaaacccataatctcttatccaaacttctgaaaccctaaatctctgaaaactgaagtgatacttgtaaccctggcactataattcacttagtggtaaagctgatctgagctcacataaagaaatacttagatataaaaagtgttggtctttaaaactgtgaattattatgtgttctgtttgtaaggcatacttgaaaaaacatacttgtgaatttttcgcttctgtggcttgctgtcctatatcgaaatttgttatagtgttttctttttcaaggtgggtttgaggagcaatgacatgaggaatgtgctttcagctctctggaagaaatgcatgactgtgtttcacttaatcgaagacgccactgataggaaggctagcatttaattatgtatcactaaaagagaaaaaaaatgctgctactagttatactgcaaagcatcctccattgtgagacacctcccagttcagagatattgaaaagtgaaaaaaggtccatcttagaattgatgaaatatggtgtgtacatccaaaggaaatcaccactaacaacacgcccttctgacacgcgtggggacttgggtgcttcctctctatgatgtctgcatctcgaggaagagcccgatgtaagtgcaggagtgcagtggtctcaggtcagactggactccagagctggctctcacgggccagttgtttgaccctgagcaaactccttaacatataaatagcagcccctggaatgaggatggtgacaacatggtggtgttgatggtgtcaaaagggcctgtcccacatctgccatcctaaaattctttaccaaagaaaaaaacctgaccacatcttcccccctttaaggagacccctgatattactgtgaggccgcagctaggcctcgatgcctgtgctatcaatctgtcctaaatgtatatagtgtctcacccaaaaatctgagagggagagaacgttagtcatcttctaacaaagcccctgctgtttaccaaagagctaatgggtcggagagaaaatgtcactttcccaagtgacacagccagagacaaaatgaaaactaaacccagagccccagacacattggtgggctctttctagaacaccacgtggcctcccgctcaggctcctgtcacctgaggaccgggatccaccccagtggtttccagcggttatctccagccagaggatttctgtgtcctaaatgcagtgctttctgctgtatgggcccccgaaaaaagatggacacccatttagctcacccacccgcttctacccacgttctgactttgaggtctttgctgcacccacttccaccccacctttctaaccagcctcccggaaggggccagggatcccctctgtgcagaagatctgaggccccgctctctcatgtcctctgtctgctgtgtgtctccgacaggatggggctggtaagtagcaaaaagccggacaaggaaaagccgatcaaagagaaggacaagggccaatggagccccctgaaggtcagcgcccaagacaaggacgccccgccactgccgcccctggtgagtgattgcccacccccaccaagagcagattacttacttctcctatgccttaatgtccaagtttgtaaaatgggtatagcaaaattgccttcctgatagggatgtaacgatctgcaatgtataagcaggtgtgccatgcaatataacacgcacaggacccggcctggttagctcccaataattcttagccagagctcatttctcgagggcagccttgaaaagaaaaagaaatgtaaaaaggtcagcttggggagagagtgtcgtaaggaaggatccgggtatctagctgcagctactacctctcttctccccagcagctcctggagacccttgtcccctatgtggcattgctgctggcattccaaagagcctgctttcctgggataagcatcatgaaacaggagggtgcctgtcctcacctcccgagcaggctcttaagttttcctggaatcccatgggcattttaaatgaggaaaactttccaaaggaaaaaaaaagtgaaatttcaagtgaaaaggtcttattgctggggaatgcattttcctagtcatgcagtttgatttgtttataaaacacttagctccttttgatggctacagcatgtctgaagatgcatttttttttttttttgagacagagtctcgctctgctgcccaggctggagtgcagtggtgggaccttggctcactgcaacctctgcctcctggattcaagtgattctcgtacctcagccttctgagtagctggaatcacaggcacacatgccaccacacctggctaatttttacatttttagtagagacagagtttcaccatgttggctagattggtcttgaactcctgacctcaggtgatccacctgccttggcctcccaaagtggtgggattacaggtttgagcatccgtgccgggcctgaagatacatttttagatgattctttgtgctctctccactccctgaccagtgacccccttttggtttggggcagttgggagccttgccgcgaccccctctcctgtgctgtccacatgtccacgtggtcatctctttatcctaacagggacctgatggggagacggggattactaatcccacttcctagatgaacccaggcatcttacctatctctgtcccagtttagcgccggtctcagcgcacaaccacaagatgtttattgaataaataattgatcaaatggggaaacttggacttagactgattgagtaatttccccaaaattatatgataataagtagtagcacctggaatttttttcacttaaaagagtcacataatatgtatatggaaaaaattataattactcattattccactatgtagagtcaccagagttgcctcgagacccttcttccgtgtgttcatttcatgtgttcctatttttaagagaaacatacatgcacatcattttgcaaaatgctacttcaaaattgtgttcaataaatatggaattaagaaaagaatatttgtaacatatgtcaggttgaaagaatacaccaaaacgcacacttgtatagccacctcccaacttcagacaagaaagagactcgttcctttgaatctccctcctccctcccctgtttgtacccttcaccccaggccccaatacccagaatctgtttatcattccttagctttgctttttaatattatcacatatgtattacccctaaacgatatttagtttcattattcatgttgtaaactttaaatcaactacatcaaacagcgcatatgcttctgagactggggttgtggctccgtgttacgcatgtgaaacatatcgacgttgatgcacgtggctattgctcattaattttattgcctgagtatactgtaatttgtttattcttctgtcatgagggttagttccacgttttaaaattgtttatgtatcggtcgggcatgatggctcacgcctgtaatcccagcactttgggaggccgaggtgggaggatcacttgaggccaggagttcaagatcagcctggccaacatggcgaaaacctgtatctactaaaaatacaaaaattagctgggcgtgatggcgggcacctgtaatctcagctacttgggaggctgaggcacgagaattgcttgaactgaggaggcggaggttgcagtgatccgagattacgccactgcactccagcctgggcaacagagcgagactccatctcaaaaaaaaattgtttatgtattatgatttttgctaggagccctcttgtacacattcccttgtacactcttgtacacatacacagaagtttctctacaggatatatacctacaaatatgtttgtcgagttttggggaaatatgctttttaaatattttttcttgtcaacaaatacccgtttgcagtttgatcttgtaatggtagagccaggatgttaagcccaagtggttgggctttccctcattgtccacagctgtctcatatccacattggggcatcccccagcgcggtcagggcaaaggcagcagagggcgggggtctgtctgagggtagtgctggtccctgggtacagaatgtccctgagcagcccccacaggcagctgcctctcctccttcagtaggtccctggagataccctggctgcccggctcagcagtctcaacccccaggccccacccacgcagcagggactgaaataactcaagtgtgtgttttctacccaaggttgtcttcaaccaccttactcctccaccgcccgatgaacacctggatgaaggtaagaagggtggtttgggaagctgaggctccacagccctctcccctaggtggcagctttgtggagttggaaaaaggttgagtcaggagcagcttgagggctggagaagagaaaacggggaagctgagagaggccccggctctgtgcctcttggggcgtctcttcaggaaccaagaacaagtttcttcagtatgcctgagcctgggtgggacttttaaaacatgaaagactttacaaactgtaaacaagaacaaaaacaagagtcccagggaagacacacagcatcatcaaacccaagttttaaaatatgctaactctcaaacgcaaagggctgggccagtggctccaggcccttgcctccagcccctgtccgctctatgtggagggcaccttcttgtttcccgctcccagtcacttcgagagtcccgctgctgaccacctaaccacccacgcccctccctggtccccagactccacttggttttttttgagacagagtctcgctcttgtcacccaggctgcagtgcagtgacccaacctcagctcactgcaacctccacctcccgggttcaagagattctcctgcctcagcctcccaagtagctgggattacaggtgcacacaaccacaccgggctaatttttatgtttttactagtgagggggtttcaccatgttggccagattggtcttgaactcctgacctcaggtgatctgcccgcctcagcctctcaaagtgctgggattacaggcgtgagccactgtgcgtggcccctagactccacttctgctctggtgggctggcctgctgggtactgtagggaatgagctcagcctttctgggccagaggctccacccctggggactcccaagagggtggcctccttcaaagtgacttcccacagcctcctcatcatccatgtccacacagcatggggaagggatgcctcggccagccgggccccacccattaacctgctcatatgatgtgtactgggcattcagcacacagagcccagctctgtcccaggaatggcgaaggggtgacaacaggtagatgcgaccccttccctggaaaagctcagaatctgtcacacttgtgagcagaacctgaatcttaaaacttcagggaaccactgtcacccattctgaccctcgctttcctgctgagaagaggtgaccagcccgaggtcacaacactcagctcagtgacagagcggagccaccccacccggggaagctaagtgctctccaggtgaccttcatcaggtgggtcctgtggctcccagagctgtgcagagagcctgcgtcacagcagggctcacttgaagatggtgctccaagctcctgagccctcttcctgccttccatccagggcccgccagcaaggtggggggcccggcagggtcactggcagccatagacagtgtggctggggctctggacacagacagtggagaggccagggctccagctgccacgtggcaagaccacccctactggggatagaggcaggcggggcagaggaagaaaaggataagaggaggcttatgggcctccgagggcaggtgtagaataagaagatgagggctcccagcactatgtccgaatgtgggcctgaggccaccagcagcccagcagtggctgcctccctgtggctgacctctggccatcagcttcctcacacacgccttgtccaggtcatagggcttcttagtgggtctacaacggaggacaggatgggctctggggggcagcccatccctggtggggtcacagggctgggggtgggggcctgtgctgggtgagaacatcatttccatcatgggcaagcagaagcctgtcctccttggtagccaggctcaccccagccccaccttcccgcttgtgggcctgagtggtggtcatctctcccttgttcattttagacaagcatttcgtggtggctctgtatgactacaccgctatgaatgatcgggacctgcagatgctgaagggggagaagctacaggtcctgaaggggtgaggttccaggacaccatcccctgtccctgcaggacccccctcccccacatctctcctttctccacccaccacatcctccatggctgaccctggaagtcttctccatcgccctgcccccagccctggccccagcattttcttgaacttggcccttttgtcttcctctccaaaatctttccggtgaagtaatttccattcacaacctcctgctcatccttcaaagtccacgttccatgccaccgcctccatgcagccctcctgactcttttgggcatgtggaccttgtcctttatgcaggctggtctggctgttccgtgaaagccttgcatttaagccagttgtgtccatatttgtctccttttcaagacaggagcccacactgatgacacacaccaatcccgctttagctcatttcccatgtccttctcagaaactccttctaggtcagctctctctcagtggccaggcttgtcctgtggagctctgagggtctgatttggttcttgaagttctccaaaggccctgagccaagctcacaaaggtcctgactgctgattctatacagtccacgccaaccgtgtttttctcaagcctgtccccagtccctcaccaagctctgaacacgtcccattcatcaagaggaaggctgctggctggatccttgtgccctcttggctggtcaggctgtgtagataagctcttccccctagaacttgcccagatagccactgtaccactgagcagtgggcacaagccccttcctgcctgccgtactctctacccctgcggattctctgccctccagggagagatgactttgaggaggcctgagagctgcccagtgacgggcctacaggggccatgatctcatctctgtttcccctgctcccattagaactggagactggtggctggccaggtcactcgtcacaggaagagaaggctatgtgcccagcaactttgtggcccgagtggagagcctggaaatggaaaggtaggtgggcacgggaacccccctcgagccaagatgcagtcactgtttctgctccctgggctgttaggcagggcagggccagagtgggactgaccagggagcctgcaggcactagcaaagaggggacaggaaatgagctctgctgggaaaggcctctctgctggctccagacgacattcagactgctgtgtgacactgagcaagccgctcttcccagctaaacaagagcggtccttctcctggctcccctggatggaaccggccccagtgtctgatggcctcgaaggctaccagggaggcactatgaccagcatcccctcccctacagcctccatgggcaggactcagggctcagccctcgggggctcccaggagggtggcgttgttcagaactgattaatactcccaatcttctaatcccccagcccccatcttctcccatgtccccatggcactgggaatttcggactcggccagccagagcccccacgaatctgctcacagggactagctctgcctgaggactgaggcccagcaacgagtcttctctggacactgtgggccccgcttctttccctggaacagtgtggggaaccgtggggctgtcctgcacagaacaaccccataccgaaggggacatactggggtccctgctcagagagtctcggcagtttgcctaattcagatctcagactgcaaggaggaggcacgtgcctgtgatacgcagctgtgctttggagagagtgatcaggggcatttttccaaagcaaaattaacaaaggtcaaccaactagtgttcttgtttcgttctaggaaaacagtgagtccagggctgacaggaagcggaactggaagggcagcggggcagagggcactgactccatcacggtgtgaggagcagcagctcagggccgactgggaccagaaatgctagatttttatttcttggggacaggcagtgcaggagggaggctgtgtgggaatactccgaggagcagggtcgctctgagtttcacctgttcctgccgttttccaggtggttctttagatcacagggtcggaaggaggctgagaggcagcttcttgctccaatcaacaaggccggctcctttcttatcagagagagtgaaaccaacaaaggtaggcttggtggctttgcctgccttccttgccctgctcctcccgggaaggcgcctccagaggcctggccctggagtgagaggggaaggggtgactgccaggagaaccagcagcttccgggcttgtgtccctcccaattcaggccctgcccgggagttgacatgggggctgtccacacagtcctccctgtcccggctggaaaccacctgggcacaggaagccgggtggacaggggtggtcccacgccagactggccctgctgcccagtcagcaggaacaccgaggccagtgggggccagggaagggggaaccctgagcccttaaccaccagcctctttggaatcaaggattagggggagctcaaagaatccttcaagatcatctcagccagaggctgcaggtagcatatgttaggaagtggcctgtgccgtgatgtaagagaagagggtggtaattgtggggagcccatgccagtctagacactcatgagttcaaatccactgactgagcaaaacagctgccatcaccctcaggggttttctctctttctctgtcatttggctttctttccttcttaatttttttggtgtaaaatataaaacacatataaagcttgcatgaagtatgaatgtgtaattctaaatcatatagggtaataataaacaaatccctgtgtaatgacagccaagagaaagagcatcccagaccaccaggagccccctcactcccccacttgggctccttcctgattcaacccccaccctcaagagctacctgctgtcctgacttggatggaaatccttccttgctcttctctgtggtttcgccaccatgtcttgtctgttttttcagcttgatgtagatagaatcactgtttttgtttctgtgtgtcttgcttctgtcactcagcagtgtttgtgggattctatgttagtttcctgggctgccgtaacaaagtggcacagactgggtggcttccaccacagaagcttattatctcacagctctggaggctggaagtccacgaccaaagtgtcagcagcgttggctcctcccgggagctctctccttggcttgccgatggccgtcttctctgtgtcctcacgtggccgtccctccatgcatgtctgtgtcctaatctcttcttgtaaggacacctgtcagtttggattagggcccacccatatgacctcattttaacttaatcacccctttaaaggctctgtctccacatatagccacattctcaggaccgagggttaggactttaacatatgaattgggagcgcacatgattcaaccagtaacagattcattcatgtggttgaggatggtgagcctgttcatgttcattgctatacagaatcccgggtgtgaccattccagagtcaagttagccattctcatgttgtgggcattgagttgtttccagtttggggctgttaatgcatgtgttgcaccgaaccctattatggtccctggtgctcactggccactagcttttcgtctgtaagatactaatccacttgacagatgaggaaagggagcccctgaaacaggaagtgacttgctgggggccaacagtaagcatcagagcccaaagcaccagtgaccacatcatctaagaggctgagaggcttcccaagctctacaacgtggcaagctagggtgacccaggggcttcccaggcagtatgaagaatgctttgctcatcaggaagctgtccacagggaccaggtacagccttgtagccaattttaactggagaggagatggtgacagtgacatcagaggaggaaagggagagagagtgtctggaatatgagtctggttccctgtggttggggcgatgagaatggacagagttgtcacctggtgggagcacccttgggctgtccattggttccatctgtggctcaagaacagcagccagagtggaaacccagagtatgaaaagctgtcatagcaccctgtgattctctggggacatcatgaggccttggtgccccacaaaggggcaggaccaggttggggagcaggaagggtgcattggaaagctggggtgctctgtgcaggatttcttggaatatgccaatgaatgcatatacatacatatacatacacatagatatatgcattttatatttatattcatattggatattgtcactatttcatttttgtggcagagcacctctgtacaagaaataatttgggaatcactggagatgacataagtgttttattgttgttccaggacatttcaaacatacacagaagtagagaaaatagtttagtggaacccctggtacccaacagccagcttcaacaattatcaactgagccagtcttgtttcatctgtatctcccgctccacccctgttctttcgaagtaaatcccaaacatcatgtcatgtcaccctggaaatgatatttcaaccattgcctattgctaaggtgaaagcctccccaccccctgcccaatctggtgtggaggaagaaggggttctctatgagtctggcatcttttcctgtccatgtccaccccaggaagccagtccaagctgggaataggccatatgggaccagggctgcaggactgttcaaccatcatcaccaccacacgcacatacacatgcacacatgaacacacatgcacatatgcacaaatgcacacatatacacacatgtgcatacacaggcatgtgtgcacacatacacatgcaaacacatacacatgtccacgcatgcacatatacacacacatgcacacatatacatgtgcacatatgcacagatgcaatgaacacgtgtgcaacacatgtacacaccttacacgtacatatgcacacacacacacaactccaaagcaagacccctctgcttctccgagccacagcagtgaatgcaagacagggatggaagcaggggagtgagttctacccttcgtggcctccggggtgtccttgagcctctcaagcctcagtttactggtgtctatgtgaggatagactagtttcacagctcaaaggcaggcggtccttcagtgctgagaaatcttcatctcagagccaggccctgcctgcccagggcagtccagacataccacagaggcaggggatccaggttttgtgaaactgaagctgataggatctgaggtcgtctttacaaaggacaccaaattgtcagaagccatcagggacggggcctcagagcagccaggcaagtgagggctctaaagcaccagcttgggaagcgtcactgcgtggagagcgggctcctgggctcatcgcccgaggcacccgacacaagtgcagcctacaaaatggagagaaaagcccttgatgaatgaactccctaaggccaggctcgggttccttagagactgggggcacagctgcacccgggcagggtcggggagacagtttgcagcctctgggctgaggctggggtgggggtgtggaggggctgtggcaacagcatggcgtacgcctctgggtgtccttttgcaagtaggtgatgagagaggcacattggctgagggaaactggaggatggaagggggttgaggcaggggaattgacaggagaggaaagagccttaagtcaaacaggaccgcggaaaaccaagcgtccacaacgagaacgaggggtccgtgcctgacccctggcggggaggcgtggtactgctcgtggtaggcgcggactcggggaaccgggagccccccagcctgccgcgaactctgctgggccccagcgtcctcatctcccatataatgggtaaggggcggggtaaggtcatggtacccaagtagctggacagacgcattttataaaaacatcaagttcatggaaaagcgtttcttacctggaaattcttacctcctaaattgtccttaacccttgacatctgctaccacttgcctgcgggaaaacattaacctagaagacaaaataacaggtgtatgtaacaggcagcaaatgactttgaacagagcccctgggcatagcttattacggtgtccgccatggacatgggtacttgcagctgtaaatggctatctgcttgtaggagtaagagataccctctttagccagaaaataaagcccctagtcactccaacgagactagatttctcaatagtccatgacaaagggtccccgagtgaccagatgcccaagtggggacctacatgattgctgagaaactgtgctgcctgccgcagggctctgtgattccctggctgagttttgcaggatagtggggggatgccaaggtcagagtcagatggaacttacaggggaggcttccaaaagcatggaggttgagatgcagggaaaggaaacttgtggagggagtgctgataatgaagaacagaattggggaacttttttcaaagctttaaaatgaggcccaaatcccagtcccgttttttgtctttgtgccttacttctcgtgtgtgtcttcatgaaccctccaggtgccttctccctgtctgtgaaggatgtcaccacccagggggagctgatcaagcactataagatccgctgcctggatgaagggggctactacatctccccccggatcaccttcccctcgctccaggccctggtgcagcactattctagtaagagggggcgtgcaatgggggcagggacttgtgccaagagcccctggatctctcgctaagattcccaattgtgtgagtcattggtgccaccttgggggatggaaagattatcccaaagttaggcctaaggaggtagcaactctgagcaccgggaattggtggccctaattccctctcctggctcagcagggaaccccttagagagtagcaagcattttcagtcttagagtgagcaggtcgattttagagatagcatgccctgctttgcgcaaacgaagagaaagagttgagtgtgtgtgcatgtgcaggcgtgtgcacacacccatgcagggggtggggtggctggggagtggagggccagctaggaatgatacagctcccaaggtagagcctggctgctctggtaacccccagccctgtcttttcttccctaatgcagagaagggggatggtctatgccagaggctgaccctgccctgtgtgcgcccggccccgcagaatccctgggcccaggatgaatgggagatcccccggcagtctctcaggctggtcaggaaactcgggtctggacaattcggcgaagtctggatgggtgagtgtgtgcacacgtgggagcatttctccccccattccacctgcgccgcatcctgagtccaggttcagcattttcatagcgtgtcatccctcccccagaagtcttgagagggagcgaggacagaggcgaggacactcattttacagaggaggaagtggaggtgcagagccgcgttgtaacagctgggaccgcttatggtggtggcagagcaggaacagaatccagctcacccagccccgaagtcgctccctccttcgttctctgcctgaagctggctttgacaatgagctgcagcggcgcgttaactccccttagcttttcatcacccagatggaaacaggaggttaaacgtgatgagccatgatgttccagagcctgagtgcacaccgagggcagccgtgggactttggccaagtcactgaagctccaggcctggtgtcctcacatttccatcgctgctgacacctgcccccttccccccccgcccaccaggatataaaactcgtgttccgttttatccctggattggtccatgagtcctcccttacctggggctggtccatgagtgctcccttacctggggctgatgcccacggtgcttttggcaggagctgtacccaggtccctgccaaggcccatgtcctctagaaaagcaagtagagttgtcttttgcccttcaggggacttcatggagtacagggagagtgtggagatacagatagtttaaggagtgggacaggatcgccatggggcttcagaaggagagaaggagacccccatgcgtcatcctcctgcccagtgtaccccaggctgtgtgcttatttccaccaaggagttattgtgtgatagaagagactcattatgtaggggaggggtgggggaaggacacaggttccgtgcaggacagaaggacacaggcccagggtgtggggcaaataggtgaaatgccccccaggcagggtacattcctccactgcctgaggccccatatagaagggacctggaacgcaaggtaggcaccacacaaccatggcctccggaactgcatgttccagctctggcacctggaatggggtggcacctgggcacttaccccgattttggttaagggatcacctccgagcaagctctctgtcttctgattggcttcttcactcccccgggctcaggttactacaaaaacaacatgaaggtggccattaagacgctgaaggagggaaccatgtctccagaagccttcctgggtgaggccaacgtgatgaaggctctgcagcacgagcggctggtccgactctacgcagtggtcaccaaggagcccatctacattgtcaccgagtacatggccagaggtggtgccccccgcagagccgcatcctcagagcgaggcgggagggccgggcttagcaggaggaggagggtccgctgcggtgggttcaccaggccgggggtcctgcagatctagggcatggcacggtgtggggacagggagggatggagggagggggagggacagagggagggtgagaaacaggagggtgaagtggttctgacagagccatgttctcagcccaggagcagttcagacagcatttctggagtgcatcttctgtgcctagcactctttgatgcctgctgggagggacagagcattgcaaagtcaaacgaacaccaggccaggcatgcagggacagtactagatccaggtctcctgcctcctggtcatgcaaccatttacaactgtgtgaatattttacaaggatggccagagaggttgggcttgatggcctctgaggtccacggcgtggccaagttctcatgccactttctcaccctcctatgaccctgaccgcacactgctcctataggatcctaacatgcccatgttgatatagctccctaacaactgtcaccaaggggcccccggtcggaggctgtgctgggggtgcctctagcctgcccctagggcaagcatccatccctcccagctttctgattccagggggagctgcatttgtcccctgcaccaaacctgggggacagttctctccattctggtgctttcttgctgatgcctggtcctcagaggcagagggtgtctgccagcagggatcaagggagcgaggccaacacggggggaaagacaagaaggggcatgaaacttcgagtcagaactggggtcccactcgcagctcccggctgggtgacttcagacaggtccctgcacctggctgaaacctaacttctgggcaactgctggtatattggctgcctcccggggtgctgagactggcattttgtaaagtggaaggcactcggcagcagtaggtagatccttcctgatgcaccgagagatctgagggtgcaaactcccacttcccgcgcccatggggagccactcacaccagagagaggctggcaccaccaggggcgggtcactttgcagaagggcacttgcaacttctcttttcttaggatgcctgctggatttcctgaagacagatgaagggagcagattgtcactcccaaggctgattgacatgtcggcgcaggttggtgaagtaccaggtgcagaggaagggcggcatgtgccacctgctgtccacaatggctgctcgtgccttaccaccccatcctctcagccagcaggagaagtcagggggtactgaaggccaccttcctctaggcagatatccccaaggtcacccactgcacttggacttgcaaaccctggccactgtgcctcctgccccacgcagctgtgagggagcccagggaatggagccttagacccgggcagctgtgttggaatgaggttattctgttccgaaggaagagagggcgaatgaatgtcatgggaaacacacagagttagcaagagttccattgaacccggcaggcaagtgtgttctgttgtgacctcatctcttccttagatggtgcccacaaacatctcctgtaggacttcccatcccaggggccctcagcctttgcacagccctggcgtcgaccccaggctgatgggcaggcctgagctacacacagatgccagggacatgacttctctgagccctggaggacagccccaccttctgccaccagggaattgcgagtgctggacctcctcggctacccaggactggtcctcagtgtccctcacgttcacatgcagaaccttctggactccatggggtgaagagcagagtggagaggagggttttagccgagagctctagctggcaggaagcacatctggtggccctgttaaaactggaactctcagcagaaaagttttggtctgtggtcagcctgtgaggcacacacgtgcgtacacatacacacacacatacagctgccaccgagaggaaacgctcccacccaccgcccacatcagccctcccacctcgcccctcgcccagccttacccagtagtgccgctgcaggaactgatgccacaacgcctttttccgctgaggtgggcagacagccatctgggcaggctggttttggaaaatgagtgctggtaaccggcttcaaaccccagggcagtgataagcctgcccactgctgctgcttcctttccccttccttctctcaccctccgctgtctcctattcaatccccactacacccccttggaaaatctcatgtgacccaggggcaaaggatgtgaaaagccatcggagtttaatacctggatgtagccacagaatcgggggtgaggagccagaaaatcagaacttcccagaagggcagcctctaaccacatgctgaccatgccaatggctctctaagcacacatgtacacacacacactctcacacacataaaaacacagactcacacacacggacaaacacaaacacatacacagactcacacagacatgcaaactcacacacagacagacacacacacacacacagacacacagactcacacacacaaactcacacagacacacaaatacacagactcagactcaaacacaaactcacacaaacacatttacacaaactcacaaacacacacacaaacacacacacaaacacgcaaacttacacacacatgagcagacacacacccggcccttctgggctcttcttttcttactccataggaagccatgcaaagtctcgccagacctttcctccaatgccagatctggccaaccccacaggaaccctgcaatcacaatccctcgggccccactttgcagccagatgccaccggttcccatgccccatgcctcgccacccctctgcctcctctgcccaggaagccttgaacacttcccacctggcagaatccttatcatcatccatggctcaagcgtaatgtcatttctatgaaggtttccctggacaagaaactgccagagagcccttagctcaggtgttcccggaagcactgttcttgctcagcagatctgggcagcttcttcttgaaagcagatctgggccctactcaacattttttaaaatatatttctggtactgttcaataaatattagttatcagaacgagtactgttagatgctgcccagatatatttagtactcagttttatattccccacagtcccatattagtaaatgagtattgattgcatggtgtagcaaggggatggatggatgcatggatgggtggatgcgtgggtgggtgggtggatggatgcatggatggatggatggatggatggatggatggatgcatgcatggatggatgaatgggtggatggatggatgggtgggtgggtgggtggatggatggattgatccatggatggatggatacatggaaggatgcatagatggatggatggatggatacatggatggatgcatggatgtgttgatggatggatgggtgggtggatggatggatgcatggatggatggatgcatggatagatggatggattcatagataaaccaacaaaatgcaagcataaggagaagtggaatcaattctagtgctggcttcttgaagtcgcatgtctgaagaggtaaatggggtctctgctttctgcctcagtttcttcgtccattgattgggtgaataaagccttagtttcctcagctaaaaggtgccaagtagcaccagctgctatccctggcccaggctggtgatcaggggaggagagacaagtctcttcttcttcacagcctctgtccacctggatctgccagtgctccctgggtgcccccacggggcaggcgctgggtgaggttcttggtcacaaatcaacctcgtctaatgcttgcctcaaccccctgccctggagaccacatccctcatgttccatgtcaggactgtggcccctcggggaggttaagcagcttgctagaggtcagcgacttcccgagggcctccagctccaggagctgtgcttccagccagccagtgagagctgcctgtccttgcctcctgctccccctccccctccttccttaccatttcttctcttctccctccctctccttttctcctgcctgtgttcttctatcttccatctctgcagacccttggacacagctgtgtggagcgagaacgaggagggggaggggcacaggtagcccctgtgtctctgatgcccacgttgctgcgttgctgttctgggcttctaggagaggagtttattcggctgaggagcaacacagtcacctttctactccatccaagaaacagctccttccccagcagcccacaggggctgtgcgggggacacagtgtgggctcggtcttggcgtggaggcccccaggctgtccttcaccatgtgcctgttccctcagattgctgaagggatggcatacattgagcgcatgaattccatccaccgcgacctgcgggcggccaacatcctggtgtctgaggccttgtgctgcaaaattgctgattttggcttggctcgaatcatcgacagtgaatacacggcccaagagggtaagcacagcccctaaccacaagggaaacctagggccttatctttcccagctcctcaaagccgcctttaacttctcccagcacagccctgagggaagacacctgagggctatacggtttctacagctctagatcagcatttccttcatttacccaaatgtgttcagcagaatggtagtgccctgagacctcccatggaggaacagctttaggataaggtaggtttggagaaacagcagtccaccctactccctgtcttggagattcccagtgcacatcaacatattaaaggcactgagaagtcctgcagcaaagaaacagtttatgtttgcctcacctagtgcctcccaaactaatttgagctccaaatactattttttttttttttttgagatggagtctctgtcacccaggctggagtgcagtggcacaatcttggctcactgcaacctccgcctcctgggttcaagcaattcttctgcctcagcctcccaagtagttgggattacaggcgtgtgccactacacctggctaatttttgtatgtttagtagagatggggtttcaccatgttggccaggctggtctcgaactcctgaatttaggtgatctgcctgccttgacctcccaaagtgctgggatgacaggtgtaagccatgcccaaatactatttttatatagtccctattaaccttccatggaattaggctttcacagagcacactgtgggaaacacagctctcatgtgcgatcagcaaaccaacctgtattagggtgtccacggagcactgttttactctgtgcatataactgaggtggaaatctacgtcacaagagaatctgaaggggtcacatatatttatcaagctagcaagcagtgtctgctgagcctatgagtcagatgacaagcagacaggatatggcttgttctctcgggaacttcaggctggctggggagaccgagaaatggaggccaggggaggctgtgaagtgccaagccctgaggtctgctccaaatgctggccggggctgcagccattgaggtgcttcacagggcagccggatgtgagttcttcctcatagcggccctcggaggtacaagtgtcaccatttccattttgcaggaagggactaacggaggcgcccgcaggtttaaatggcttgcccaggccatgtcttttaaattaaacaaggcccctgtaaggtgaaacaggccccttccatcccaggtggaaacgtggtggctgcccattgaggccatcgctctctttttaaagaaccaaagtgggtgactgtgtggtattggtgtccatatcgtctttctgtgctgctgatgtcgtgtctgcactcacctggtcatgtgtcctggtgtgcggtagtggctcccccgccatgcctggccgccccgccctgtgaggccccgcagtgggggcttgatggaaggacagcaggagcaggggtaggggtgaggatggagggtaggggccaccggccgtggcctcccaaagcttgcatggcttttcccacaggggccaagttccccatcaagtggacagccccggaagccatccacttcggggtcttcaccatcaaagcagacgtgtggtcgtttggagtcctcctgatggaagttgtcacttatgggcgggtgccatacccaggtaggtggctcaccccgcagctcgcggctccctgctttcccggccggccctgatggcaggtcgcctgtgcttggtgcctgtggctgccctgttcttttcagagtgagtcccagagcgaagacggagacccaggcatggcatctggggtggagctctgccccctgcatcactattgctctgggccacagggctgtgtctccttcctccagcagaggtcaaatgagtccctcaaactgaaatcaagacaaagggcacatccgaactcaagtttactcccaatggcttgttctcagttgaggacaggttgtgcctaccttggctttgcacccatagtggattccccaaagccccttcctgtgtggccagaatcgtggacgacagcccccagccccagtcgaagggctccagccacttggcccccacaggtgggcaggctccgggtcacctgctgctgtgtgcacctggcagctgcccatgagtgatgggcttggctgtgcccctggtggtcacaggtaatcaagagagggagggtcccatcttcagaggacctgccccgtactcaggagaaaatctacagcctcatttctaggcattccccaggcaataaaaagtaaataaagggctgtttagagaccgggcagccaggcaacgcacgaggctggagaagtggtctgggactgtgggcactgctgtcccttgcctgggcccactgtgccccgcgggacgctcagggccccccacccaccgaggaccccagcccctcacccccgcttgcggtctcctctgccgcagggatgagcaaccccgaggtcatccgcaacctggagcgcggctaccgcatgccgcgccccgacacctgcccgcccgagctgtaccgcggcgtcatcgccgagtgctggcgcagccggcccgaggagcggcccaccttcgagttcctgcagtcggtgctggaggacttctacacggccaccgagcggcagtacgagctgcagccctagccggccgcgcccgcctgcgccccgtgcccacctctgcgcggacgaccccgacttccgtgccatcccagacgggccgcgaaggcggggtgtcgcctgtgcccttttctcagacccggaatccagtgggcagaggcagcttcgcagggggtccccggacggactccttcaccgactgcacccccgggcgagttacgcggcctctctgtgccgcttcatttgtagagggctgtaacagtgacctcgcacggtcatccggagtactaagccccagtaaggtgttcaggactggtaagcgactgtcatcaagtaaggcccccgtgctgggcaccccccgtgctggccgcgtccccgcctctgcgccctgcgtggaccccgccctgccccgctacagaagccagactgggtcccgcggacgccagcaggggcaaccccagcctaggctgcgctccagcactgcggggcttttctgcaataaagtcacgagcgttcga

SEQ ID NO: 350 - DNA, 9936 bp, Homo sapiens
  source 1..9936: mol_type = genomic DNA; note = NC_000007.14:140696708-140706643 NDUFB2 [organism=Homo sapiens] [GeneID=4708] [chromosome=7]
gaggcggctggggaccgcggggcggacgggagcgagtatgtccgctctgactcggctggcgtctttcgctcgcgttggaggccgccttttcagaagcggctgcgcacggactgctggagatggtggagtccgtcagtgagtgtggggctggggatgggggcctcgccggcctgtagcggacagcgcgggtccctgggacgctctcaccttgactggggcgcctgaagaggccgcgtcccgaggcatgctgggacctgtagtccgcgtgtctcctgaagccgcgactcgaggagagggaccccgctggccggagggagagggagagacttcgctgggcagatgggacaccgtgtgcagggccgtcatggtagtaggggccgcctgccctcgggagacgcacgcgtgaatgcggagcgggctgagccagtcggcgccggcgcgggcggtccaggcggaggaagcagcgtgcgcggcgggtgtggacgctcctggagcgaggcggggggcggcggcggtgaggcctagggagggcgcggtccagggtcccggtgcctggctgcggaatttagggtagagtctgttcggcagcctttaatcggagacgtcacgtggccgctttttaatgctgaaaaatcactctggctgcagggagtggaggctgtcgcccagagagagcgccgtcgggtgagaggagcagaaagccggaagccaacgctggggcagccgtggcgtttaggagagtgacaggcagagccgcccgcgaggtggcccgagacgcagaccggagggcggagggctgggggtgcgaggtagggagcgggtgcgaggtagggagcagctgccgaagccgagttagtggtgtgcagagattccgtaagagcaggactggaaaagagtcatggatgattccaggtcccttagatcatcagctacactttaccaagaggcagtgtggggtcgtgattccaagcgggattctggccgcacagtggctgggttcaaatcccacctctgccacactccagctgtgggaccttggaaaagtttcttattctcttaatgcctcagtttcctcacccatttggcgtccatttgcaaggaactaaatgagttactgttatctaaagcgtgtttgtgtgttttaggagatggggtctaactctgtcaggcaggctggagtgcagtggcgcgatcctagctcactgcagcctctaactcctgggctcaagtgattctccagcctcggcctcccaaagtgttgggaatacaggcgagccactgcgcttggtctcactaaagtgtttaaaacaattgctggtgcctgctaaggaccgtacaagtattctttaactgttgttgttattaaggaactgaggcccaggaaatgaaaggagtgacttgcctgaagtcccacatggatgaagaatctggagctggggcaggtgtggggtgggcagaaggcaaagccctgtgtgacttgggcaaagacagtgatggagagccatgagcgacagcccttggtcctgcatgaggagatgggggaatgccgatcttccctgaggtgctggcttgttcgtaacacacacttgtttcagagtgtgtgataattaagtgcataaatgtttatggagcatcttctatatggctgctcctttctaggtgctgaggatatagcagaatacgagagagaatgaagtgtacattctggagaggagagaccagtagaaaagaaagaccttttttgagtactgttaagggttatgaagagaatacagctggggattaatatggagaatgcgtggtgtgggagtagaagggatattgtatttggggatggcgtgggaatgcctgggagtgtgatttgaagcgggacctgagggatgagaagtcagccatgcagagacctcaagggaagagcccggtggacataagagggcagaggaggcatcaggtggagaggccagagcccgcagggttggcaggaggccaggctggagtggagcgtaggggaagagtgggagagaccaggtcacagggacaagtgtgggggccggattagagggggctttggaggactcggaattttattctaagaatcacagggagccattggagttttaaagcaggaaagtaatgtggtctgatttattttttaaaaatgtaactttgtccaggcgcggtggctcacacctgtaatcccagcactttgagaggctgaggcgggcggatcacctgaggtcaggagttcgagaccagcctggccaacacggtgaaaccccatctctactaaaaacacaaaaattagctgggcatggtagtgtgcgcctgtaatcccagctactggggaggctgaggcaggagaattgcttgagcccaggaggcagaggttgcagtgagccgagatcgtgccactgcattccagcctgggtgacagagtgagaccccgtctcaaaaaaataaaaataaaaatgtaactaatagagttatggtgcatttttgtttttaaacttgactctcaaacatttgaagttggaacagccattatttccttggatgttgtttcttccccattctctttccttcttacaggacttgctgatagtgtcttacttccttatgttttttgatcttgagcttgttttccctggaatttctttgagatcgtgcttctcttagtctcttgagggtgccaccccaattcaggctcacattaaattctcggcttggggtttttggtccacacaggtccaacgcaggtaatgtgaatttgggtgcaaatctacctgaggactggcttctgataacaaattcttgttcccttgtccatggaaggtttatttcttgttcacccttttaccatatggggttgcagctttattcagtgacctcgtcattagccttcccaccttgggtgggccccaggctgcgtctctttccccacacctcatgtagctatcctggtggaggttcaagggctcccggtgaaggcagcttcagtgattgattgcttagcttccaggccttgtttttacttgaattttgctcttggtggattccttccttttgtgcctggtcagtgatgtttgtaaaaatcttaaaaatctcatctagcagcagagttgttaatttggagggttgttcagggtatctagtttgccacaatgcagttcacaacctggtttggaacataacattgtgaattaggtgttgagtctttgcattccttaatcatggcaatccttgtcattgttcctgtgatataattgcagactttcaaatctttgttccaaaaggtttccattttgcagtccctacttcaggttatgattaaaacaacatgtcactctagcaataacgaagcgtggggagctgctaagatgggtttgaactataatgctggcatcggcattactcagatcttttttgtttttttgatacagaatttcgctcttgttgcccaggctggagtgcaatggcacgatctcagctcaccacatcctctgtctcccaggttcaagtgattctcctgcttcagcctcctgagtagctgggattacatgcatgtaccaccatgcccagctaattttgtatttttagtagagacgaggtttttccacgttggtcagggtggtctcgaactcccgacctcaggtgatccgcctgcctcggcctcccaaaatgctgggattacaggcataagccaccgtgtccggccttcaaatcttgttttaatcagttttactgctgggcacttatacctagattgtatcaaaaagctatcaaagaagaaggctcttggccgggcacagtgtggctcacgcctataatcccagcactttgggaggtcagggcaggcggatcacctgaggtcaggagttcgagaccagcctggccaacataacgaatccctgtatctactaaaaatacaaaaattagccgggcatggtggcacatgcctgtaatcccagctactcgggaggctgaggcaggagaattgctcgaactgggaggcagaggttgcagtgagccaagattgtgtcactgcactccagcctgggtgacagagtgcgactccgtctcaaaaaaaaaaaaaagctcttgttatactatattgaatgatcctgcatggtttatttacataatgtaatatctatatgcacagctagatcctgaatgaataatataattggtatatgaggacattacggaaacagtatgctacgtcattcaagttgtaaagtggcgatatttggtaggaccttttaaacatgatacttaaaaaagtacatatatacacacatctgcaaaaactaaaaatcaccttattcataattagttattaataccttaaatagagcattccaaataaaagtgttaaattttggatgactatttagaaaaaaaaatggaatttatcatttcaatatggtaacattggttttatcatgctggttggaattctagttaaaagttatgtctttgattaataaaaggagaaaattgttaatggtgtgtgtctgtaggcaacagcttaggctttgccatcacacagcatctcactggtaaatcattaataattacaggccttatcataacattatgaaaattaaatgaattaaaacttataaaatgcttagtgtggtatctggcacatggtaaacactcaataactaccagtcatcttttagagtgggggaggataaaaacagtctgccagcctggcaacatagggaaaccctgtctctacaaaaaaaatataaaaattagccaggtctgggggtgtacacttgtatgtaatcccagctacttgggagggaggctgaggcaggaggattgcttgagcccaggaggtgctcagtcagcagaaggatcgcttgagctaaggtcacgccactgcactctagcctgggcgacagagcctatctttaaaaaaacaaacaaaacagccgggcacgtggctcacgcctgtaatcccagcactttgggaggccaaggtgggtggatcacctaaggtcaggagttcgagaccagtctggccaacacggggaaaccccgtctctactaaaaaaaaaacaaaaattagctgggcatggtggcgtacacctgtagtcccagctacttgggaggctgaggcaggaggatcgcttgaacccaggaggcggaggttgcagtgagccaagattgttccattgcactccagcctgggtgacagagtgagactctcgcaaacaaacaaacaaagaaaacaaacagtcctagctaacatgtatcaagaaccactgccctgttactgttcacgaatctgtgcattatgaagacaagatattttaatgcacttttcctacaggtacgaatttctgtgctacataaaagagaatatggtttacaagctgattcttatctagatgaaattggtaaacatattttatataggaattctcttaaaaattttttatccacttctgtttattagcatatatatggctgatgaataggttttaggaatagccccagtaggtgcaaataatttaaattagatgcaacgtataatatttatactccaactgaataaattgactataactcttatggactctgtgccacaacttgtcaagtgtctgaatgaaaagaagaaaaaagaaacacgtattcaaacttactgtttaaagttctttgttcagagccattagcatatttaataggatttgcgagtcctctctcccatatggttgtcttttaataaagattgtaataggcagaggacataatttgcctcaaatagatagctaaacaaagcaaaattaatttatttttctgagtaagttagtgacctgctaacaagttcacagtcccttaactaaaacctttggggctagcaccccagaatcaacacattcaaatttctagtgcaaaataatgaatcttcactaattgaaaaccaaaattagcctcttgtcagttttggtcagtttttgctgctacacatgaagcaagcttagtaaaaagtgagtatttcaagggattgtgaacttctgtctatatttcagtggagatgagaaacattagcgttggttctaggatgtaactcagaggagttttggatgacttaacgctttgagaatgtagcacgctgtctgccatgttgttttgtcttgcagtgccggtggtggtgtgcacattgagccccggtatagacagttcccccagctgaccagatcccaggtgttccagagcgagttcttcagcggactcatgtggttctggattctctggcgcttttggcatgactcagaagaggtgctggtaagtgcaggagaagagcacttgtcgttttttgggtgggggagggaggatgtattaatagcttgtttatttttctgttgtagaccatttttctgtctggacatcgccctttgccaccactttttccatatgtatatacaagaatcctgttatttaatgaaacatgttatcttctcacctttttttacacgaggatgtatatttaggtggtccgtttcttatggtttctgttaggttgccatcttagggagactaaaagctcattttttttttttttttttttgagacacagtttcactctgtcaccaggcaggagtgcagtggcacaatctcggctcgctgcaacctctgcatcccgggttcaagtgactctggtgcctcagtcccttgagtagctgggactacaggtgtgcacccccacgccggctaattttttttgttgttagtagagacggggtttcaccatgttggtcaggctgctctcaaactcctgacctcaagtgatccacctgactcagcctcccagagtgctgggatcacaggcgtgagccaccgcgcctggccagaaatgaattcttttaccttctgaactagcggttcattggtaggttaggtttcacacttaaattcctttaaatgatgaatgtcttctggtctgtccagaggcccagggcagccaggtttgggtgggatggatgtgagttaatttgtcttgagaagggaagttagttttagtgattttctattttatttatttatttttgagatggagtctcactctgtcacccaggctggagtgcagtggtgcgatcttggctcactgcaagctccgcctcctgggttcacgccattctcttgcctcagcctcccaagtagctgggactgcaggtgcccgccaccactcccggctaattttttatatttttagtagagacggggtttcaccgtgttagccaggatggtctcgatctcctgacctcatgatccacctgccttggcctcccaaagtgctgggattacaggcgtgagccactgcgcccggccagttttagtgattttctaacatatcattagcctcaactgaggttttaccacatttgcagaccgttctttgggaaattacgtctttaagacattgaaatctgtgcttgtttatccaggatactttgagttgtagtaaatttgggtttgtttccaggataggaaaaaaatcttaagcagtatgtaagttttagaagcatcaggttgcttcatatcccatttctcttagaacttctctgtgccgttgtccttcagtaaggagctgcctgggtgtctgtgaactgtccacacatttactatttgaggtgcccctgcctcactgtaggtcagctgtccggagtatgtacagtatgtatagctgttaggcctgagatgatgatgatgcagccagataagcccttagatcaggattggagatgaggaagtccacctgaggcttctccatttcacagcagtaatgttaggagagttggaaacatattttgccaggactttgccaggatgtcaggaacctttgaaacctattgcctccacttccccctaccctccctctatcacagacacgtaccattggcttaggctggtacctccaaatggggaggcttttaaaattcagaccagagcccatataatgaacaaactaaagaacaggtgggccatcgaataattaaagtagaatttgttcctgtggtcaggggctgagccatattgtttttttttttttctttccaagatttatttaacaatttaattagttgcacagaatgtaaattcttgacttttctttcttttaaatggttgtcaccagggtcactttccgtatcctgatccttcccagtggacagatgaagaattaggtatccctcctgatgatgaagactgaaggtgtagactcagcctcactctgtacaagtgggtgtgctccaaatttctttatgtcatatttaccttttttcataaacattagtttttactttgtgcctatgatggacttgaaaaaactgcatattctaacagcatgaagttgagttaaccatgtcctgtatctgcttttttttttttttttgagacagagtcttgctctgtcgcccagactggagtgcagtggcgtgatctgggctcactgcaacctctgccttccaggttcaagtgattctccttcctcagcctcctgagtagctgggattataggcacatgctaccacacttggctaatttttgtatttttagtagaggcagagttttgccacgttggccaggctggtctcgaacttctgacctcaagtgatctgcccacctcagactcccaaagtgctaggattacaggtgtgagccaccacgcctggccatgtatctgatttctgccttaagttttcacatttgctttggtctcttcttccttttcattgtatgttttattttatttacattttttattttgtagagacagggtgtcactatgttgcccaggctggtcttgaactcctgggctcaaatgattctcctgcctctgcctcccaaagtgctgggattacaggcatgtgccaccacacctggcccattgtataataaaaaaaaatttttttcctaagttaggttataattttagggtttcatttatccatccactgatcaaagatatattaagaccaattctgtgccaagcacaggcctacagtggtgaacaggacagatggagcttacagtacgtagctgcaaaactacagtgtcctgctctcaacatttaaatagatccagcatatgggagtattactatatagaactatatgaaaactaactctttaaacagtaaagggttatggctttttcattttccaggtcaggaagtcaagaatttttcttctttaaaaagggaggtactaagaaggttccctttcctcataaacccctaggggttaatatgtttttatttaacatgcttttattttatattttattttattttattttattttagtttgttatgttatgttatgttatgttatgttttatgttatgttatgttatgttatgttatgttatgttatgttatgttatttgagacagggtctcattctgtcatccagactggagtgcagcgtgatcatggctcactgtaaccccaacctcctgagctcaagtgattctcccgcctcagccttctcagtagctgggactactactcttggctaatttttgtatattttgtagagatgaggttttgccatgttgcccaggctgatctcaaattcttggactcaagtgatccacctcttggcttcccaaagtgttgggattacaggtgtgagccagtgtacctggccaacaaatttgttttaatgactggactgtaaacccttgagagaggaagggtgattttgcttctcttgtctacaaggctgtcacatgatcagtgctcaataaatacttgaataattgaataaatgaattatggatttgaattagtgaatataaaagtacttaaagctttctacttttgttttcctgcaggagccaggtgagaatttcaaggattatcgacttcatattgcacattaaagttacaaattaaagtggcttggtcaagaatga

SEQ ID NO: 351 - DNA, 118630 bp, Homo sapiens
  source 1..118630: mol_type = genomic DNA; note = NC_000023.11:c100410273-100291644 PCDH19 [organism=Homo sapiens] [GeneID=57526] [chromosome=X]
agtagtttgcggcatccggaggagcagcagcagcagtagcggcggcggctggcgcagcgcggagacggacgagcgggcacagacggcagcacagctcccgtgcaccatgcctggcttgcccgggaggcactggcacccgcgtccctagcccggcgctggcccttggcgcgttgcgctccgcagcattccggctgagcgatttcatccgaaatcctaaacctcctaccccaaacccattgcctcctgcttgctcatactccacactcacactccccacaccacacactcactcttcctctctctctcacacattcacacacagcccgagacagacagagaaagcgagacagacctcccgagtgcgcgagcgcccgggaggaagggagcccaacgcagcgcggccagcgcctctccgggaagatgaaatcaagacgctcctgcaagtaaacttcggcggcgacaaaatcgtcgactgtggcagctgctgaggcggaccccagcgacgtgcaactgagctaggagggcttcctcccgcggcggcggcggcggcggcggcggcggcggaccttggagcgacaccccagcccaaacggagagaagagaagcacccggtacccacggcggcggccccgcctctcctggccggtactgttgttgcctccccttccctcttccccattccccgccacccccggccattagaaagaccggggctttgattttcttggacaaattgccatctccccgtttccacaaacttgacgtggagggtcggactgcgttgttaactttgatttcctagacgaaaacgcccgcagaccctcaactgctctgtggggggaactccgctcccacctcggatcctggacagacgcgcccccaagcccttcgaagccagccttagcgcgagggagcgcgctcaagctctggcagcctctctcccctcccccttcctctgctggccccgggaccgccatccgactcaaccctataaccgggtgcccgcggcgcttgccagtaactgactcccgtctgcgacaccccctttctcccgaacaggcctcgaagaggccagtgtggcccccccagaccccggagggcgcattccaagcgggtactctctccgcagtgaactgggagcgctggggggaggtctttgcgcatgccaggtgcacagacagcgagttcgccagcctcagtgccggtgcaccgcggcgggccgggcagtgcctgaaaggctgcgcctcctccgccctctttaccttcgcctcaagtactgtccggactcagcggtgcgtcctccaggccgcgcagacgccgcccgacccgcagccctgggcggctgccgacagtcgcgcccggctaactttgaaggggtaaaactgagtagccgggctggagggagggggctcggggccgcgcggcgctcccttggcccctcggagcccccggggcccccgcgagcccccgccgcgtccgccgcaacctcagcattggagccgccgcgggtgtcccccgcgcgccgccgggccgccctgggcgggacttctcccgcggcctccggggccacggggcgcgcgcaacaggcggcccgagccggcgggaagctggagcgccgacggcgtcggtctcggaggggtgtggagaggcgaggccaggcagagccccgtgcagccatggagtcgctcctgctgccggtgctgctgctgctggccatactgtggacgcaggctgccgccctcattaatctcaagtactcggtagaagaggagcagcgcgccgggacggtgattgccaacgtggccaaagacgcgcgagaggcgggcttcgcgctggacccccggcaggcttcagcctttcgcgtggtgtccaactcggctccacacctagtggacatcaatcccagctctggcctgctggtcaccaagcagaagattgaccgtgatctgctgtgccgccagagccccaagtgcatcatctcgctcgaggtcatgtccagctcaatggaaatctgcgtgataaaggtggagatcaaggacctgaacgacaatgcgcccagtttcccggcagcacagatcgagctggagatctcggaggcagccagccctggcacgcgcatcccgctggacagcgcttacgatccagactcaggaagctttggcgtgcagacttacgagctcacgcccaacgagctgttcggcctggagatcaagacgcgcggcgacggctcccgctttgccgaactcgtggtggaaaagagcctggaccgcgagacgcagtcgcactacagcttccgaatcactgcgctagacggtggcgacccgccgcgcctgggcaccgttggccttagtatcaaggtgaccgactccaatgacaacaacccggtgtttagcgagtccacctacgcggtgagcgtgccagaaaactcgcctcccaacacacccgtcatccgcctcaacgccagcgatccagacgagggcaccaacggccaggtggtctactccttctatggctacgtcaacgaccgcacgcgcgagctctttcagatcgacccgcacagtggcctggtcactgtcactggcgctttagactacgaagaggggcacgtgtacgaactggacgtgcaggctaaggacttggggcccaattccatcccggcacactgcaaggtcaccgtcagcgtgctggacaccaatgacaatccgccggtcatcaacctgctgtcagtcaacagtgagcttgtggaggtcagcgagagcgcccccccgggctacgtgatcgccttggtgcgggtgtctgatcgcgactcaggcctcaatggacgtgtgcagtgccgtttgctgggcaatgtgccctttcgactgcaggaatatgagagcttctccactattctggtggacggacggctggaccgcgagcagcacgaccaatacaacctcacaattcaggcacgcgacggcggcgtgcccatgctgcagagtgccaagtcctttaccgtgctcatcactgacgaaaatgacaaccacccgcacttttccaagccctactaccaggtcattgtgcaggagaacaacacgcctggcgcctatctgctctctgtgtctgctcgcgaccccgacctgggtctcaacggcagtgtctcctaccagatcgtgccgtcgcaggtgcgggacatgcctgtcttcacctatgtctccatcaatcccaactcaggcgacatctacgcgctgcgatcctttaaccacgagcagaccaaggcgttcgaattcaaggtgctggccaaggacggcggccttccctcactgcaaagcaacgctacggtgcgggtcatcatcctcgacgtcaacgacaacaccccggtcatcacagccccacctctgattaacggcactgccgaggtctacataccccgcaactctggcataggctacctggtgactgttgtcaaggcagaagactacgatgagggcgaaaatggccgagtcacctacgacatgaccgagggcgaccgcggcttctttgaaatagaccaggtcaatggcgaagtcagaaccacccgcaccttcggggagagctccaagtcctcctatgagcttatcgtggtggctcacgaccacggcaagacatctctctctgcctctgctctcgtcctaatctacttgtcccctgctctcgatgcccaagagtcaatgggctctgtgaacttgtccttgattttcattattgccctgggctccattgcgggcatcctctttgtaactatgatcttcgtggcaatcaagtgcaagcgagacaacaaagagatccggacctacaactgcaggtaaagccaagttttctttctttgtcttggatgaataaggtgtgtttatctgtgtctctgtgtgaaaatcctggtgcttttgtttcctacttaaatgcatgcagcatacttgcagtgcttctttttgtagggtgaaaagtttgtgacagtccaagttgatcaattcttttgatctgacaatttgctggaagacaatcatttagtgtttgaatggattctgtcacataatgatggtgagcagaaacgcaattatcattttaaaatttgcatagctgtctccatgaagttatggtaggaaaaacagagagagagagagggagggggagagagagagagatcatatttttaggaaaaccaccaactaccacaacttggtgtctggggcacagtgtttttgggacaggtactgaatgaaaggagagggagtgttggcagctaccctgtcttgttgcagtgatgaactctggagagagactgggagtgggagtgtaagatgggaaagggagatgagggggaggagagaacaggagtgtgtggagatgcaggtgattagtggtttttagtttattcttggcttgttttttatctagtccccaaacatctggctatataaagtgaaattctatcaggcatctgtatgttttcaaatatctggttggttggtagtgtggagaccaaacatcccaatgaggaacaagactttgcatccagatgtttcagtaaaaatagcaatcttctagagttgatgatgctttcctctaatgtgagactgtgttgtggcattaagatctggttcctaccagtggatgtcactgtgggctattgtgttacagtttctcttgaagtgtgtgaaggatgtgtgtgtgtctgtgtgtgtatgggggggggagggagagagagagggatagaagggggaggaaaagggagaaaagaagaaacacagtattttttaaaaagatttcctgataagcacattagaaggtcttactgaagccctttcttacatttggatagagcacataagtctaagcatttctagaatcctagaatccaatttaggataatacatgacattttttttccagcagtgtctcatcgaaacagttgaaaaaagttgtttctttagtttgctgaaaatgaatgatgctgctatttacaaccaaggtgtgtgtgtgctttcaacacacctacacatcagtgtgtcttttgtgccatttgtgtctgcatgttaatcagtcaaaatatgttcctgtaggttcagtttgtatttgacaccgtctgaaatgcacacttctgtgaatcagagccccctgaatatgtaacagccatgcaattattgtttcccttttactattctctgcgttacacaagttagtagacaaatgctaaccacacatgaatatcaatcaggtgccataaaagagcagctgcaatgcctcataaatgctttaatcctgttactagtgaaatggccatgacttttctttccttcagcaccaagtcatttcagatgggagaaatgtaaattaatattgctcttagctttcaaacctgtgactgctagtggcgatttttataggagaaaaatgtggggtcaataaaattttatttatatggagataattatggagaggactctttttaagccatcttctcagcataaagtaaatgcataagatcctttccttgatgaaaaagaaatcagcttgaaataaagatattgaaggctttgccacctcttggtgatgtatgactagaagtgagagccctttctgagaacttgccaaggagatgattaaacaggaggagagcatctgaatattgaaaaaaaaaaaaaagagtaaatctcagtgctctccaacttcacccaaatgtgtattttgtgaagcgttctgtttcctgtgatggtttgggattaatgaagtacagtataattaaataattggttaatacagaaagggctgcacaatgaatgcttcagctgaataatttgatggggcattgccaaagttactcatcttgggtaaacaaaatgattaaaatttcccattgattctgtaaacagattagaatagaaaatcaaccttagtactagggttttggggattttatctgctcccaaaccccagtagtaccagtttgccatcactgcaaatcttcctgagcacagagcgaaggggtgaggggaactcaattgcttaactctaggtagatcctggggacagagcaagaatttgcctctgtagatgtgtagtctccctatctgctcagactttttagaaacctaaagttcaggagcgtgtctttccatgtgattaggcagaggtttctttttctaagcctccgcagaacctcttcctgaaatgcattcatttatgagacttgcgagatgatctgcaattgctgcttgaattgggctccctttttgtattcagacaattagctttgtcgagtgagaataaggcacagtctttcccttgtaaagatcaacctgtattacttattaaccctattgttttgctgattattgcccagaaatcgaatttccaaaaaagaaactgaatcattatgtgcaaagtaataaatgactttgagaatctggctacatttaaatgtatttcttttgacaagtctcttaatgcctggtgtctttggtgcacgttgctgggtctgtgtcagtgttaattaaattgagctctttatgttccagttgcagcacagctgcttgtaggtacacctgaatggagaaggatgctgaatgcactaacctttaaattcctttgcagtaattgtttaaccatcacttgtctcctcggctgttttataaaaggacaaaacagcaagtgtctgcattgcatctcggtttctcccattagcgaggagcaagacaaaaagacagaggagaaagtgagcctaaggggaaagaggtaaaaaggcatttcccctcatttaaatgggtttggctattagatttttctaggagaggagggggtcggggggtgagtaaaagggaaccgggctagggcagggaggagggtgtggaggagacgcgaaagaatggggtctgatctcctaccccagtccaaaactgatcgagtgagtcatagaggaagctgattgagggcgtgtgccacatggcaaatgcctggaggaactggcaagggggtgggggcgggtattttttattttcctctatctcctctttggtgacttgctttgtatttcacctaggagttccttttggttccagggaagctccagatttgagcattttcatgctttctctcccataggctcaactttccctgtccccccacccgtgctcacaggccactcacaatgaaaaattccaaatccaaagtatagaaacttttttagggggggttggtgggaggttactatgtttaatatgaaaagtttatggccctcagcctgttttcccttgtaaaaagcacagggagaaacccgatgatgtaatgcaccagaataaggagctggagcggagatggggtgcaaccctctggggtgcttaatgtttattaatcagtgcatgatttgggagggtgttagtgattcatgctgccttttctgtcacatagaattgctgagtactcctatgggcatcaaaagaaatcaagcaagaagaaaaaaatcagtaagaatgacatccgcctggtaccccgggatgtggaggagacagacaagatgaacgttgtcagttgctcttccctgacctcctccctcaactattttgactaccaccagcagacgctgcccctgggctgccgccgctctgagagcactttcctgaatgtggagaaccagaatacccgcaacaccagtgctaaccacatctaccatcactctttcaacagccaggggccccagcagcctgacctgattatcaacggtgtgcctctgcctgaggtgagtgcagctaagtggctctgtgaggttctcccaggtctccttctttagctgctcgctggataccataagctgctgtgctggcacatcccctggcaggggtggggagaatttctctgcttatgcccattttcatactaagggtttgctatcagtgcttcttggagcaaaaggtaacccaacatactgggcctttgtgtaggtatgggtattggaattggtaactcaaagagtctgagcccttgaaatcattatcctggcataactcaagtttgctccacctgttgcaaatatagcatgcttgacagccagcagtaccagtatgccagtaaagtggcttagaaagagtcatcaagtagtgttgaaaatggatgaaaccctctaatgccctgggaccaattttccagtgtgagagtgattcagcctcctaaagaccccatttgctttttctttcgtcacatcactgttctctagcattttggtgagagaatatggataggctggttaaagggaggcaaagcaaaaaaattaaaaagccactttgccatttcttagcagttctagtggtaacatttgatggttgaggagattgaaactgtcattattgctgaaaatttaagaattagttggctggttgcagtggctcacacctgtaatcccagtactttgagaggccgaggcaggagaatcggttgagcctggaattccagaccagcttgccagcctgggcaatatagtgagacttcgtctctaacaacgaaaaaaaaaaagagtaagaataagaataagaattatctatgcatttgagtgagctctgtttctttctcttcactgggaatgaatgtatttaagtagaattttttttttttttttgagatggagtttctcttgttgtccaggctagagtgcaatggcacaatgttggctcaccgcaacctccacctcccggcttcaagcaattctcctgctccagcctccagagtagctgggattacaggcatgcaccaccacgcccagctaattttgtatttttagtagagacggggtttcaccatgttggtcaggctggtctcaaactcctgactgcaggtgatcctcccacctcagcctcccaaagtgctgggattacaggcatgagccactgcaccgggcttaagtagaaatattttttaaaatgtgatgtggtcagatgtttgctggctattgaaatattttagggcagtagagtggtatatggatgatggctggtgggtggctgggaggaaggctataagtaacatttcttaagttgatttcatttttccatgaattgcttaagtccctctttggttagaaatctgatgcactgggaggcatatgtcctcttccaagctaccagcgaaaagaatactgcatacttagagagcactttcacatctttcaaagcaccttcccaaacattgtttcgtttgatcctcacaatcaggtatcttgataggttgcccttcagtagatgatgaaacagaggtccagagatgctaagggacttactcagactcacaaagctggtcatcaagagagggaggacgagactgaaggactctatactgcctggcaaatgtgatttcagtgacaccttcctgccttaaaagtaattcagcctgacatacccaggctatgatgcatacataaaatggcctcatagtatttgtgtcaattttgtaggataaggggtcttaggaccacttacattgattgcttcttctagttcctgaacaataattcccatcagaattaatggggccaaacagcagtgcttttgatgagtaactgatggtattctgccagcaacaaaagcaccaatattttcaatttataactctataaataaggattttttgaaagtccagtattgtgctaggtaaactcagttataattattaatgtcagtgaatactactaaggcctaggccgtagactacttacaagactacttgtggatcaccaatagctcagcaatagaaagtgagaggtagtggtgtgtagtggaatcagattgatcatgattttgaatccaggaatcactgcttgctgtggaacataagactctgtttctttatctacaaaatgggcacacctgtcatgcaaagttgttccaaggaatatgacttgtgtagtgtagtaggttcaactcattggtgtccccaaaatagtagacctcttcactatacagttggagaatcagtgttacaatggcttgcactactgattgtgtctccctaggcacttgtaaccaaagaggaatttaggctgcttctatatagatacatcctacaaagtattatggccatactactcatattgatcatttaaacaatagaggtgaaagatgccaaagttgtggggttcagttgttcacaagtaacggcactgttacttgtggagatggacaaaagggttgaatcctgaggacttggtgatcacttaggcaatcaattcaaggcactagagaaatgtgagttctggtgtctatgaaatagatggagaggacagaaaacatatgacgacatctgattggtttacctaagacttagtatcatttctgggattcttccatgggctgaatgaaacaaaatattgcttcaattatttagaaaagccgtttaaaatctcagttctgatcctgtctctgactcacaaagccagatgcttttccttggttaacaaaattacacagttttggtgtgtacagctggtcatggccaagacagtgtgtactagacatagtgaggttgtgtgtatttctaatattcagtccctcctggagagttcaactggcaaacccattcagaaaggagagaggcccacttacagctgaatacagaccaggccatttaacctgaatcagtcacaatgccctgcgtagggaaaatgacacttcttttcttttataccaaaggccactggactcggtggaatacttaggtccaatgaaatctatagaagagcagggatgattgatttgttcattcaactgatatttgttgagcctactctttgtaaggcactgctctaggctctggcgttagagagatgaaaaagacaagaaatgcacattctaaagtgtgagacaatcaagtaaataggtgatttgcaatatagagtaataaatgctaatatagggtgcaatgggacattctccattgctaggataataacattttgatatatttcctacattatctttatattttcctaattaattaattaatccattcaagaaagcaacatttattaagcaattatagcatagaatgataagtgctatgatgtggcaaatataagattctatagaaatttctctatattatgttacttacattgttctttatattatttcattaaaccattctttcatttgttcattaatttatcccattagcagttattatacatttagaatgtgccagataatgtactacttcccggggatcaaaaataataaaacacttgtttcttgaacccagggagcttacagaaatacagacaagtaaacaggtaatttcaattcagaataacatcctattcctgagcacgttacattcttactctccaggttgggacaaaagggtactacatagtaggttcctctgttgggttacctgtgtcaaacccagtccctttatgagctgtagatccagttacagggcttactctcaaagggattatagacgagtccactcagacctgttgcgtgctagctgtactcactctatcacactttgaaatttatcaccatggcattagatcaagtcagcaagcattgttggagtatccactatgtgctcagctgtgtggcagggaccatggagattccaaataagtttaagacgtaacttctgccctcagagagttcacagtctagttggggagctaagatcacccacaatgatttcacgggcaagcaatacaagatagtttctgatcacctgtcgctttgtagactcctaagaactcctttctcctcctttaatggcagccttacattttatgtagatttgccattgaaccctcaaaatttagtgctgaatggaagatagctcttgtatcagtgtccaaacctagccacatctgaacattgttggctctagaagctaacagaaatatgactttgaatgcagttaggtaggcaaggtaaagggaatggaacactaatcaagaattggaactcagtttacagtattgcagagataatcttgtgtagaattgtatatcattatttacttgtcctctgatgttggctgggaaatcagctatgtggattttgtggtttcgtacacaaatttgaggggcaaagtggaggatgcctttgctgtttacagaagacttttgtagaattattgatgtcaggtatcttttacatattttaaactgaaaggtgaggtttgcattccttggtatcctggtttattttactcatagacttagtgtatatgtgaatgaattagagggcgtgtgtatgtgtgtgtgtatgtgtgtgtgtgtgtgtatgagggcgtagaaaagagtgaagagagaggaaaggaggttgaaaaagaaggaaaatggagaagaaagatagtaggtttgtcagtttgctaagatctttctaaaaatagtccaaattttttgagaggctccttagtaaggcaaatgatttttcttccggtcttatggaatggagacatgcctactggtgtctctggatgctggaaagtgttattcctttgtacagcagcattgctgcattaccatttttgtcacctggctgcagtcattattggaggaagaaaatgcaactcattgcttctactggaaatggagacttgggtgaggcttcttcttgcctccaggaggggtgaaatggcccaaacacccagtgtctttgtgcagtatttttaaattttagttttctgatgttgaatgtttctgagctgacagctgtaagggagtgatagtaggcaaaaacttagagaattccagtcataggtccgtagggatttaaattttggtttcagtctcaatcttgaattctattttctacctttcatcagcaaactgtagtttctttgatatgaggcatctaaggggtgtgtgtgcatgctctgctatagccactcatgcaacagtcttcataagtagtgacgtagccgtggaagagcttgcagaacaagaatgtgtgtggcagccaaattgaatgcttccaattatcctacaaaaagtctgaatgcatggtcatcttagtggaaataatgaaaataaaacatcagttaggctttgaaaaaaaatagcccagtacactttagttcctaaaacagagttttaaagttagagatttgcagtgacttgaatgaaattctgggctaaattagacagccacaaacctatcaggtagtagattcagaaggcactaaaaaataataggtatgataaggctggtttggatagcatggaaatgacacaaagcatcacctctaattaaaagaaaccaacaaaccctttagtgcgcgtcttgtttgtttgtctccttattacagtagggtcttggaatcatttaagtcctatccctaagggtcaaaagtaaccctgaaggagaaagcaatgagaaacaatgcagcccacatcttttcgagcattctcatttcagttttcttcaaaaatcaagggctcaatttctaccagcagtcattctagggccacccattgcctacattgtatcttattggcatgtttcacctctagctgagacagccggtttcccagtggggatgggcttgcaagatgtgttccagaataaactgttcctctgttgtctccatgcaactgccacagaactgcagaactgagttagtttacattagtatctgctaatttattattatcattccttatcggcaattaactggttaccttagagatcacctctctccccgtacaccttcactgaagttgagctcagccagagctcttgctaatcatcctgagatttttctccccaaggggctggaggcaggacattttccacagagggctctaaggctttggaattcctcttatcagaggaccacttgttttgggtccaggtggctccacctggttttttctctgattgtcagtcagacttacaaggtaggatgagctgcagacctctctctccctaaccttgccccagcttgtgctgtggcttgggcttattgtgcccagcgcagaagctaagggcttaggggattgcttgttaggaattaggggactgaaaaaggatgaagtcacctcctggcaaagctggagtctttcaattgtggcagtgctgtggctcttaggcgtctgcctcgagtttcagatgttggcccctctgcatgtgtacctcagcttccaggatttaggggaggccaagcttggttgaatcgagtgtctcagatttgggtaaataaagccgtttttacaagaggcctgtgtgtgagaggtgggaggatggctctggagcagccattttcccccacggagaagaggcttgatttcttgatgcgtgactggctggcctttgatgtgagcctcatttacttcgaacaattgagaggcttgaagtgaaaatcccagaggatcagttgtttgcagagggaaatgctcttcaagttacatttcctatttggctgttgtgtatttagagtagtttttgtgtgggctgcatagtggggtcactcagcttctagtgggtgtacccaggctgctagcacctccctgtgccccccaggggaatgatgaggaacattcctgcagctgtggggacagcaactctgccaactccgggagcttgagctcctgtgcagaaaccttacttgttatcattaggcatattggttaggaccacacagctccacagcatttctagaagaggtgtcagaatggaccagtgtttccactctacagtaatgaaaatggaaaaggcaaatgacttacccaggcacacaacatttgcggccaaacaagcctccattttgcttcacagtagttcctctggtgcagcttccaagcgttttctgtcacataatgaaaaacctgacaggactctctaggaggacctgcgggtatactttcgatggtagttgtgttcctgaaaagctggtcagccaaagggtgtttgttttgtaaattagaccccatgctaatcacagcagtggaattctgtatttaaagaaagcctgtgatggatcctttcataaaggagagtccttatataatgtgaataatcaactcctaactgatttcttttgtaagtctggattttcacatatcttgtttgcttaaaattagattcctcaggccgggcgcggtggctcacgcctgtaatcccagcactttgggaggccgaggcgggcggatcacgaggtcaggagatcgagaccatcccggctaaaacggtgaaaccccgtctctactaaaaatacaaaaaattagccgggcgtggtggcgggcgcctgtggtcccagctacttgggaggctgaggcaggagaatggcgtgaacccgggaggcggagcttgcagtgagccaagatcccgccactgcactccagcctgggcgacagagcgagactccgtctcaaaaaaaaaaaaaaaaaaaaaattagattcctcaaattgacaagatttacaaaacctttgaaaggtgggccaattcatttttcccttgattgaaatctggcccttgaatcctcactggttagccttcctgtttgatttttacttaattaaacaacttgcaactatgtaatatttaaaatatagtgtccagaaaagatgggtacgtgtcattgaaatttaacaagtattagcatttaatatttgcttcagattctaaaaaaatgaaataaaatatgacagctgccatcttcccatccttttctctcctttgtaaataaacccttggctcaaagaacagaagcccatcacgaatttttttttgtcttcacctgtagagctcgttcctgaagagatggcttcccctttgctgtctcagattatgaaagctccccaagtcagtaaggatttcctggattgggtagagcctgggaattactttggaaagtgaaagagctctcttagacttgcctttaaattcagtgtttggggagggagaaaaatcacttttcagaatggggaaaaaatgagaatgagagtgagacagacaaattgacagacacatgttaggtccagctacctacagaattttgagcagaccctttgggactgaagcaggcaggaagcttggtgtcaagtctgtgttctccttgagctcagtgttcatggactagcaccgcggcttctttttgttgttgttgttgagacggagtctcacttcgtcacctaggctgtagtgcagtggtatgatctcggctcactgcaacctctgcctcccgggttcaagcgattctgctgcctcagcctcctgaatagctgggattacaggcatgcaccactatgcccggctaactttttgtatttttagtagagacagggtttcaccgtgttggccagggtggtctcgaactcctgacctcaggtcatccacccgcctctgcctcccaaagtgctgggattacaggcatgagccactacgcctggctgcatcttggcttcttaatgttagatgcttaagcactgtcttgatgtgcatagtcttctgatgctccattaagtctctgagtgccagggtggccagttttcagtttctcccactgggccccatctggccgctgttctgtggcaagctgctctccctcactgccaccagcactggccttggcggtctctgccttctggattattttcgctcccaaatctgatttccagagcatgaagggcacctcttctcagattgtgtagtttgctcttctgagcaaaatggattccctgtgtaagccgacaggaagaaaagttcaatccaaaggccagatccctctttaggggagtttgtgtgtgtgtgtgtgtgtgtgtgtgtgtgtgtgtgtgtatgtatgtatgtgtatgtgtgggagagggagagggggaaaggagagagagaaagaagcaggagggaataaaatgaacattatctgcttctctcactcactttttttgcctctgtgatgatggagcctttgccggctgggctgaccgtacacatgtctatgatattaggtcctcagagcccccttcccaactctttgacattctgctggttgtctccctgaggaaatgctcataagcttagttacagcagggtgtgatcccccaaatgtgaggccatgacaccccaatttgatatagctcaaggatagatctctcagagactctttttaattgagatctcggtgagtaggaagcagccaaataatcattgctgtgcatacaactcagcttaagaataccttatagtgcatattttcaatttattagaaattattttctgaggcttgctttctctttttgtttcttttgggcacaattctgtatcaagctttcctcttctttaattctcttggcttgagggagtctgctatggactgcctatgtgtacaggtcgtttgctataaaaccatatcttttctaagtgagaagaatggacagggagaccctgtcaaactgcattcagagggattggcttaacctttaagaggcttttttataactaaaaatgtccgtaatctagcattcatatttgaaacttgacatgcttgagggaggcagggctctggagatacagggacgaacagaggcatatggctacaggtaatggtgaacggcttgttggaagactgatttcctcctctgttctgccaggcacagaggccatggtaaggacacagacacactgcactcataagactggcattgactatgagcttgctgttctgatcatttctttaattagtgcatttccattttttcaagtatagacttttgagtgatggagtatgctaatggtaacatttgttcctaaaagcttaggggagagaacacagtggcattcgtactaaataatggttttttcgtagtgaagattttgcctgattttaaaattgcaaaataattttatggtagttatggctttttggaaacgaatctcaaatactacatatgaaacaccaattttctgtgtggcttgtgcacttactaatggcatgtgtgtgcttacacttctaggtcattctattttgcctttactggtaattctttagaaatagaaaaagaagtgtgctttgttgcagtaaaaaatataataattttctgaaatggaaagaaagctaacctgcctttgcaaaaactatgcattatgtagtggcctgatggagcaaaaccttataaaactggtaagctataaataccatggcactgggcgttgttggaatgacatccggggcttggtctttgcacatctgatcaccaggtaccctcaagaggagatcatggaaggtggagaaaaatccgtacctgtaaaggtttgtggctatgcatggtgtcatatttggaaatatgggatcaaataaatgtgtgtgatgtttccaacactttgctgtcctcactctttgagcctagcaaactctatcaggacagttttctctagtgtgtgagtgagcccaagtgactgtatcatcaaagataaccatctagaaatctgcagttctgaggtaggggagatcactaccaaaacagatgaaacaattaaaaacctcataaaagagaagctttagtttattgaagcctgttattactagggaaatcagaatccaagacatagagaattctgaaaattccagacaaatgccaaactacaccaaacctgcaacaatatgtgaagagattgggttgggggatctccaagttatctttcagctctgggtgtaaatgtgtgaatgtttgcagcattggtttgaagggcttcatatagctgcctgcattgaagtttgagtccatgtgatgacaatggttgctctgtaggtggtattgaaggcagaggacttagctatggcaggtgaaacaataggtacagcacattagcttttaatgagggcagcatattctgtgtataatctgagttgtgagtgtgcatgccaaaactcagagcctctctgttcaaatatgtcttcctgtccaacgcgagttctgccataaaggcagcaatgggtattctaaccttgcttcatttggtttgtacttgttctagggatgaataggagatgcacgcgtcttgcctggcaaactagacctttcaggagagcacaaattcacttaaacataaattatgttgattatcactctacctaaaaatttatagagctggaagtcaccgagatctccttttaagttgggtattcttgaaaactgttttgtatatcatgataaattatctaaccttttatacagttgaaggccaacattatggaaataagcagctttttattccattctaaggtcagtctaaccaaattatgcaacttctaatgcagttgcttgaagcttccactttgaaagttttttcattttaataccttgcaacagagataaatattttagctactattcatgcttaacaatatatttcactgattgtcattctctttgtgggatttgttggcgtgagaggcagtccaccatgcctctgctcattttgatgtttgttataggttatcagaaaagagccagaattcaataaaaaatgtatttttgttcttgctgttatttttaatttcaggccataggaggctgactgagccctacagaatcaatatatacttggcacttggggtttgacttaagagccaaaaatgtggtagattttcttttaaactagatttgattccagaattattaaacccaatgcatgttggaggctgatggactgcatccagcaggatttggggcactttctgtaacaaagcaatttatttctttcagggagtcactgctacttcaggggaaggtgcagtcggtggggacgcccttggaagttctgttctatcctaggctccctaaacaataatttgtaggagctccttgatggtaggatcaactctatgcagtttcttttggatagtgtcaggtgtttattaaatgtattttgttactgatgactagctctatagtggttatagtgccctgctgttagagagtattcatttattctgggtcaaaccttgccctctatgatgatttgcctccagactttagtgaatggacttactgtttagtagttaggctctttaaaaaaatattttggcttgaaaatatccactcattcatccatccaccaaatatttatagatcatccttcactgaccaggcctgtattcagcccagagagacatagagaaagcataagtagtacctcaccttgtagtttatattgccactgaggagacaagatagaagttaagcacattttctttaagtcaatgagaaaagcagagatcatttactaaatggtgccatgtaattggttaacaattggaaaaaatatgatttatttcccactatatgacaaaaataaatttcacatttattaaagagttaatatgaaaactcaaataataaaatcattagaagaaaatataaataaatatccaattgattttgaagctgaagaggacttcaagagcataaaaacaatgaaaatgagcacaaagaaaaataccagcagctctgactatataaaatttaggaatgtctatatatctacaagtatcataaactaaattaaaaaataagccataagctgggaaaatattttaaatttatagcgcagagaacctatatttattaatttgtttttcagctttattgggagtgtaattgacaagtaggaattgtgtatatttaagatgtacaacttgatgttttgactcatgtatacattgtgaaatgattgccaccatcaaactaattaacatagcctttacctcatatagttaccattttttaaaatggtgagaacacttaagatctactctcctagaaaatttcaggaatacaatacagtattgttaattatagtcaccatgctagacattaaatctccagaacttatcttgtataactgaaactttgtatcctttggccaatatcttcctatttcccccacccacaacccctggcaaccaccgttctgttctccttctatgaagaacctgtgcttattaattcattaattaatgcttcaattatttatagagtgcttaccacatgttagtcactattcaaggtgctagggatacaacagtgaacaaaaatctctgtctccattgagtttacatttttatggacagatggtgatacgaagaaaaataaggaagtatgaagcatacatgttttgtcgagaatgaggattgctctaggaaggtcagggaagacatctcaaataagaggacttttaaacaatacccttatatataaagagctcttacaaaacaatgaaaagacaaacaccccaatataaaaaatgtaaaatgaacacaaatgggtaattaataaagaagccattcaaatggccaatagatatataaaaatatttcaaccatagtaatcaaataatagcaatgaactgctattaatttttaattgcaaagatgatgcctacttactactaaaaagtcaaggaacacaggaatgtgtaaaacaaaagttaaagtctccacaactatttcctcaccaatctgttacctcaggggaatcacagacaacgatttgatatgtaagatgtcattttgtacttatcaaataagcaaagattaaaaaaaaaacagtgatggcaagagtgtggttatgatacactgcaacatggagtataatttaaaaaattgatataatctttcctgggggcaatttggcaatacacattaaaagccctaagatatctaatatttctacttctggaatttatcctaaggaaataattttagatcagcgtaaaaattcatgtacagggttgttaatctcagtataatttatgaggataaaacatcggaaatatcctaaatatcatcaatatgttaatagctaaatatattatgatatatacatatgctagaatactgtgaagccagtagaatgttttgaggaatacttaattacacatgaaaatatggtataatatacattaattgaaaaaatcagaaaataacacacatagattaattccagtttaatgtatgcatatattattccaattgtttaactataatacaatatataaatatatataatatataaacaattccaattgtgtgtatatatatgtgcgtgtatgtgtgtgtgtacatatatatattcatacacacacatacacatgcacatatgcacacacataagactagaaagaaaattaccaaagcattaacagttatctcaggttgtaggaagtcaggcaatttttactttttaaatggtatacttttttaattttccaaattttctgcattgaacatgtgttatttttgacatcagaaaagcaattacttaaattaaccgtaatactatgcagtaggtattaagggccaaaaaggtggcatagacagtttttaatgagttattccgaggaggggcagaccaaaatgttccttattttcattttccaattagatcataccaattttttcttcttaattttcttctcttggaggtctctctcagaaggtaacaagtatgaagttttacattttaaaataactattttatttacagtttaccttttaaatgtgagaaatgttatgaacaatatttgtttcctttttcattctttttgtccttgtgtatactcttgtaaaagtagatttgatttgtctcaccagtgttagacatctagttcacatactttatttttagaatgagaggttttaaaatagtaaaatttaactgcaacttatacatatatttaatactatagaaatgatataggctttatctaagggccacttttggcaaaatatatttttttcagtgcccttttcagtaccaaatggccaatttggagggaagtgcttttttagtattctccaatacttgatttcatgttcttgcttctcggctctgaagcatcctgtttcaacatgatagccccaaccatgtggaacacaaaaaagaaggagtcaatgatttggtggtcattgagatgctaaaaattttaaattcaaccttgactaaatgcactatttgtgttcttttttcaacaaattagaatgggttcaatccttttctgaaaggcagatttatttgattgcttcctcatctagtaacctagttttggacagcataaatacaaaagccaacatcctttggaacacctctttaattgatggctgtataaacttctcacatcctaagcagcacagttaagggcaaaatatttaattcagtggtcctgtgtagatagacatcagaactacttagatattgtaaagaaaattctcatggaaaaaaaactcacacagatgcttcactctccaccccatagccaatgcatgagaaccctgtacaacatcactctgattgtgaatgaaatctttgctacaggaaagtgtctgtggcctaattctgtagtctgtcccttggataaatggagactatgactttcagcaggactatatatttcttatatgtgcaaccatttaactagatgggtttaaatttgaattataaggttttcatgttacagcatggagcatttgatagaaagaaatatcttgattttttcatgtgagtgggcatgaaagaagggtctaaaaattgagggacctcccaccccagcctcctttgtagttcagttccttaaagtaaaagtcttcatttaaagaagtattgagaatgtttgaaacttgattatggagcaacttaagattcatattttctcttcagatggcttaaagttgagattgtttggattagaaaagaatttccatgaaattaaaatatttaattgcagttaagccaggatttggaaaaagttaatgtgataaagcagagtgttctagctgaaaaaaatttatgtaatattatgtaaattcatatcagcatgaaagttaatataaaaccccagaaggtgataagaagatcgaaagcaaggaattttgtttattgaattcaaattctatttacacttgccaatcagtgagggttttggactggctgtgaagagagccctactaagcacacgatgctttattcgatgtgtgtgaaggcctgactctgaacttgcttatgggccccagacagaccaaaaggccttgaggtacccttagctcccaccctccacttcctatggctgctgttcgctaggtcccaagaacagaactgatgggatgatgtgactgaaatgtttttatttaccagtgccgatgagggagatagaaccatgtagggagatatagatacacaaaagctccctgcaaccaatactaatctcaatgagttggtatttttgaaaacacatatattaatgtcatgactaaataaatgcccaataaatgtttgttgaattaatgagaaaaacatccatggttttaatgttttaaaattttagttgagatcattctatttctcttttctcatctttacattatgttataagattttttctttttttttgagatggagtctcactctgtcacccaggctggagtacagtggctcgatctcggctcactgcaaactctgcctcccaggttcaaaagttcctcctgcctcagcctcccaagtatctgggagtacaggtgcctgctaccatacctggctaatttttgtatttttagtgagacggggtttcgccatgttggccaggttggtctcgaacacctgacctcaagtgatccgcctgcctcggcctcccaaagtgctgggattacaggcatgagccaccatgcccagctaacatttttttctatgtcattagagaatatttataagcaattttttagtggctgaattgtattctgttctacagatagggtttagttttactcaaacaatcgctagcattgaactttgaggttatttaaatttttgttttatataaataacaccatgatggctatccttatatataaattttgttgtgatctctgattgtttgcctgtaataagttctctacaagtgaaattgttttatctgagggtttatatatttttaaaagtggtatttcccccagataagttgtagcaatgtgtactcccactgacagtgtatgaaagcccatttcactgtactggcaaaacattattatagttttaaacgtcaccaccaccaatctggtgaagctgtgggaaaacaggcagtcccatgcattattggtgggagtataattttttttttttttttttttggagacagagtctcactctgtcgcccaggtctgagtgcagtggtgtcatctccattcactgcaacctccaccttccaggttcaagcgattctcctgcctcagcctcccaagtagctgggattacaggtgctcaccacaacgcctggctaatttttgtatttttagtagagacaggttttcaccctgttggccaggctggtcatgaactcctgacctcaggtaacctgcctatctccaccttccgaagagctgggattacaggcgtgagccaccgggcccggcctgggagtataaattagtaccagtcccatagagggcaatttgacaatatctctcaaaattacaaatgcatgtacactttgacccagcaattccacttttagggatttaatcttatagatatgcttgaccacatgaaaaatgatgtatatacaaggttcttcattgatgtattacatgaaatagcaacaatggaaacaatgtgtatgtctgtcagtggaaagttttttttaaaggagtgttttatatattgatatggaaaatctctaaatatattgttaactaaataaaaggaagattcaaaaaaaagcgtagggcacactattatttctgtgaaaaagggagggaaaaagagaatatatatcttattggtttatatatacatgaaattgtatggaagaataaataggaaattaattagaatggagacctgttgggagaatggccaataagaggataggggacaggggtgggaaggagaattattagtttcatagatggaaaatgagtatctaattttagtggaaatttgtatttctttgattactaatatatatattaaggtaaatccctggtttaatttattggaaatacttttcttcagtttgttgaatgacttttaatttgttatgcttatttttgacatagtgttttggaatcatatgaaaaaacaatttgtcagtgctttaatctgcgatttcttctgttgcttttaagctattcaactttctaccaacaaagagactatatatataatatttcttccagtatttttatgaattcacttttacattacattttaaattcattaggaatttattttgacatatagttggaagtatgatgtaaaaaacattttcctagatggttaattggttgagtttgtaccatttattgtttatttcttcttcttcaccgtaactttctggtgcttctgaaaaacatgttgagtttttatagagactaggccctttcctgggctattcatttattttccactgatctgtttgtctactataccaataccacactgatttgattattgatactttataatagattttaatagatagtaggtttagtttctccttattctttgtctttaaaaagagtttcaatttttctgtttattgtttcagatgaactttggagtcatgttaagtctcaaaaatgattatgttgggattttgattgaaaatgtaccaaactgataaatttaggaacaattgacatgtatataatatttagtctttttatctagaaatatgacatctttccatttagtcatgtttcattctaatgtcatcagtatatttacatagttctccttacattttttgttaagattacttctggctatttaatggtttcactgttattttgagtgggctctttattccattacattttctaatcaggcaaagctggcagagtacatacgagagctcttgacttttgcatctctatttcgtatggagcgctccatgttttcttagatacggtttgtcacttgagtgttcatgtaatagttattttgatttattgcatctttgcttttagaagttagagtcaggagccaagtggctttagggaaattacttcctctctgtgcctcagctttcttatctgtaaaataagagtaatgggacctacctcgtagattcttgtgaggattcaatgtgagtgttcaagcacctggcacataataagccatcagtaaatgttaagtagctattactattatgatctctttttgactaggaaaatatctaatttgtgcctcttaatctggaaggaggcaatcagattcttactgcctctagcaatgtactgtagagggcaacacaattgaattttgaaattaaagaaaactttcatttgcctctattctgttactgcaaacaaattccacctcagtgtgcttttctgcttttagttacacaaattcctttttacatcacagtattcttttccttagtggctccttcagagtttctcattgttccttactgtgacacccatctctagttcaaatgtgaagtgggaggaggtcctacgtgaatcagagttagctagatgtgctggccagagagccagaagccctcttctgatgttatcccttagtattttctttccagagtcagtggatatcaatttaggccttaatctggcatttttcaacctttctcctgcatgactctgtgctgggtatctccattagctaggaagctctggagatggcaatttcatggaccactggcttggggttgtgacctgcactttaataaatactaccccaagcctttcttatcctgtgacctgctgcttccgcagacctgggctctgtttcagggccactgccttttcttctttctttcatgcaagtgacttacaaatgaattttaaatagccagttcatggtgaggaacttttgagatcatgttcccaggactatgctctgtctcagacatgttttacttctacccaggaaaccagcttcttgtatctcttatccaagaatattttatactcttttctcaattttggggtgaagtgtagtggcctagggcagggactccaatttcactttggcaacttgtggaacaatttatgcttgtggggggttttaaggaagtgctaggtggcttggggagggggagaacaaaagcttggttatctgttataatatttaacctgaatgtgaaatgtgtgaactctgccaaacagagtctcactgtaagtgaagcattgccaagaaaataataggtaggtggttgtgtctatttctttttttttttttaaattactggatattgttcccaatagtcagcagttgagtactaaccattttctgttcatttcagtacaggctgattattttccttctctagcttatagagttgtaatccatgcacgtataattaaaatgatatccaaatgcagttttcctttgaatttgtagtggctgtgtgtgtagggaaggttgttgctttgctataaaccacagacccagagtaaacctcagctgtgctgcagctattttggacgacagctttctagttgcttgtgtgtaattgcccatattacatcatcccaaccattgtgaaatgtgcaaaatacaaggcttatctaatgattcatttcaggtggacagtttcttttaaattaattttaggagtggttctctgcactaaacagatctccctactttgttcttgcttttttgttcaggcctacggtaatttaatggttgataattgatgtagcagagagaagtgtatcatattcattgtgccagtaacctttacagtctacctaaaatgttccatgggatgtgctttctcttggcgtaagtaaagaaccaaggggagaaaaattccctccacagcatatcaagtaagcattaacctcaaatgaaattaatttccctgtcattgagtagcagagaaaaaagctatcttcaacggctacaagaggcttggtcttactggggtttcagtttgtcatattatactgtctttcattatcacagacatatactatagggaagactttcaatgtctctgttggtggattgcactaactcatctttaagtcaggtatgtgaaattcaagtaagccaagaccttccagtttttttcttatcaatgttgaacattcataggctaggtaatattacatgtttagtcacctactagtaagatgaggtgtttacaactaatatttatctttggccttggaccttctacgttgctcacagagtacagttttgtaaaatgctttataggtaatatttcaaagtggacaaaaaaagaagattgcttagaaccagaaaggtcagaaatagatcaaataatcctgggactttttattgctgaataatggactttgtaaatatcacatgtgactattagaccaaatgagactacatagaattcaatattaattggttcagtatccgctgatggcctgtttgcaggattcaatgaaattatattatcaatacaatgttttattgattccttggtttgcaaaattaaataaacatagcgtaagcacttgcagtggtaagttgtagcagggaaacgggttttgatttggaatttgaaaacaaaattaaaggtgattgaagcagaaagcaggctgtggcataacatttctgccagcacttttgaagtaactgaatatatctgggtgtttgggaggaataagaatcagagaacagagactttggaggaagtgtttcaaaatgctttcttaagggttatttcaatactagcaactcattttgttgaatagtttagtttgctttactatggatatattaatttatttcattctatgctatttttttccagtatctatgccattctttgtgttgttctagataatggctaaatagtggtcagcaaaactgacatagtcccctgccttcatggggtggggggacaaaacaccaacaatataaaattataatgctatgaaagaaaagagcatattattatgaaagagtaaaatggggaaactcaacctagtctgggggaagggaagtaatatttgagctgacccttgaagggtgagcaggagctgtgaggcaaaaaggtgggggacaggaagatggttgacggctggctgttgacattaaactcttggcctaatctcagggaaccatttcccacccctcccccaccaaggtggtctgaatttgagtgccaaagtcttgaatccaacacacagccattcgttaaaaaagtggaaagaggctgaggcaggaggtggtggttgtggtaacacacagagtctaccatgaattctgaaaaaatcaaattcatttcagaaaagcagccatgaaaagaatctgtttcaaagtaaagaaagaagcagcctgcagccagcttcagatggatggtttgtggctcaaatccattcctccagttactgctcgatggcccttttgagtccatgccacctcccacccccaaccaatgtcaatgggtggtgtgcagatgcagctcagtaagatagtgttttagggcatgcaaggctcatctagtcacatttataacatagaatcagagtactgtcaaggcaatatttatcattttatattctttcttggctactcttgataaataggaggtcaagggcctcttcctctttatattccctctggataaacagacagcagtctccagagaagaaaggcgtctttccttccctattttctgcttccaatctgtttctttttccctctttctgctccaactttttttctgtgacgttctgtctgacagtcagcagagggcgtatagacgcatcaaaagccagcctttattcaacttggccaccgtaatttcattgtctttatctcttcatctttacattcctcaaaggcagggatacatcctggcgttttctctttgtaatagtaccatcaagggcaaccattccttacctattttataaaggtgggcaaaagctactgtctagataaagggaaagaagttgtgttcctgagagctgggaggaaatgtgtgtgtgtgtgtgtgtgtgtgtgtgtgtgtgtgtgtgtgtgtatgtgacagatctcagagttgttggtgccctacgtgactcatttgggaaggactcgttttgccaatagcaaagcagacagtctgggttcctcttcttctttgctttcccggggctgttgtcctgatagcagctgccctgcttcctgacatgtcctaataatgaagatgatgtggccagggggagattcatcttcttccctaatctgacttcttcattgaattttccccttactgaagtccaaagaggattgtcccctcttaactgtgtgccctttttactctgcccaaggtcagagaatccagctgtggcctgtctgcctcccacatctctggctgcagagagtgatccatgtttgtctgtgacagctgtgtgaatggtacgtgagaggcagaggagagctgtagtttaagctgctccaaagatgtcttggtatggcagtgctgacgaaaggggagacttgtttgtgtcgatgacataatcagagaagacatccatggcccagctgcagggagtgaagaagtgtgcagcttagtatagtcttctgacaaaagcccacacacttcaggtttatctgcccgtagtgctaatctccttctgatgtcttaacctgacttttgttgtagtttgttcagacggttccagtgacagaaagaattgcttggcttgtggtggttatactggctagcacgttaatacaagtgcagggtgttttataaccaactagtctcataataactacacatgaagaacaggcaaggtttagtttagcatattctgcctattggaaagcatcagacacggttatagctcctcataaataatactgatggctcctaaaggccatttttcatgtaaatttccttactgttagtgagcttgaaaaagaaccgtattgacgaacaggttattttaaaagtagaatgattactcaataaaatacttttcagctttttcctttggggctctggggttcccccttatctcaaggatccacgtgggcagattgcatgttagctggagaacccaatagacacattcttatttccatgccagcaaaacactaataatctaaacacaaaggacatttaacacagtaactgtttctgatggagcaagtggtactgccagctcgctttctcttggatggcttctgtacggtgagagcaggattgggagttgagcccaggctactccttagtttgtgtggtataaatgaacaacttaagaatagtgtttgtatagtcagggtcatttctgccctttctcaatggacttgaaatcctgggctgaatatttatccagcttggttttgtgtttttggaacaaaggaaatttccagtgaccagtctggttaatcaccaacgcttattccctcttcaccactatttcgtattggatttccttctataccagtacattggatttccaatcacatcgaaccctatttggctgccttccattcacagaagattagattcccttacacctcactgcctctcaggatttttctctccacaacgtgtagagtattaggttcccttacatgagttgctgcttgttaagttgtgttcagtgctgcgtagtatcgaattctctttctcatcagcagtcactgggttgttaattacacacttgcagattcacttctcctgcacatgctgtgacacacagctctccaaagctctgaactcacacttcaatgccttagccatatctgcccagattcagtttacttcagctgtgtggtattgaacacctatgcatcagtctgggctagatactgcggagtttacaaaaatgagtgctgaataatccttgccctcaaagagtttacaatctactggggtggatccagggcagggcagtgcataagatgaagaattatgtgcgtgaaggttaagtattggttttactcttttcctagaaacagtttagtatctggcgtatttaaagcaccttagaaggcaacatgttcatcataatgccattattgccaccattctgttccataatgggaagaaaacattaaaaacacaattgtgtgaaaaaaaacccttttaccaggttccaatgcagttattggtagagttggtagaaaactcttaggtctcttaacaaactcttttaacagccctgccttcatacagacttaagacagtattagaaatcatataattctaagagacataaattaggcatagagaaataaacattgctatgtagactgtgctctaacatgccttgacattacttgcaaactaggatctatctctgttgtatttcttttggtaccaaaatactgtgcaattttattcacccctggaaagagagggaaccaaaagtaatacaaagtggagcaagtcatggtttcccacaagcaacagaaagtggagaaggcattaccagttgtgattttattgctcagcattctcaacttcattgcaaattcacaatctagtgtctcacaatggtgtaaatattgcctaataccttcttcatgtagcttctcattccttgaatgcttaacatgtgccaggcactgttccagatgctttactgtagaatcccagttattgctcatcataaatgaatcttctctgcatttgctgtagataaagaaaaaaatctaagttactggcaacaaagggatgtgtttttatccctttctgccaattcaaccagagcacttcattaatgccaaatttctaatttgatgtgaacagcactcctagcatagtctgaagcttgaaatgacagtgatttaaaaagaaaatagtttagaaaaagacctagctaataagaaaagctatttgctataggaattcagtaaaaacccaagctttggtttaagttttttctttaacaataaaatattgtgtcattttaaaaaaaatccctggaaggaagggaaccaaaagtaagtcaaagtggaaagaggtcacaggaccaatgcttttgctgtctacccaatcttttctaactactcatatgtattgtgtgtctaaaattcagagtatgatatctgtcttttcttttttcttttcttttctttttttttttttttttttgagacggagtttcactcttgttgcccaggctggagtgcaatggcgtgatctcggctcactgcaacctccacctcctgggttcaagcgattcacctgcctcagccgcccaagtagctgggattacaggcatgtaccaccatgcccagctaattttgtaatttagtagagacggggtttccccatgttggtcaggctggtctcagactcctgacctcaggtgatccacccaccttagcctcccaaagggctgggattacaggcatgagtcactgcacctggccgatatctgtattttctaacctaattgtgtagcataaagagactttattagtatggaaaagtgacagcaacatttagaactcatttttcaaaggtgtgttactattcaaagcctttggaccatagcaccatttcattagaataatagcatgttgatcctcaattgaaatgccctactttcttgtccatggttatcaccagtagtcagggaggttttcttttccgaggcttgtctttaatcatatagggcttgggactgtactagttcaaccactgtggaagacattgtggcgattcctcaaggatctagaactagaaatatcatttgacctagccatcccattactgggtatatacccaaaggattataaatcatgctgctataaagacacatgtacaggtatgtttattgcggcacgattcacaatagcaaagacttggaaccaacccaaatgtccatcaatgatagactggataaagaaaatgtggcacatatacacaatggaatactatgcagccataaaaaggatgagttaatgtcctttgtagggacatggatgaagctggaaaccatcattctcagcaaactatcgcaaggacacaaaaccaaacaccacatgttctcactcaggtgggaattgaacaatgagaacacttggacacaggaaggggaacatcacacacctgggcctgtcttggggtggagggagggggtatatctaatgtaaatgacgagttaataggtgcagcacaccaacatggcacgtgtatacatatgtaacctgcacgttgtgcacatgtaccctagaacttaaagtataataaaaaaataagaaaaaaatcatatagggcttaatatgaacatctagacacagactttattcttccctaatgctgtccccaaacctttctggagctcctgctatgtgtaatgtagcatgttcctaccttcacaaacattcctgccagggcatgtacttccatagctcaaatatttcatttttttttctttttttttgagatggaatcttgctctgtcgcctgggctggagtgcaaaggcatgatctcggctcactgcaagctccgcctcccaggtgtatgccattctcctgcctcagcctcccgggtagctgggactacaggcgcccaccaccatgcccggctatttttttgtatttttagtagagacggggtttcactgtgttagccaggatggtctcgatctcctgaccttgtgatccgccagcctcggcctcccaaattgctgggattacaggcgtgagccactgcgcttggccaaatatttcatatttcatcttcttttgaatccaagacttgtaagcataatttatggatgatggcttcagagaaacaatgagttacaatgtatcttatgattccttggacatgccttatttaatggtaaagtttccattttccccctgttgctcatttttagctataaagaccataatgccagtcactgcctgaaatctagccaccccctttcacattaatattaatagcataatggcaaacattctgtacattgcctgtgactcacataatcaccatgcaaaatgcatcattcataaattgtttagtgcgacctttggcacagtagcactaattattattatcacagaagcccagtaaactagactggtaattatcagggatttatttgaatggacagctaagctattcttggcaagttagtcaaagcagttgtcatgacagccatacaaatatgtcttatgaattgggttaattagggtaattaataactgttatttgttccccttttcccaagatattgcctcagcattatcaaaagggtgaggggtgtaaactttaaaataatgcttgaatccttctgctaagaaagctactgacgaaatcaatgaaagctacctaccttccaaaggtgctcccttagagaaaccctcatttttatgggaccttctcctacttttggatgtttcagagtcagcaagcacaagccatactgaaaaaaagtagttaaaaagagaagctaaatagtcagttccccgaggctgctgctttccttttagtcacctgtgagaactcccaagagaccatccctctggcttctacttttagcagagccctgctttgttttttgctcatctagaactttcttgccttgctctgcagcctgttcattgtataatttttttttcttatttttccctcacaaggaaattctgagtttttctcacccacatttctgcccctctgaggttttccaagttttaattttgttggaggccttttttaatttaatgccttagggaccatctaacattgcctgatggtggttttgctcttttttcgaagaaaggaaaataggctagctctgaagagctttctctttctcttccttaaaaaagtaaaggataaaagtccaagtttcttctctctgcatcacagcatattaagttgtttttcttattctagtgcaaagaagagagaaagggagaggttaaaaactgaagctgattcttttccccaatgagatgattctttctttcagagtaaatgttgttcacaaaaggactttaagactttttgtgatggttttgaacagcaaatcaatttctctccatttcctgcataaaactaggagaaggaggctgggggaggtggctcacgcctataatcccgagggaggctgaggggggcagatcacaaggtcaagagatcgagaccatcctggccaacatggtgaaaccccgtctctactaaaaatacaaaaattagctgggcgtggtggcacgcgcctgtagtcccagttacttgggaggctgaggcaggagaattgcttgaaccccggaggcggaggttgcagtgagctgaggttgtgccactgcactccagcctggcgacagagcaagactccatcaaaacaaaaacaaaaacagaagagaagggacacaaggcagaaagagaactgaggatgttaattaaacatctaatctatgtcagtttctgggctcagtacttttcatatattaactaatcctcccaacaactctttgagactggaaacattattatcctagctttacaggtaaataaactaaattatatgaaagttaagtatttttctgagatcacacataaacaggacttgaacctcaagtctctgatccagagtctcctttcttctacaccagctagaacagagtttccccaaaaaagcaagaggcttttagtacttcatgaattccagatgccttgctcacgccacaaatttctattgaatataaatgcccatttattttgtttgtttcaatgcctgttcagcaattgagatttctaggtcagtgccagcattctggctgacccataaaattcaagtttgggaggaattctggtaaaatgcttttagcagagggtgttagattaataggttagaaaaagtgccaactttcttcccatgtcatactggaatctcatgatcagaaggtagcttcctctattttactttcagttgccctgttagggaagaaaggctttctattgcagaagtggcttggtggtgcttggaagctgcacaggatatatggaagatggagtggtttagggttctccaggtgtccctgtcctactaagtcagagatcaggatcaggttctgacatcttaggaagctgaaaactgacacacagagacccatttcttttttctttttttctgaggtggagtcttgctctgtcacccaggttggagtgcagtggtgtgatcttggctcactgagcctccacctcctgggttcaagggattctcccatctcagcctctcaagcagctgggattacaggcgtgcgccaccactcctggctaatttttgtgtttttagtagagatgaggtttcaccatactggccgggctggtcttgaactcctgacctcaagtgatccatccgccttggcatcccagtgtgctgggattacaggtgtgagccactgtgcctggcctccatttcttgatatgttattattaaatgggccatggtatcatatatttagtatttttaagttttgtgtgggtgtgtgtgtgtgtgtgtgtgtgtgtgtgtgtgtatagtcatttgtctcgtccatgaaggaccttcattcacttgataaacactttgtgccaggagctgttttcagggttccaggaacagcagtaaactaaacagacaaaaaattcctaacatcatggagttaacattctagcaggggaagagagataataaacaaaataaatatgtgaaatgtatggtattttagaagataagtgatatggagaaaaataaggcagaaaaggaagataatgagttttggagaaaatttgcaaatttaaatagggtggttaggtaaggcttcaatgaggcctaattttatttcttaccacttcacacacaaactttcttctccagcaaagcagatggttcattcattcattaatgcctactctacctacctttatatcctaccaggtatagaatacacatttaaggacaaaacacacttgcccctacccttttggagcccaaagtacaggagatagacgttgaaaaaaataattacacagataattacttgcaattgtgataagtgtgatggaagtagtagaaagtactaacacatactacatatggaggccaatacacagctactaattgtattaagctaaaagccacagatggaccaccaaacatttggtatccctggattctagtaggaaggaccacgatgacatgattacaaagccacaagtctcatttggtttaacctgtgtctagggatctgtgaatttgtgatttcaaatgtttgattgccataattttattagaaaccttcagcctccaacctaggcaattactggcatttgagtttaaacacatgcatacacacacacccacacacacacacacacacacacacacacacatgcacacacactgttgtattctttggaaaacaaatgaccttttgatttggtgtattgtggaactgctagaaaactggcttagaaggagggaaaatgttaatgaaggtaatggctgatttttagagcagagtacctatttgttttttcttgtcctttcattgtgcctccaaagcttcaaaacctcctaaaaatgaaagattataggaaaaaatgcatcttttactttttaaatggtagacagcaaagtattttaatgaggaaatatattatattattctcctacaaaccaagggctaatagtctggaactggtactttggctgcataaaaagtccagcaagacaagccaattatggactctgaaacatttttatttttagttccttgtaatagcgattcattctctgctatggtacattaactgggaaacaagttgaaatgagagttttggcaactttagaataattgactatatttaccaaattcttaatcgtgcagagaggttagcaggggaggggcatagaagaacaaaagattaggtcagggaaaaatacgtctaggagagtctgactttcaataaaggctaaatagacagctttagaatacagttttagagaactcttttttcctttcagtttattcttcaagtagacaacagtttggttatttgtgctgatttctgcctttatgtatgatgtggtgttacttttgtgagcagaagtaattagttgtttacaaatgaagaatgcagtaggcacagctgtgatattcttttccctaccacgagatctggtagtccccaaatttccctctacatctgtgtgcattggtaacactgttaactgctctgttccctttcttttccagtagaatttcttttgtttgggatgactgttacttttccttttggtcctcttttccttcagtggctctgcttgcctatctggtggtcgttttggaagttccaacccagcaccaatccagagtggagctggtgatgccgaaatggaaggagtgtttgggaagggtagatatgttatgagggaatcacgttgaagttaaatgaaccgctaaaacaaatgtaatcttaggcctcattaaggaggtatagttttctgattataagaggtattagtccctctgaattctttgctgttaagactacatctggataatgatgtctgattctggatgccttattttatgtgaaacactgacacactagaatgagcttcaagggaggttaagagactgataaacggcctggagaccacatcacttgtggaacaatgttcatactgcttaattatgagagaggcaaaaagttgtatgaagccaaccttaacattgatctgcagtaggcaaatgtgttgaaatgaagagactaaaactaaactttcacaaaagcatgacacattcttcttagtgtttggcttgttaattagttacgttgagtacaaatatttatagtatttgagtctaggaccagctaactgaccagcacaacagctttcacatactcagcaagggcaattcgttcttaggtataaggccaaagactgacccttgggtgatcatggagatttcccttccctttgtagagtgctctgtatttaatcttctaatcattaaaaaacagatgctcaccactgacagaggtggggttcctagaaaagatggactgatggctgttatgctgtcttccatcttcttgagacccttagcagctttgtagtggtatgctttagtggggttaggaaggagttaatatcttggaaaaaccttggatgtggcttgatttcctcttaggaatattgagaagatgaacacatagtgggaaatttttaaatttactggtgctacaggcttttttccaaaaggcatttgtagtagtaataataatagtaataataatatgcccaaatgacagaagaaatattaacttctgaaaataaaatttcaaaaggcaaattttataatatggttgaccaccttattctttttagatcacctagggagaggtcattcatacctttatttattaattctctatcttctcatgccttattgatttacttttccaaagcacagcagaggaaactttggggggaagagataaaagtaatccctgtttgcacagcaacacaatgtgtacattgttggcttaaggcctgtggtggacagaaagactctggccttagagtccttcaggccctcttatccaggaagagaagacacagaaacatcgttctcagagtagagacagtgtttctgagcgacccaagatttctcgtttcttcttgtgaccttcttcctcttttgggcactgaatggggtcaggcctctagggatggcacacagttagttggtgagagacaggaagggactcagggtccagcagctcctggaagggagaaaggtgacccagtaacttttcagcttcttttggagaaaaggcacagtgtcaagcaatcaggagaggaagaaaacaagcataaaatccacatccttaaagtccataaatggtgaaaggaaagctctctctgctccccaccaagtgtggaagttttatggtgtattctctattcatagggctgacagagagtgggactgacctgctcaggaaggtgaaggtctccacctacaggctgctgcaggaaagagctcagtctgcctttcctatccttgacaaggggagtagagccagttttcagaggctatccaagctagggttgacttgtctcaggactcatctttatgcaaagtctgcaaaaagaatttgaaattcatgaacatctgaccactggagaaaacctttactggctcaaaaaataagtctctgtggtttaattagctaccccttcggatattgatttttctagcacttgtacagaatgtaactcatcttccaaactttacggaagagccaacccaaatccagctggatttgtggctgtagagaagttgcttgattttattaagcatggcttacgttctgtctttctctctcccctgacatttatatgtaacttgcaaaatccaaaatcacagctagagagaagcaaactcttcccccaaaccaaatattttccctaggtctatcccccttagatcatatagtctgagggcacttctgatggcatgtgttacccatggaggctttcttctctgttgctctctcctccgtgctcccatggcacactgtatataccacttgctatggcctaaatgttggtgttccccacaaatttatatgttggggacctaagacccaatgtgatagtattaaaaggtggagcctttaagaggtgattaagtcatgagggttccacccttatgaatgggattattggccctgcaaaatggctccagggaaccaaccagcacctttttgtccttccatcttctgtcttgtgaggacacagtgttcctcccgtccagagaaagatacagcaacaaggtaacatcttggaagcagagagcagctctcatcagacaccaaatctattgataccttgatctgggacttcccagcctccagaactgtgataaataaatttcctttctttataaatttcctagtctcaggtattttgttatagtagcacaaatagactgagataccactatggtagcacttacaaccctgcattataattgtctctccatttaactgtccccagcactagaaatgtgaactccttgagggcaggagtggaatcgggttaatctccagatccctagcgtctcccatggggcctgacacatagtcttaacagtatttgttgaattgaattaaattatttcagccctgagctgtacaagctgtcatttgttctgcaacagtcagtcgaggacagctagggagcatgaggcaaatcttttcaattgtggggaagcctctgaatgatctgtttttgcctttttcttctacccttctcatcgattccatctatcccttttcattactggttgcctgcaccttgtgcaaacagaagtcttaaacagtgcaggatcttcagtgacttttttgtcttttgatccggggctgatggcttttcattttactcatgctttatatggcatagtcaagtctgattgagacttatttggtggtagggcagtcagaattactggtagaaaagaaatgcaattttattactttcaagttcatagaatgagaagaagtagactaataaagtctgtgccaggaagttttgccaagtagaagtccttggacttgttttaatgaataaataagaatgatgtgcaattaacatacttattgtttgtaaattgcttctaaagtgcctaaaaacaatttattcttgttagtttaaacattttccttgtaaccttgtttataccacaatttgcccagcaaacctttataaaaatagaaacagcagcctagctctatccgaatgctcaccaaatatgaattactgaaatctgaactgcaaaggtatgactccaacacgggaaagcaagtaagcctgagatggatgcttttaggaagtgagcagaacagattttcccttttctacttaggtgttagttgcaaaggcagaaggttatagttagttgctcagtactatttagagaggaaaaatgctcccttcaccagggagcaatacttgtcatcattccagctccccttggtggtctaatgccagagagtttctttccactgaggcagtaaaaatgagaaaatttaccttttagataatttcactacgatcaaacaatccccagtgggcaaaactaatagaagatactgtattttgattgcagtttatctctagcaattataaatgagcaatttaagtggcaacaaagcaagttgtttgctagaatgaggccgtatttcacagagctttatcattcaatattctctggatcactcagctaaaggcagtctatttccttgggtggatcatacatcctctttctacagtatccctaggaacaattacttttcttaatgatagggtattgagaagaagtgatctacaaacataatttacactaattttcacttttttcctcccatgagaaatttagttgacaagactttgagtattaggttttattcttccaggatttcttaagagaactaacaagaaggagctgggcaagtagagagaatgtcagaagagctcagttctgaatccatgcctgagtttccaataaccagctgcgttgctttgggggtggttgtaagtttctctgggcccatttccttatcttcaaaatattgtgtgtgtgcacgcacacgtttgtgtgtgcgcgtgtgcaagagagataatagattagatgaactctaaggtcatattgaattttaatgctttacgagtatatattctgtgattgttcatgagcccaaaggggaatttttcagtttttcaaagctttcagtggacagcatagcattgtcaggttgcagtaatgatttcgagaacctttgcaaatgactacatttggcaataaagctactgtaggctctaccatggcctgaagaaataattaatattgcataaaaatatatattttttaatttatgaaggatagatctcaaaagggactatagattgaaagcagaaacagtaagtgagccaattgggcttccattttctactgtttataaatttagactgggtggaaggtcccctggtttggaaagaaggagtcttaggttcttgctctgactctgccagtaattggctatgatcatggattcagaaacttttgggcctcagtttttccatctgttaaaaggggaaaggagtattttgcctatatacatctgcagactgttgtggttattagaagggagcataggtcaaggctttgtaaaaaaaaacaattgctatattaatgcaaggtgttatttgagaaaataatttttaaaattgggacattgagatacacagttctacaggtgtttctcattgtgctagattgtgaaacattgtctttgaaggtgtggattatatcatgttcaatattatgtatattacacattggcatttcaatggaatgggaatagagggatggggaaacaacattagtttggttttgacttaaagccagttttttctactaagttcttgggaaatgttgaaagaaatacaagtctaggaagcacatcagcctttcttaaaagagctttgcaaactttgcatttctgattcaatctatgaaagagacaggtgagaggttcctatcagctgttaatcagttaaccaacagtgggtgagcatttagccagtgccagggacagtgacaggcactgaagataccaatactaaaggtgtggttcttgcccttaaggagttctccaacctagtgggggtgagatataactaagcaacacaatgtgttaggtgatgtgatagaggtaagtatattccttatatttccttaggtaacatttcagaaccggcgaatcctgggtgacaagcctccggtttctctctaaggtactgctgtccagtagaactttctgtgatgatggaaatgttctatgtctgctctgtccaggacatggtagccacatgtggttactgagcacttggaatgtggctactatgattgaaaaactaaaattttaatttaatttaaattttgtgaatttaaatttaactagctacatgtggctaatgtctatgctattggacagcacccccctgaggaatggtagtgtgagcccacagtcaggctccaaggaggtcctgagttggatcatagaaagctctggtcaatttgcccctgtcctttaaccctgttttcctatccaaatactgcactagcccttgaatggctcctttccagccgacaactctgaattatgcatgctaatgtgtgttactcaaccatggcatgaggttccctcactcccctcccccaaccctgccgtaaagaaagggtactctgtgacagttcaatcatgatgaaggaagaaaatgggtcgaagaaaactagtttataaaagcttttaaaatgtctgaaatcttgcttttcacataatttcagatggtgtgaggtaatttcaactctctttaagctgagttttagctctctttctctctccctctccctctctctcacacacacacacacacacacacacacacacgcacgcacattctacctaaagtgtctgctgtggtagatggggctccttgtattcctattgaatcagcaattagagaagttgggtatataatatatttattttatatatatattatttatatatataaaataaatatattatatataaaataaatatattatatataaaatatgttttatatatatttatcatgtacagaatatatattatatgcccatatatatatatatatatatatataaaacttcccatgccaaaaacacaactcttcatcacattattctttttctgatagcgtagataaagggagactgagataaaatatcctagtaggaaacctcagaaagaaaactattcacaatattcaatgggagtttagttggacatagaaataaatattcagaagaaatcaagtttacgacctggtaagaagacttgccatttgtctggtgattcacagttttggaaagtgcttgcacatttggtcctaaaaaaaaaaatcccctagaaggtatttgggacagatattatttccattttttttttttttttgagatggagtttcgctcttgttgtccaggctggagtgcagtggcgtgatcttggcttactgcaacctctgcctcccgggttcaagcgattctcctgcctcagcctcccgcgtagctgggattacaggcatgcgccactacgcctggctaattttttgtatttttagtagagacagggttttatgttgggcaggctggtctcaaactcctgacgtcaggtgatccgtccaccttggcctcccaaagtgctaggattacaggcgtgagccaccgcactcggctgatattatttccattttatagattaggaaatcaagagtcagagaggctccatgatgtctgcaagggcacacagctagtaagaactttttctattttcatcttgaaggctctgtgattggaggctttgtaggatttttcttttacatttttttcttatgtgcttttttttttgaagcttataaccatctgcaagaaacaatcaccagagtaactttttttttttttttgaatcggagtctcgctctgtctcccaggctggagtgcagtggcgcgatcttggctcactgcaagccctgcctcctgggttcacgccattctcctgcctcagcctcccgagtagctgggaccacagcacccaccaccacgcccggctaatttttttttttgtatttttagtagagacggggtttcaccgtattagccaggatggtctcaatcagctgaccttgtgatctgctcacctcggcctcccaaagtgctgggattacaggcgtgagccactgcaccgggcccagagtaacttttgaccctaaatgaagctgggtctaccaggaaccaacatttaaaaatacctatacacaaaggtacatcattgtttccttcacaaaaattatatataatatacgtatatatagacacacacacacagttaagaaatgactgcccacacctgtttctactggtttagccccgataaaagtgtttctttgctatcaaatagacacaggtattgagccgaccaggatgaggaaagggtgtaccagcttccttcgagagaaaggtgtgtacataagagtgaaagaagaaaggggtctctaaacatatttgaaaaattgaccaagagagagctgtggagggaggaagctgagaacaatgtggggaaaggaaaggacacatcaaccacactggttgaggagtatgctgtctgacacagtacagcgttatgtttctgacagtgttaacttttgttttttgaaagttaagtttaaaattggtcctgatttttgctgctgggagtctgatggtagaggtagagtgaggtgttcccctcattatttcatttcttaatcttcctgcaggaggaaattgctctggttgtgttcactgcctttgaacctgtcgtgtttaagcaggctagtgtattttttttctcccaaatagtatacctcgtcagccagtcctatttactttgatttcactgcattttccagaatcctaatgaggtgtggcctagtggtgtgagcgcaggacctggcaggaagactctcaaattctagttgcagatgctagatgcttctatgtagtagagggcaagtctcttgacctcttctgtaatgccgttaacagggttaataatatttatttagctcataaaggcagcagggggattaaatagttaatgttgtttaaaaggctttgagaaaaagaaaaggcaagtttttttgtattgtgtgcattttcaaatgctaattcttattaacaggaagcatctgctccattacggtcattcagcacctcatgaaagtcttgctggctggatgggaaggaaaattcttcaattttgtgccatgagatctgagaaaatgtagctaccttcagccccagttatgaacttggatgtctgttttctccctatctaaaaacattcttcttctttatgtggtttttctaaggtttagtagtttttctctcttttgcaatcttttatgcttaccattactggtgcaaaatgactattgtgtttcagctgtggggggaatgaaccctttttataataggcagttagacattctggaagtctttgtgataaaagatttcatagaaatacaaggtgcttcagtaattgttctgttggtgccttgcataactgcattacagatttctaatactctggcagtttcaagatgctgatgatattagccactttgtgaagggtaattatggctttctatgcatggttgccagcactctcatgtcagattatagtagccttttggttaatctctattttaaatcagatcaaattctaacccaccctcatccctcctcatcccccttcccaaataaaatgagaagcactgtgaggatttgggagaaggacaggtggggtattttagagaatgagaaaacatttctattattattttttgagtcatcttcttattgcttgtcagttatggtttatgaagtgatgccaaagtataaggtctatcttgcctccaacgctgatttgctgcaatgcttgtttaagttgctagaaactggaggctcctgtgggtttccttctgtgcctaataatttcaacagagccaaatgccctttatttactacagtcataattagagggctgccagtgttaagcaaccatggaatctgagtttgagaaatgtttattgtgcctcattaaatctgaaatgagtacttaaaggtcagaaataaataatctgtttatattttttgtgacagtaaatataagtgaatgctgtgtgtacatatccttgactctactcatttcagtgtactgagacacccctctgtttgccaaggcagtaatcacaatatctgcgacaaaagagaactatggcaggtttcattgatcacaaacaagaaaatgatctattgtattgtatctaattagaaaacatcaatattagaagctaatgcattcactgtttccaagatggtctatcacttgattgttttttgtcagcatgatcacattttacgggcttgagcaacaagctggtacaagggaaatgaatttagaatgatatgccaaaggctgttgctccttcagtcttaaataagcttgtagaggcaactgggtttttagtggcacataatataaataatgggattggggttggaacagaatttgggggtgttgttttggcccaaaggcacaaggccacccaccgctttctctctaaatattttgaaagtcttttcagctgacaaagcttactcaatagaaattgtactctgcacactccgcaggcagtcagggctctgtagctggtaagtggcagagaactgaggcactgatataatagaatttagcagaaaggaatggaccagctcaggttctgagggtgctagtccttctgtgagccagaagggctcaaaggtaggctggatccaggagagctcatactgtgggtttctggatcccattgcttgtgggagattacacagacacacacacacacacatacacacacacacacacactcttatatgtgtgtacatatatgtatatatattatgtatatgtatatatgtgtatatttatttctttattagagatgggctctcgctatgttgcccaggctggtcttgaactcctggccttaagcgatcctcccacctcagtcttccaagtcattggggttacaggcatgagccacaatgcccaaccctcttgtgggagatcttatatgggtttcttattgtcagtttgaccagctttaccaaatcatagcttctaaaattgaaaccaccatcatgactattaatcttacatcttaggtcaccttctaacaatggttgccattgcctctaaagggcaaccaaaatggtcaccaaggtttcagggaacaaagtggctcatttctggatcccttgggctctgtgagtaggccctccagctaggtctggagaatgatttccagttagtgtgtgccaagtttttcctttgtctaactgctggactatagtcccctgactctttcattggaattagccaaggaaatcactcagagaaacataggtaggaagcaggctaatcacttccctgatgttactgttttctgattgcttcctatcccagtagcagaaaatgccaaaaacggtgctcctggggtttctcttattgtccttgttgcggcatgctctagctgagttagtacttaatgtggctgtagcacttaacgtgtgtgtttgttttcatggctctttaaaggggaaataacagttggcacttgcttgtaaagtgctttgatatttggggatgaaaggcactctgtgcctgcaaaatagctttaatgtgttgtagttacatgtttggtagggcgattggactccagaatttgttccactggcaaatgtggttgagagctatttggttctccattaagttctgtttacatgggattaaatagtttgacttacatgactgaatttttcattttatttgctcttgaggtactcttactcatactgagatattgttgattctgcatttgtacatataataggcattaactggttccagagagctttctataagcagatactatttcagagtgcactatgccccacaaaggacttagaaaagggtcgagggccttattcagaagcctgtatttgttttatggcatggtgtttaagctcgtctttcagcaggctttgaattgtatggtttactgcagacagctgctaggtttctcaaggaggcctctgtagtgaaattcacaactgggttgctcttctaaaggcataactttgacccaaagatgagagcaaagaaaagtgctttccctaagccatctttgccacctctaggtagggtgaccacatcaatggtgccagtgaaacaataggaatgacgatgagaggctgctaggaggggaattctttcaatttaatttgttgaatgttaaccacatggcctgtgtttctcattgatagtcctgtcctgacagtcactgggatgctagagttgtttaccacctgtagaaaagtagctgccacactgtccgtctgtgactcagaggtctacattctggtgaaccctcgtcttctcacagaaacgctatcaaattgggttcaggaacactatcatatgttgtcaccaccattcccagagatgtggcaggactgatggagttagatgggcagaaggcacctaactgtgtcatcttatccctttcagttatatataggctattgtgtatttataaggtagtagttgggagtgataacagtgaacaaattgtaactacagaaggcagtgtgcagagtggatgctttctgaagaagtagaaccaccttggcctaataaacttcgtcacctgccttaattgtgataagtagcctcattcttaatcccttccatctcttctctgatcattcattgatgcattatatgaacgcatgctaaatgtttagcgttgtggcagatggcacagggacctcaaaagagagcttccagtcccgttgagggatgaactgacacactacacatgaaataatcatagaacctgaggaaatgcataattacattgtacagtctgtatacaaagtgctgagaaaatgctaaggaacgtgggatgatcagtgatggagatatattagaaatgagggaaattagatggcttgtgttggatgactgcttagctaaggacttcatgtagatttaatgttaattgcaacaaggagctactgtaaggtcttgaaaagagaagtgatgtgatgaaaatagtgggtgaggaagattttccaaacagcattttgcagaatgaggtagaacaaatgcaggtgagaaaaaaatgacacaaggtgatgaaggctgtggaaatggagccaaaaggacagataatatgggctatttctaagaacgttatgaattgtataacctatttgataggatagggagatttcttgccttttatgatgggggttatgtacatatgacacatatgagggccaaattctcccatgtgagtcacctacagccattgagccattagggtgttatttagttctacaaagtagcagtgtaattctccaagttgcagtccagtagcctgcgtacaagtatatgcctgtatctgcaggtacataggtgccagtctgtgtatgtgtatttacctgaatgtctgacattttgatcatctctggtaaaagatccattagtttgtgagctccttgaaggtgcaggctatttttttttaattcccagggtttggttcatgcttactggatagataaatgaataaattaagaatcactttgttttagaagcctagaattgtggagcttgaaggcaacatggagtccttttggttattctcctcattttaaagaaagataaattaaggcctcaagagggttaatgtgattcatccaaggtcatctgtaagttaatgacaatcctagggagagaatccagctgtccccactataccacattgctttctgtagtcaaactgtgtgtgtttgtgtgtgtgcgtgtgagtgtgtgtgtgtgagagagagagagagaatgaattagggctggggtgtgtggggagcatacaactgacaataagtggttagtaggagtttacctagcacgttttctagttcagggcaaatatgaactttgtaatgttggcagctggggatggtgccttttattccaccttcactaattcctgcttcagttgctgctgtctggatggatgagtctttgaatatacattctagctggaggcacgtcagctttatttttatacagaatttgcatattcatttttatgtgttgggggtaggaagtaggcaaaaactatttattatctcatttccaaaagccatctttgtgaggagatgaccatttgaacatctaaaacagcaaccagctttaggaaaggttatgtgtcttttcattatggatcaataggcacaattatcattattggaagtcagcagttaaaaaaagaagcagcgttttataatcactttgttgtgtatctgatacgggattccagttttcctgttttgattgctaaaatgacttaagagttaaaaactttaaaaaattaggtagcaaattatagttataatgcttttcagctcgatgggactttaaaagtgtaacttaaaagttcgttcattttcaaatgaaaatctaaagatttgagtaacctcagttttaatcccaatgtctgcaaccttttttttttttgcttggtatagtgacctgggatttgtgccactggacaaagagtctagtcctggatatctgcatttattgggcttccttctccttaggtttgaagtctctctgctgataaatgtggtgctgagagagctgcagtcactcttctagagactagggcacgattcagtgaactgtaaaagtaatgcaaaatgacaattaaagtagggcattctctggtaccttgggggcctgacaaagtggaagtatttgacttctgatatgccagacttactaacgtagaaatgtaataacatatcccccacccaaacgtcttactagaatcctcctatatccagaagggacctgagaacagcaagtagtaagcaaagaaagctcccaagcagctaacaaacaaacacagaaacaaacaacgaaaatcaaaacattgcacaaaggtccctatattaaagatcatgtgatttcccccttaggagcgcaacatctcagctgtctatgcagaacgttacaactcttttttttctagacacaaatataattgtatagtttccaagaacacagtagagtaaaagcatcaaacttgaaatggaagaaaagctacttttgatataccaacagcactgaaaagttaaaaacgctgtgtttgatagaaggttggtgacgatcctatgttaaaaattaaagacaagaaaaaaaccacagcagtttggggtccttgagtatacaggcaaaatctgcatggggtaataatttacatttataaagatgctcctaagtaaccaataagtggttaaattatgttttttataccctattttaaggagggcaactttgtgatatgtttcagaaacaaggcagatggttaggattttaaatcaaagttttggttcttaaaggataacaccctaagctatctggaaaactgagctgtctagaattatttattgtttgagaatttttaaaaatcaacattttattaaacctaggtcatgtgagacacctgctttcagtgttatacccaaggataaagaattcgaattagaaaaagaatttgtgataaatatactaaataataagaaagtgactcttatttaccactgagatgaaataaaaaagtttgctctagacccatttttttttaatgtgacaattaggtttttccaaagcaaatgttgttcttatctctttgctgtgttcttgtgttaacctggctgtctgattagaaatggggacatttcctagtgaaattaatgtgacatttagagaaaatttcctctctcaaatgtttcatgttgtttgccatttagcatacttagagaaggtattggaataatgtcaagcaaattttgattaaataaggctaactaggagccaatacattcatgcaaaaaaaaaagctcttgtattattttaaagaatgtatttcttctgtggttctttatcccatattgagatgaccttggcaggtaatctgacaaaagaaatgacatcttctaaacagctgggcttgctttagaaaatgcagcacattaggtcagagcctgtggccagtcctttgctcaagacagttacttgccaccccggaggtacactaaaatttcctggaaagctttttaaaaaaatcacccagtgcctgggtccaattccaggctaattacctcagaatctcttggagtgggtccttggtgacagtatttttatttttatgttttacaagaagaagattctgagatgattctcatgtgtagttagggctgagaaccactggcttaagacatacaaactattcattaagaaaatatttccttcttcaggatgatctgatgatctgagtctcatcctttgctccaccagaagtgtgaaaaaatatactctctcagtgcacaggagttgggtttgggcatacaccttgaaccagtatgagctagaacacttgatgtcagtatacatagacccataatataatagcccatctatggccagttaactcagttgtttggaatgtagtactaatgaggccagaatagtgtattctatccaattagaataattctgctgcatagatttttcccataactgtaacccaactgcctcacaaagagacctgagacggattacaaaggcacaggacaatgggtgaatcagcatagccccatccattctgggaaaatcggttctaggaacctgccacattgactagcgctactaattgcattaggatgcagcatgagacatctgcccatgatggtttgtgctgatttgggggaatgatatattttcatttgaaggtcaggacccacaagaatgggtggtttattccttttggagttaaaaaaggaggataaaagataggaaggttacaagcttctatgatattcttctctttacagtagcagatcatgcctggcacatctgcctggggttaactgacctgtatttgggggaagaattgttaaggtaattactaacaagccctcgagacttgtctcttctcaactcagtgcctgggagtgggaatcctcatgatgagatatattatggcttaggaccaagaagtagtattttcattagtgatacaatgtgcatggtattgcttctttgcctgaacacgtggctctggcaccatgcctggaggtcaggtctccgcggagcttcatatttgatgcagagtgcacacaggttccatgccttcatttgcaaagatatggaaaattttctacttgagaactgtcttctttaaaggcagtaaagacagattctttaaatacagtagcttgggttgctgcttatccttttcctgcaaagccagtatcctctagatttcctttttgtatttttgtctctttaccaatcttcttgaaaaaatgatttagtttgaaagatgagatggaacatgcatgtgccactattttattgcctgaatgaggtcaaattcctgatcctacttggagttagttgcaggttctgtataaagcaggggatcaggattcccaccattcctgtcatgggtctgataaatgcagctgaaattctcctttggattcatgttctattatccctattttacagagagggaaactgaggcatgcaaggattaagtaatttgcccaagatcgcagagtgaaatgaatatttgaactgctgagtgcttaatcaattccgggttttaacagatgtattagtccattcttacattgccctaaagaaatacctaagactgggtaatttcataaagaaaagtggtttaattggcccgtggtcctgcagactgcacaggaggcatgatgctgacatctgcttagcttctggggaggcctaaggaaacttacaatcatggtggaaggttaagggggagtaggcacatcacatggccggagcagcaagagagagagagatggggaggaaggactacacacttttaaataaccagatgtgataagaactcattcactatcgagagaacagtaccaagagggatggtgctaaaccattcatgagaaaccgccaccatgatcaaatcacttcccaccaagccctacctccaacattggggattataattcaacatgagatttgggtggggacacaggtccaaaccacatcaacagggtagcataatttttgtggggtagtgaacttcccacttgttaaattatatattgtactgaatatcgtagatgaacacatttaaccaacatcatttttacctgttatgttggtacaacgaattaactcaaagagtgtttgttggttgactgactgttggataaacttcttccagcaaatacttggattgtattcctaacacagcttccaagtttgcctcctattcctgtttgtgacaatttcagcattcactctctatgaagaaaccagaaatgaactgacccttttgatttttaatcccccaacccatgcttccaatagcattaaaaattgcttgagtttacattaaaaaggagatataaacttctagataaaagcagtgtgagtagatattacacagtgcatcttcaaatgaggggcatgggtgggcacatgaacatacctgagtaagtgcagggcaatgttggggtttagtttccttttaagtactgtctcctcctctctctcacacattcaccgtcccccttcctacctattgtaggcacttggggtctgtattctgactgctggctgtttggtgcccatgtggtagctggatctgctattgcctgttctgttttcttctccatcaaactgtgagctccttggaagcaagggctgcatctaggagcctagtacagttagtatctgacaggtagaggtctgagaggaatctgctcttttgtttgctagacagaaattgtgtttccttttccaaacactcccagttgaagtaatttcagaaggctcctaaggaatggtgggaacagtggagatttctagtgggatggcaagagggtgggggagatgtgtttgggtagtttctagatcatacaatggttcaagaagagtggtactttagtgctgggggcgagatccactttactaggacattcagttactttagtgtcgacttttctctggatttcacccttctaaggcttttcccctctagttctcccaacctctgggtgatcattagctgtttttccatctctttcatctggcaggtattctgcatttgcttttataaagccattgctccagcagtctgctgtaaccagattaaacaggggtgctctaatgataggagctgagacaggggtttgcttgcaaacttcatgtttcacatgaaaggctttggcaccccctgtggactgcccttcaccctgttttaggcatagtatttgtttgcttttgtatctgtgataaaacaaaggccttcctgcataaccagtgctgagcaaatgtcttgaaacaaagggaagtgcagagtttaaatccacagtggtgtattaccttgcctgcatttccatatctttggaataaatattttaacatgttaattatctactactaataaaaatacctttgaacttccagtcaatttgatgggccatagaattgtctccactggggaatgggaagtaattagtttctgtaaggattgtaggtcacgttgtctcttctcagtaagtggttgcatggtcagtagccagtcatattctagggaatgtttgtgccaaggccgccctggtctgcagcggggagctgctgcctccacggagcccctagggcctgaaggaggcagaggctgctgctgcactgtggccttgggttccaattcactcactgcttcttgacccagaagaaaaattccttctaagtagggcagttcgaaatctacttatgaatcatctgtgtaacctttttaattttttcttctcattgcagactgaaaactattcttttgactccaactacgtgaatagccgagcccatttaatcaagaggtatgttggtttgcttgcttattgctgcaactaagcttgatttaacattaaaaagcaaaacagattaaaatttttaaaacgtatttttttgggggattttaaaatgaatgtccaacctactatttgtagaaagtttggaaaattgagaaaagcataaaaaagtaaataaacatcactggtaatttcatcaaccaaaggtaatcactgttgacattttacatttcttggtatgaaaatgtacgtataaacactcaacaataaaattggaattatattaaaatatagttttatctagtgacagaaatctgatattacaaatattcactatttctaatatttctaatttctaatattatttctaatatttctaatgtgatattagaaatatacaatagaaaactttcacaatcatgttgataccaaaattcttgttgctcttcactttaaataaaggaaagccttaaaaatgtttttcatgtagaacttcccatgagttttgagattgatgctatttcaacaactttgaaatcattttaaagatattttaatgacagagaagccaatcctttcctttctagatgagagagaaaaagaaatttgcctgattcttcttaaaatttttagaagtgtttcagaggaaacattcaaagttgagatttatgtgattggttgatcataatttagtatccaaggagccataatggatgtgagtacagagctgaatcctgccaagaaagatcccatctggtgcagtgggctgcacccaatgggagaaggacaaggggtttgggaagccctctaaaaggtggaaactgagcaaagaagagaacctcttgcacagaaagaccagtcctaacctttcaaatgatgcctgtattgctgtttcatgtaaatatcacttaaatggtccagtggttattctgcagctaaaattgaactctgagtatgtttgttaaaataatagaaatgaaacagagaggccagcagggtatgttagagctgtagcagagaaggcttgcaaattgtattattttgctggctctaatcccataaatttacatcaccagaagagtagaattcaaggaataaacaagcttcaagtaacttgcattcatgtctgatttaattcatgaggcttcagtaacccctaaaacatgctaagtttatctgtattggtctggaattgcttgtgaccttaagtgatgatcattagttgtctgaaaatgggtagcccttgtattatcagtgaaagcacagttgagaattttttttgaggggttgggaggaatccatttagaatattttcctgggtcacagaataaaagcaagaggtgaggaattcaaaattatctgacgaatttgttttagaaagaaaaaaataaccctcttatgtgcactgattagagtgcctttgtagcagaaatctgctttgtttctgcttccgaattgttattttcaaagctccattttaaaactttgataaaaacagtgacttgccttaccctcacaggtccctcgggctaactcagggtacctgggaattctatagccaggttaaacagataacatgatgctgggcgcagtggctcatgcctgtaatcctggtgctttgggaagctgatggtggagaactgcttgaggccaggagttggagaccagcctgggcaaaatagtgcaacccctcccccccaccccccaccatctctaccaaaaagaaaaataaataaataaaataaaaaaacctgatagtatgagtctgattgtcacagcctggaagaaagctaagactcccagggacccttgcatcttacatcagtcctgactatccaatttacaaggtagactgatagataaaaacttatgtttgaacatttatctttggggatacatgtatttccacagcagcgttgagacttactgggaacctctgattttggttaattactttatatgttttttgtttatagacacatacacacaaaaggcacaacctagacttaatgggctcttggtgaaaaagtctcctgattttgcatgaaatcaaagatagctttttcttcttttttttaaataaaaccagggaccaccttgatgaagaggaaacatctgaaaactcagggacacatgcatttttgccagggttctgtttacagagccatgagagctttgggaaactctgaaggccttgaatttgtgtggtcaattgagtttagatgaagcataatacctagaaaaatacagggaatcttgtgtgctatgctgttctggggaccaactgtgttaaatgtaaaatgtgtggaaaatgttgagagtggtggctaacaccaggtgataaagtcatgcgaagcctgttcaaatagctcacaacagtgtttgaaaagggttttgctgtatgtggtttcttgaagatccatttacatgcatggtaaacgctcttggccaggaaattctgaatctgattatcagttttaattttactatcaagtccctgtttctttgaatgccaatacaatacaatttcaggctaactttgagaacttctttttctttctttctttctttttttttttttttttttttgagacggaatcttgctctgtcacctaggctggagtgcagtggtgtgatcttggctcactgcaacctccacctcccgggttcaagtgattttcctgccttagcctcctgagtagctgggattacaggcatgcgccaccgtgcctggctaattttttttttatttttagtagagatggggtttcgccatgttagccaggctggtcttgaactcctgacctcaaatgatccacccaccttggcctcccaaagtgctgagattacaggtgtgagccaccgtgcctggctgagaacttatttttctatccatgttctcttcttctattcactttctacttatccaaggatgtttcttggacccttcttttcggcattctctagcagttgttagcattcttagccagactgtttacatacaggcatcttttcctcttttacatctatctaccttgagtagttgaacagcagctaccactgtccacctctggttctttccttcatcagtcagggttcctacatgaaatagttggcacgcctaaattggaatggcttgaggaaagtttatttacaaagaggaccatttacaaaggcttgggcacggttagtgaacctcaagggatactgcagtattatggcactggaggagctaaaaatacttcagacaggaccagggaagagagcatgtagggaacattgacttgagagtaacagtgacttctggttggccaagggatccagtcatcatgaagtgaccctggaggaagggagcagagacaatcaatatcctgatatcactgtcctcccctgctctgatctcccgctgatgtcttcctttggctaaacccaacagaaagccagagggcaagggggttctcataggcacaaatcaaggttgagaaggatctcaactgtgggaaaaggaagtgatatggcaggctccccataattttatgcaccaaggaatctagcattatatttctgtagttttttttttttccagactgtcacttgcaacccgcaggtgtacccaaggaggcttatgtgagggccccagattaacaaatcatggcagtgcagagtttcttctgaatggacttccttcctgctctgtttgtttcttgctgtcttctcagagcaaggaaagccagcagtggtactttgtcgctgctgcagcactctttcctcatgcctgttttgtgggctgctgtctgatatccactcctacagtgctttgggaacaatatcaagcagggcataaggctgtggcccaaagaaaatgaaataggaaatgaacaaagcactgactcagcgtggaaaggattaggagctttggctccctaaatcatgcacaatgctttctttttccacccaaattgtcctggggtttttccagcacttcgtatggtgccttgtatataataaatgcttggtacatgtttattgaatgaatgcatgagagaaatggaagaaaatcttagcatttttctattaaagactagcactagatttctctttaagccagtgatttctggattttaatgtgcattggaaacacctggaaggcttgttaaacgcaggtatgctagctccatccctagagaacctccagttgtaacaggttcccaaggtgattgtgatacaggtggtccagaaaccactctaggattttccttgtattacttaaatacagttataataatcttcattctcactccttgctcattcttagcctcagatatcattccctgggtatgtagtatcacctactagtaagatataacctgtttccattctgagtcttatgtcttttggaaaagagttctaatatttcagatggtaaatatgggtcagaatttgtgtgatgttcattcgtcatgcatctgctgagtaactcttctgtgcagaaccctgttctaggtgttttcaaacatatctgtctttttgttggccaccagagcagtaatagaaacatgggcatttacaataccattggaaacaggaacccctaatttattgtcccacaaaagttgttttacaagtccttcatctcccaagaggtatgcaggtaataaagcaagtgaaatcagcatttttatgcctggcataaattgttatttgttttgggtgagtagccatttaccaggctattttacaatatgtggcatcttgctcactgggtcttaaactgccttacacaaatccattcattaaaccactaaatgctcttacaagatcagtgtaagtggtgcttagtttgtcagatgggcaaactaatctttaaatgagttaactattccaaggtttgggggagttgttataccttgctttttgttctgagaatacacaacttctcgtgctcacactaccagtcccttacatcctagtagctaatccttcactgttttattatttccataatttctattcaaaaagcaaaatctctgaggttgtttgtaacattcagatgcctatgaaaaagatgatcaattttttaaaaggcagatccaaaaccaattaggagaagtaaggtagacatccctggcatccagggaggtaactgactgcaattaaacattacatttatgttgaagtttttgagaagtgaagacaaagcagtaagtacaccaagtgatatagttttaattattcattaaaggaaggatggccatttgacaggagaactattattttctgttctttaatgttagaagaaattaacacacacacacataatagtgtgtgactattgtttacagaagatatagaagtgttctttaaatataaattttctgtaccaatcctataaaaactatggacataatatttaattgtaactcagtgaaaacattactacacagaataatgatggtattaaacaataaccatttatggagcatctatgtgtatctggtacttcatgtacagagtctctttgagtcttctaaatggccttgtgaagggggttttagcaaacacattttacagataaagaaactgagattcaaagacatcagatatcaggtccagggtcacacagatgaagtggcagattatagattattacttgtcctaatgactccaagttcagtgctctttactacagtctgctatagaaataaagaacctagagcagttgttctcaactgtggggtgatttggcaatgtctctttggagacacttttggtttttttcctttaagtgggggtcactactggcatccagtagataaagggcagggatgttgctaaacaccttataatgcacaggacggccacaacaaaggattttgtagccccaaatgtcaatattgccaaggttgggaagccctgctccaagggctggttaattacattgcccccatactagatccctcaccatcatatgtttcaagcaagtttcaacagctgctgaattcagagttgaattctctggcttaaagtgacaactttgtgttgtggattaaggacattttcagataccagaaaatatacaggttggaaagttaagtatttgttataaaaatggacctgaatatcatccaggcaggtcatttcctttctccagaggtacaggggtgcttgtaggcaggcactcacctcacgtgacagagaataatttctaaaaaacaaactttacatctatttaaactgtgggattataatagtatttacagaaaactccgtaatatgtgccataaagctagaaatggtgaaacactttaaatcatgtgtttccaattggccatcatggccataaaagaactgtaagataatttgcttgtttgtttgttttttaaagaacggcatcctggtgggtccataaggctgagttagctgtgtgacataaattgaaggagctgagtgagctggcctattgagtaattttaattttagtgcagttgatgctcagttattctttctgaaaataattagctaacaggtcaatgcttcactctctcctgctcttcattttcttataattatggctttccagttactggcctcctggtctttcctttttatattcaggtcagcaagcattctacatctaggttggtcatatgttaaaaatctgctgtgattcttcttgactaagtgtggagggtgacaatgtatccattgtgtccatggcatagctcttcattatatgtgctgaatcttcttatcagtctcagagagccaggcctgtgaatgtccaaggttgagcagatcaagtgagtttgcggtgtcatttccacagggctcttttctcagaggcataggtctattagggtttgtgttaattcacaaacatgccattcttccttgttgaggcaacaacacattttcttgagtgtgcctttgctgcttcctcaccgactagggaatggattcaccatctactaggtatttcagatgcataatttatggttcatggtgtagcaaagctggggattctgtcaggacatacaaagtattagaaatagtaggtgggtgccctatagctgtaccttatgcattattctccatttcatgagaaatggtgtgaagttcttggattgcatgcatagtgcattgtatggtagattgatttaataaatgcaagaatcattttacctatcaacacttgagctgaaagttttcatgttcttagtataactatactcagagttgcattagtgctcactctctggctctcacttttgtcttgccttctatattagtcagggttctgcagagaaacagaaccaataggcatatctaaatctataaatatgtagaaagagttttattgtaaggtatgggcttatgtgattatgggggctgaggaatctcataatctgccatctgcaaggtggagaaccagggaagatggaagtgtagtttgaaggcctgagaaccagagagccaatagtgtagattcaagtctgggtttgaagtcttgagaaccaggagcgctgaaggcgggagatgattaatgtcccagttcaagcagtaaggcagagaacaaactcaacttctttcttaatttttgttttattcagtccttcaatggattggatgatgcccacccacattggagagaattgtctgttttactgagtctgccagttcaaatgctaatttcttctggaaacaccttcatagacacacccagaaataatgtttaaccagctatctgggcattccatggtgcagtcaagttgactcacaaaattaaacatcacaccttccacgctcagctactgactctcctctttttctttgaatatgttcatctatttttctcagataaaactgacttactgggttctctgatcctgataatccttcctattttagttgcactacttcaatttctgctacctttgctttttacagttggttagtagacatcttttaagaatcagtgtacatagtggttaaatttctaggcaggctctggagctagactacctgttttcagtcttaggtctgctatattttttaccagctgtgtgaccttgggcgagttatctcacttccatgtacctctgttttttttcatctgcaaatgagaatattagtagcacctttctcttacagagttgtgatgatttcaacagttaattaatgtcaaacacttaaaacagtgcctcacgaatagtaattgctcagtaaacactagctattattattttactttgattttataggaagagaaaagtcttctgaaatgatgacattctttagaggcagttttagaattgtagcttcttccaccttgtctgtagtgatgcattgaagataagtgaacgaaaatattagctgtatcagcatccaatagtgggaacctctgtgcaatgttaagttttattatctttaagcacaaatttctcttccccttattcctaccctattggacagtctagccactgtttgcctcattacagagccgacatcatcctggctcagaaagatttttaaaatcagatctgtcacggtcgtaaattatcattctgtcttcaacccagcagctccaccttcaaggacttagagggcaacagcctgaaggatagtggacatgaggagagtgaccaaactgacagtgagcatgatgtccagcggagcctgtattgtgatactgctgtcaacgatgtgctgaacaccagtgtgacctccatgggatctcagatgcctgatcatggtaaggactggttggatgtaagttgcagcaatcgactccaaagaacccaaaatgtttgtaggcacactatactactttgcttaatgagtgtattatcaaggtgtctacagagctcacacctcagcagcatctacaggtttttgagatgtcctgacacctagccagattcttctttgccctccctaagtggatcccctaggtctgtataaagttcaggcactttagaagctgactacatgtgcatattacatacattttcttcaataaaactgcactgagctcataggagatgaacagatgccttctctccaggaataaatgcctatttttgctttagtacatgaattcagctgatcaatcgaattgcatagaacacagcactaatgagaccaaaggggtgggttttatttccctatcagactggttagctttacccagagtgagactctgttctctcattacagattgtgtactatttactgaggatagaaaataccaaacttcccattttgtctatggggctgctatgccaaatccctccctctagcttccacacaaaaccatgccattagtcataggggagaccagggtaagagaacgtggctgagtcaatgtaaaatattccgttaatgtgaaaggcacctcaaagcacatgtcaggagtggcatcctcatgtatgaagaagagtctatttctgtgaactcggaactcagccacacatgctttatcgagaggcactatttaaaactttgctaggcagaagccagggtataaaaacattagcagagttcagctaaggcagaatgtttagatggacttgggcacaaatgtcattttcaatattttactgatgcaaacatgctatgcaaacagcctgtctttttcaattaagaaatatgaattcaacttggtggttaggctcagtgaagcttcagaatgcttggctatgtcttgagaaaagctagactcaagctcagctggaagccctactgctaaaagacttaaaaatgagaaaacaaaatatggtgattatgtgctggtcttcagctgtttcatttcactgtaaacatcattaaatgcttttgttttggtttttggaaataagtccaaaggaaaaaatgtactatccacaaaacaaaatgtttttcatggaaaaaaattagtcactgtagattctattaaattgtcttaatccattccctccccagcagacccaagtgtcaaagtctattatatagagaggtcactatgaattgtgcactgctgtcttccctaattggtgagtggtgacatctgcagagataatacactttctgggaaaccttactatgactaaagatgaaaaaaattaaacagttatataactgaaacagagacaatttaatactcagaggattagcagtatgtcacaggatgcaaactgatatatatcatttactagttgtgtgtttcaaagaaatgctttttcatttatatcaagaaagggttttagttagatgctctctaaaatgaaatgactccaggaaaggaaatagtcataattgattctcactttatgcctggctagaacaacatctgttttatttttttgtcacatttctctaggaaaacagtatcagggaactgcagctagttttttctgagagagtgtttcttacaaattggatgtattacatatatatgtgtgtgtgtatatatctatatatgtgtactgtgtagattggataataagacgagtattcttttttgtgaatgcatacctaaattttatttcagcttagtcatttgggttgaaggtagagaccaccagtctccatataggtagagtgaccacataacccagtttgccttgtatacctcactttacatctgtgtccttggcataatcaataatgagaatattctaaaggaaatgtgtggcaatactccaagattcccctacatataagatgatgattttacacacacacacatgcatacacacacatacacactttctgctgggccattttggcaacactttcacattttgtttcttactatttgatttgcatgtgtgtatcttcattttttctattattccggcagtggttaaaccttgagccaacccttgagtgagttcttttcaacttgtgtgattgcctaaagtttaggtacaaaaagaatttgggccttgtttatacctcagtctctcccttgtgatatcccactacttctgaagctttctgtaataatacttgtgtgtcccatagcaacttcaggcttgccacagattccatcaccagttcacttggactgatactgcaacctcaaaaaagagcaacaattccaacaattaacatttcatagcattttaatatctcaagtctgcatttgcataataagtatatcacattttatcttaaggtacagtggttgaaaggcagtcactgggtgatccaccatgcatgcctgatcttatagccattttagttagattgtcccagggtaacatggtattgttgcttcaaaggattaccaatttagaaaggtgagaagggaaaatagaatctgcactggactgagacctgtactgaaaatctcaagaattccttgaggagaaaaaaactagtccccaatccccttggttcattgacagtgtgatgggaatcttaaacccaagtgttctgaaattcttggagttccagagcaactgttcttgaggtttgggtaggtgtcactggagcagaatgaagaatgtagtgaatttgtcaggctaactctgatcctggtatttcttttagtcctgccagaaccactccaaagttgggccaaatgtatccaacaagagcgtaccttacacctttgttttggggagtttggctcaccttgtattccatgtctgtagttctctctgtgacttttctaatttggatattagtactgcatatttccttgcacgtatgtggacacatgattgaaggggaatctcagaatttcaaaataaagataattttgtgcatctgttagtttttcctttgagcaggaatggtttgttcaaggagctggtattgtgttgcctgtgtttggggtaaaggtataaactatatttgctcctctttttaagagatacctgggccctgtgcttttccacactgccaaaatttctatgggatttgtccttaagattttattgtagcagaagaatgatcggtgtgaatgacaagggtgctttgtgactctgagtaagggcccaaattccttaattttcagtaacccttctctgagaacattcctagaggtgggaacccagaatcactatatttaatgaaggaaggagaatgttatattcaataaaggaaggagaatatctagaagacttctttttttttttttttttttgagacagagtctcactctgtcacccaggctggagtgcactggtgcgatctctactcactgcaacttctgcctcctgggttcaagcgattctcctgccttagcttcccaagtagctgggactacagatgcgcactaccactcctggctaatttttgtatttttttttttttttttttttttgagacggagtctcgctctgtcgcccaggctggagtgcagtggcgggatctcggctcactgcaagctccgcctcccgggttcacgccattctcctgcctcagcctcccaagtagctgggactacaggcgcccgccactacgccccgctaattttttgtatttttagtagagacggggtttcaccatgttgggcaggctggtctcgaactcctgacctaaagtgatccacctgccttggcctcccaaagtgctgggattacaggcgtgagccaccgcgcctggcctagaagacttttgaactcaaagggcaaaagtcaggtatttagtcactaggaagtttggattatgtgtttccttttcaatttttaaaaatgtctaaatttattttttattttgtttataattgacacatcataattttacatgtttgtggggtacaatgtgatgcttcaatacatgtatatgttatataataattaaatcggggtggttagtatatccagcaacctcaaacatttatcatttctttgcagtaatagcttttaagatcctcttttttagctatcttgaaatatacaatgcattgttataagctatagtcaccctactatgtatagacaccagaaggattgtgtttgattgtccaaccagacacattcgtgagctcagtgagggtggaaatgagagagaatgacaggaatctctgctttctggattactgtcaatcttggtatttctcttgacatgcctaagaccaggtcagttggttgatgaactggctaagctgaatttcctggttgccagctgactgaattacaaattgatttgttatccagtgcccatgaattaatacgtttcagtttgtccttagtattcagctcttgttatggcttcccagaaaagaagatgatagagaattctttatcctgtgctttctactggtgtattgtagaatggcaatttggaatgctgtctcttaatagctctgagtggcttgagaccaagtaagtgttgtcattggcgggttttaccacttgatttggttcttgaggcaatttggtgctgagcttgggagtcaacactcaaattttttaactgatgccttctgtccctgagggaattacttggcttgagggagtctgagttacctggtaaaattaccaccctttggtggggataagaattttgcctttatgcggttcctgcagagactctctaaaaagagtgattgacaagtagagtagtgagaggtgccagaggctcatgggtttgttgcgtgattaggggtatcatggggcttgaatttcttcctatccgggttatctctgagctaagtagtgggggctggggtctggctccttcttgcttctttgcataacaatttttgatgatgtggatatcccattattcttacttaaatatgtaatcctgatatgagattggggtttatagggatcatgccctagaagtgtacactagtcccaagctcagctattttgtttcaaattacactcagtccctctttccttatggttttaattattgattataaattcatcagatgaaaagatgactctaattgctctaatatgcacccaatttggagttcgctacaacactgaattggtttccctccatgctaactgataccaaatggaagcaacttacagaatttttttgtaagatttagctgcttttcatatccaaatgcgtccaaatgcaatataatgattgctttatttctggaagtatagattcttctgttttagtagacttgtttatttaccagtttcatcacctgaatagcatttaacatgtttgctgtgtataacatggatttgaagaacttgatctgtacctaatgcaactgctgttaacaaatttgccatgaaaatgttctgtaggctgcgtactatgcttattctagtgtcaaccacaggtatattaagatgtttacactttcaacactctaccaacaatatgtaattttgtttcctctagccatttaaagaaattatgattccatgactgaacatccttcttttatcttcttatctgtcccccgactcacctctctcctcactgaattttgaaacactcatttcaattagtctcttggcaaaatagggagttctcaatggagactattttgtgtcattgcaaagcagtgtgctgctgggctccagatatggtagcatgggccagatgttcatagagtaattgaaaattccattttatcagaatagcatttgctgtcaaaaagttttatctttacgtgaacaaagcggttgattagatccccctggacctgaattagcatctttgaggctagatacactgttttgcaattcatgtggttatttctttcccagttttgctcatatagagactttaaaaaatgtcttcatcctcttgcaaatatacctagtgaaatttaattacttgaacccaggaatgtgtatacagcgtttctatatatgtgatttccagctgctttcatcctgcctctggtatactaggcaggaataaaccatgaacagatatatatcactcattactcagtaatatttttgagtgcccactatgtgcctggctctgggaattgaatgtgtcaactactgctgttattgactgtaaaagttgttatctttttacttttattaatctggggtttactgaggtgaccaaggccagctcaatgatgaaatgaataattctattttaaaaaattataagaatagattttggggccattaaaaaccttgtgaatattgtgccagtaaagcaagagaagcaatatgaaaagactgttacaatcaagatcttattttcaatgggaatgtcatgaaatattcctcctttgatgttctaatttggacagtatcacattggtaaacatttttttttaaaatccacctgttgtgaggttgaatttcctactcatctttggttaatgtcattgtaggatgctaagtttaatctctgacatgtccaattaccttgctggtttagaggcagtcagtagcactcaatgcctagtacccctttttttctgatgcccagaaactttatcctttctctcagtctcagcagtttttgggcaggtaggaagagaggtgacaggtggagctttttcttttttttagttcaaaaccaattatctgctgtaccacataattggattttttccaaggcaacatttacattttattggaaaaataatcactaaaataaaaagttgttcttcactaatggaaacctccctgttgttagaatttctttgctagtattcttttggcatgggccctttggtcaaataattgttttaggacagttcaccattggtttcttcatgcaggacattaagaataatatcaaccgtttgtctaattttaaatagatacgctattgtgttatagcatatctatttaacatattgtgttatagcatattgtgtttcccaacatatatatatatatatacagacatatatatgtatatgtgtatatatatgtgtatatctatatgtatatatatcgggaaaacacatgcacacacacactatacacacacacacacacacacacgttggttatatatatgttatgcggttcctgcagagagtctctaaaaagagtgattgacaagtagagtggtcagaggtgccagaggctcatggatttgttgcatgattaggggtatcatggggcttgaatttcttcctgtctgggttatctctgagctgagtagtgggggccagggtctggctcctccttgcttctttgcataaccatttttgatgatgtggatatcccattattcttacttaaatatgtaatcctgatatgagattggggtttatgggaatcatgccctggaaatgtacactagtcccacattcctggattcaagtaattaaacttatatttgcaagagtatgaagacatttgtaaaagtctctatatgagcaaaactggggaagacataaccatatgaattgcaaaacagtatatctaacctcaaacatttatcatttctttgtggtaatagcttttaagatcctcttttttagctatcttgaaatatacaatacattgtttctttccatatgtatatttatgcttgctttcttactctctgtatatgtagtgtgtgtgtgtgcatgtgtgttttcccaatctacttggaacttttagttgtctgatattcaaggttattttaatatttattattactaataattacttgtggtgggctgggcatggtggctcatgcctgtaatcccagcactttgggatgctggagcaggtggatcatttgaggccaggagttcaagaccagccttgccaacatggtgaaaccctgtctctgctaaaaatacaaaaattagctgggcatggtggcacatgcctgtaagtccagctactcgggaggctgaagcacaagaatcacttgaacccatgaggcagaggttgcagtgagctgagattgtactactgcactccagcctgggtgacacagtgagactctgtcttaaaaaaaaaaaaaaaaaatgaagaggaaaaaaacaaacaaaaaacgaaaacaaaaacaacagaaaaaaaactacctgtggtaaggaattcattactcatcaaaaaataaatgccaaagcttttcttgattagttgacattaagaatttccatatttttaagcattttgaaagcattagaggatgcaggatatgtaaaaggagcacaatgaacaattaagaatttcattctccagtagtttatggcccaacagcaaaaatggtccagtatggaatagactacataggatcggtgaagaaagtaattaagatttttgagctggagaccaaaatgcatttaaaaggacactttggtgtaatgtgatctctttggaggaatggtggaagccaggccccaacatagtatgctagataaaattatgctctatttgggtgatttactaggtgaatgttttccagtagcttcatgaaaaatcaacttctataggccatgaaaagtagggacactgccaataagttaatagatgagagacaaatcaagttgttttgtgggactttccctttctttctttctttctttctttctttctttctttctttctttctttctttctttctttctttctctctctctcccttccttccttccttccttccttccttccttccttccttccttccttccttccttccttccctccctccttccttccttctttccttttttctctttctctctctcttttccccttcccttctcctccctcctttcttttcttttcttttttctttctttcttttctttttttgagatgggtctcactctgtcacccaggctggactgcagtggtgcgatcacagctcactgcagccttgacctcctgggctcaggcgaccctcccaccttaaccttctgagtagctgggaccataggtgcatgcttggctaatttattttggtagagacgggattttgctatgtttcccaggctggtctttagcccctaggctcaagcagcagtcctcctgctttggcctcccaaagtgctaagattacaggcatgagccaccgctcccagcctaacattatttctgtcctgtcataagatgattaagagccataaactcttatcaggatgggaaatgataaatctaaacatggattttaaatatttgtagagtatttttttctgtttattttcctcttaatccttttgttatgaaataaatatggggaattaagtccattcatagccagtttaagggattgataccaagcattttttttttttttttgagacggggttttgctccaggctggagtacaatggcacgatcttggctcactgcaacctccgcctcccgggttcaagctattctcctgcctcagtctcctgagtagctgggattacaggcctgtgccaccaagcccagctaatttttgtacttttagtagagacggggtttcaccacgttggccaggctggtctcgaactcctgacctcaggtgatccacccgccttggcctcccaaagttctgggattacaggtatgaaccaccgcccctggccccatagttttaaaagcaatttcaacaataccaaaattatgtatcatttatttattctgtggacaaaatagtcgtgagatggctttcctcttttatgatagatgctttttgtcatccagggtcaggacttgcccaaggtatttttggtctcttgtttttatcagatggctcagtgccctgtatactttgcatcaaggaaagcttaattgatacatccactttggaaacgtggctttttgacaagaaagcctttttaatttctctttctttatataaggcttatccccagtaaaactccagcctagaaaaatcattgtgttactccattctcacactgctataaagaaatgcccgagactgggtaatttataaaggaaagaggtttaattgactcacagttctgcatggctggggaggcctcaggaaacttacagtcgtggcagaaggggaagcaggtactttcttcacaaagtgacaggagagagagagaatgagggaatgagaaagtgctatactttaaaaccatcagctcctgtgagaactcactcaccatcatcagaacagcataggggaaaccgtccccatgatccaatcacctccctcccttaacaggtggggattacaggtccctccctcaacacatggggattacagtttgagatgagatttgggtggggtcacagagctaaaccatatcaatcatcaagcaccaaattagaaaaggtttgagctgctctttttaggaacatcagaaaagttgctttttaggggatcacacacaggttcttcttctgggcatattttcaaagatctgacataatctaggcttaggtcttagatggacttgtaaagctcacagtggatagataaaacagactcttttgcaactggacaaagtggaaccccatagaccaatcattctgccaggtagagagaatataaagcagttcctcatagtttgcgatgaagagattattaatgaaatatcagtctccagagctgttttggagcaaatcctttgggactgtaagtgtgtgtgtgcaggtgtcaatgtcagaagggtgctgtaggattttaggttttgtggtaaacactggacttcacttaacaatgtgccattcagagatctaatatgtggttggaagtatgtgtaggatggtgtgtaaaataggtaattcgaaaggcagtgaatctggaaggggccaaaagaattgatcagaaaatgaactctttgtgactgaagttactcaaagttttgtcacattgaggcggcctaatgacaaatacttttttcttttgagggtctctggtcatcagaaacaatagttgtacttcattatccttcatgacagtttagacaacaaaaatgcaagctattaaatttgaaataatagacaaccctgttttatcattagtttagttctttttaaccttagtaatactcattttaatggcaaataaggctctttaggttactgccttagtttaacaggaaaattttcaatctggctaaagaactctagagttttagaactctaaaagcaagtttatctccctctgcccccagtaagctaagccttagggcctttctaaattatggtctagtccctagactctaagtaatgcaggactgcaactgtaatctgctttgaataaaaatacaacttataatgttgctttctttttaagtagaaatctgtaaacatacagtactctaataatttggagaaacttgatactcttgcagcaaggcagcttccaagtcatgggtttgcaaatccaagtccaatgccagagatatattttccaatttctgtggtcgcttttccacctctaagctcatatattctctccttttctatccttaacttgcataataataaatgtttgacaacttgctttctttcctcctctttcagtctctatggagtttccaacctgtgtgaacaatagaatatttcccttttaatacatggaaaagaggaaaaagaggaatgatgtatgtttcgagatatttaggctggtcaaactgttccaaggcatcaccacctgctgtttttaatcattaatgaggctgtcagttgctctaatctgggaggtgaaccaaaagaattgttttgactttaatttaatttaaaaatcagcttattgaaaaaaaatgcttccagcttctatgagtcaggttgcacactgttgataaaacaaagcaagtcaaatgttgatgctgaaccatcattcatatgcaaacgtgaaccgttttaaatttgcagaactcttattattaccatcactagccagaaattttagttctttttttgtttgtttgttttaaacagcgtctccctgtgtcgcccaggctggagtgcagtggcgcgatctcagctcactgcaacctccgcctcctgggttcaagagattctcttccctcagcctcccaagtagctgggactacaggcgcctgccaccacgcccggctaatttttttttgtatttttagtagagacggggtttcgctatgttggccaggctggtcttgacctcctgacctcgtgatctgcccacctcggcctcccaaagtgctggaattacaggcgtgagccaccgcgcccggccaaattttagttcttttaattcaagtagtcattgtattctggagacatgctgcgtgtaaatatctgttccattttttagaagaaaaactgatgcaccaaaattttaaacactctattaatgtcagaacacaaatctatagcaaagtccagagtgaagcctaaagtgcaaattcttttgcttgactcaatgctcatcacactgtttgtatgttttagaagtttagtgactatctgtgagtactctattaagttggagttttcttcactggatggttttgcttagtgacaaaatgagaactcagaaatacagtgtctgtgcacaagtggattttaacgacctagagccagacctttgtttgtgccaactgtcaatttggaaggtttcattatgcctctctcagcttcatcaaacactttcagatttataattgatgtcaactgaagttgaagtcaaagaaaaccttctttttttgactgtagaaaatatcaccttattgttgggccctggttagccggagggtaggtgtatcaaatcacactagccttctgctaaaacagcaagtgagcacttgctgaattcagctgataatcaatctgcagctaatgagtctgcagacagactgagcggctggagctggcaccaggaaaccaccattccaactaaccatctcttattaaccttttggtgtttcctttgtgacgctaattagagacccataaaactatctgctctagatcttccgtttaaaatacaattttcaaagaaacacaattcactttaaggctcctgttagtatggccttttcaaacctcatgaaggaaaatgactgacttgccatttaagtaaagtttggataattaatctgtaatgttttggtaattaaaatgccaggaaaagttggttctgtagttggtataatttataatactctccagattccggtggtactgaagtaggcggcagatgtttctaccaccgttatgttttgactgtctgaaagtacccattcccacgctgtagccctgtctgccagactgcctgtctgcctcctcctttggtgtgaatttgttttgattgcctgagggggttagatgtgtgctttgcttcctttctgggggatgatgagccaaggaatgagctttgtactcttgggagagggaaaagtcttcgaagttgacatgctgtttagctcaaaatgagttatcaaatgggcccactcaacgttcaaactgttacatttgcatgatgaagatggaggagcaccatgccttcctgctctagtcccccatctcatttcctctttaatattttttacacccagaacaagagcattatgagataagtgttctaagcgtgttggacccatgtattcatcctgtgctttcgtttacctgtctacagcaccttttagtgcctcatttctctcatttgtttaaaataaaaaattacctagcataaatgacttacatgatcctaggggacagaatctctagatgaggaattgactgactattaaataagtgagatctgcaaagctggacattgttttatttgatttagcaaagaggtactcttcgagaagcccaatattaatcatctaggatcctttagagattaaaatatccataccagaaatgcaggcacagaacccaatattcttgcagcattacctggagcccctttggtatcttaagttttcattgtcatcaatatggaatgttcaaagtcctaaaaagtccctgaaatcattgtgatatggaactcatgttataatatatcatttatcccttacagcaacactgaaagggagagacaagcatagaattccaaatagtcaacagaggaatgacagccatctatagtgaggatcaaaatcagaatcttggctgatggggaaaggttcagaaaattagaatgaggtgataagagagaatgaaataagataaaaatatctatggttgaaaccgagattggcagggacaaaaggggtataatccagatttccttttatatgtactatctagctaatactcattgataaacctaagaattctaattctcattggagtcttccagacagatagtgtccaatcacttcaggctccaactaatatgagccagtcctaatgaatcagtacaactatttccactctactccattatattcaagattgacatcattagtctgcctgtaaatacaaaggcaggcagaacatcatagtggctaagagtacagactttgaaataatacagatttaagtttcatgcttatctttgccacttaatagctattgaccttatttgttcgaatcctcaattttcacaactgcaaaatgggagtaatgatagaaattacctatcagaatgttgtgagaagatccagataaatacttcctggaatatagcaagtgtccaaaacatagcaagtgttattgtggggactgagtcagtggaatagccactttataggatttcaggtaccctaccactcaaagcccctcatctgtttgcttctatctctgatccctttaacagaaaatgaggcatttcattttacagttactgttcacactttaagcagtccatggggagagaaaatgcatttatttaaattcacactaagttgtaaatagttgctattagattgtttctaagcttattatttgagaggagtggtggggggaagaggatcgtttctagaatattgaactttaaaagtctcagaggggagaatcagaggggagaaatgcatagaaatggggtgacaacctcatgagtttgccagagctattggtgtccaaagaaagtaatttgatttactcactgtgaaatgtctggatgctggaaagctgcctttactatcaaatcatttttctgaatcagcccagactttgagaaattataacatgtctgccaaaggtttgaaaagaggttgtgttcatttacattgcaaaatatacatattcttgagcacttactgtgaggtaagagaagccctggttcctctctggaggcattgactccactttgccctccctgtatcaaaagctgcataccccagccccaggatccctgctgctcttccctgctctccctctcttgcttcacggttcttaaatggctaatgggtggtagacgtcattttgattcctttattttctctcccactgcatgcccagactttcattaaaaaataaatgaggggatgcatttttcatttttagtttattttctaaaaaagccacactgcaaagaatcccttctattctttttttctaacaatggactgaaaaatgctcagctcctacctgaaaggtcatatctccttgccatatgaatgagcttccagcaggtccatagggagagtgtcatctgagaaatgatgggaatttatgtgcctttggattttggcctcattttgtagtggaaaaataaatttgttaatgatagaaaaaaaatctcaaccaaagccctttataaaattctctctctataactcccaggagggagcctctcagacacacagttgataaatgaaaaaatattttttacccttgccttgcttagagctgtttctcttatattaatgtaagccaggtggcccaccttcgctgataatatggtgttgaatatagcaacctgcagttctattgcataaagtattttggcttgtaagggaccttgtgacatgtttgtgtttgtcaacatcctattggaaagtagggcttggggagacatgtacacacatagaactgtgtggaattagggatatgaaaaaaacaacttataacacagaggcaagcactgtgtttttgaaaaaggcagattcattgtgaaaataaactttcttttatagtttgaacattccatgaacaatgtaactggaagtgcatactttttgccttccccaaaatctaaatccacgtgctatatacaaaatgctaagatcattatagtcctggccgggcgcggtggctcacgcctgtaatcccagcactttgggaggccaaggcaggtggatcacaaggtcaggagttcaagaccagcctggccaacatggtgaaaccccatctctactaaaaatacaaaaattagctgggattggtggcgcatgcctgtaatcccagctacttgggaggctgaggcaggagaattgcttgaacccaggaggtggaggttgcagtgagccgagacctcgccactgcactccagcctggcaacagagtgagactccgtctcaaaaaaaaaaaaaaaaaaagatcattatagtccctaacatactttaatgccatgacctactgggaaatgagaattgtagttttcattctattgtttgttcattgtagagccttggataagtcactaacctctcaaagtctcaattcgtatatttacaggtgggatgatgagcaatgttgcattaatgttgataagaccaataatcaaagtgtctatctgtctatctatctatctatctatctatctatctatctatctatctagtattttttcttagtacaatataattgtgaatcggatggctaggtgttttgccggtttttggtttttgtttttgtttttttgttcccttctcttccttggcctgttgacctgacctgagaattgggaactttatgtgctcatcatattccacagattcatagcctataaacaagttacttgtccagtctggtctttggatttctcatctgcagaatggaggatactggtagtacctgccttgtggggtggttgtaaggattaaatgagatgacacatgtaaaacacttagtgcagtgtctgttccacagtaggcacttaaaaagagtagcggcaagatgatgctgatgaaacattctccctgggttcctgtctcccctcttcacttatctacgtctctttctctctttaaaattacaagcaaaatttaagtcccagaaagcagcctcttttgactaatggtttgtcctgatctctcctttacttggcgttctttaatatccatgtacagagtttatatcatgttaatttgcttttttcctgttttttaaaaatgtaaaatgagagagttgataattgttaagacatttcaacttctgagcttcttttattctgattttgggttctgggtacaaccttttcagattcctgagcacacagccatttgccaatggatctgtaatgagtgccacactcaaattaacagatggtgtggtgcgcttgctttgaggggtaattactctttcatcttaatttcctccctttggcattccttctttggatactgttcaatggcaatgccacgaagcataggatgaaaatcaaacaagtagcaggtcacttgtctatctcagacaaaattattgttaaaactaagaaccagtgaaggtctaccaagtgaggggcttgtaacttctagtattagggaccaagtaactcttaagggtacttaattgtctgatcgttcctcctttcctaaacaaggtggctatttctagttgataactgtctccatttttcttaaagtttaagtagattcctcctctatggccatcatgtcacacctctcacagttggtttgttcttaaactcttaacactgtaagccaaatctgatgtcctttcatcgttggagccagttgtaaactgctaactttactatataaactcctttcccctatcttcttcctcctctctcgtcacacacactttttcccctgatgcttcttatttagttctttctccaaccctccctgctttcacctcagcctaattctatccttttcccctctaggcaatttctcattcatcactgtgtttttacagagaatagaaataatttttaatgacattgagaattttttttttgggttttagtggttcagtcttcccttgtgaagatttttatggcttatttttatttggtaaagttaccttctttactattttttctctccttccacacaattcacagtatactaccatgagtgaggaaaaccctcagtgaataagcgctgatcaatttatttctctgaacattaccaaacaacagatgccatccaccaatgtttgatccccagggcagttcttatctaccttattttacagattccagaggtgaaatgatctattgtaaagcagtgcaaggatcagaagagagtttgtgtttcctggatatattatgtgacttcagggcattgttctgctttccatttgaaatctcaaaggctattggactgacaggaagttttcattcctgttatgaaagggttactgcctccagtttggaagagatgttgcttagggaaacagcagcagattatagcagtaaagccagaaagatcagggagtcagaagtattactatgagatggaaggaaatagctggtgtgcctaactagctcaggggcatgtttgatagtacccaggtatgtctacagaactggcacctgtatagatattgacctctcagtgtgtgttttactttttactctttgagttggactgctgtgttttctgtgtcactggtaattccattgaccaaaacacttcagttgaatcacagcttgagtcttcaagtttccttccctctaaccttgctggtttcttgctcatgttgatatttaagaacgttttctttcaattcagcaaagtttccggatacaagattaatttacacaaatcagtagttcttctataccacaacagcgaccaagttgagaatcaaatcaagaactcaaccccttttacaatagctgcaaaaatatatatatatatatatatatatatatatatacttaggaatatacctaaccaaggaggcaaaacacctctacgaggaaaactacaaaacactgctgaaagatatcatagacgcaaacaaatggaaatacatcccatgctcatgaatgagtagaatcaatattgtgaaaatgaccataatgccaaaagcaatctacaaattcaatgcaatccccatcaaaatactaccatcattctttgcaggattagaaaaaacaatactaaaattcatatgaaaccaaaaaagagcctgcgtagccaaagcaagactaagcaaaaacaaaacaaaacaaaacaaaaaacaaaaaaacaaatctggaggaatcacactacctgatttcaagctatactataaggccatagtcaccaaaacatcatggtactggtataaaaataggcacatagaccaatggaacagaatagagaacccagaaataaacccaaatacttaacagccaacttatcttcaacaaagcaaacaaaaacataaagttggggaaggacacccttttcaaaaaatggtgctgggataattggctagccacatgtaggagaattaaactggatcctcatctctcaccttatacaaaaatcaactcaaaatagatcaaggtcttaaatctaagacctgaaactataaaaattctagaagataacattggaaaaaccttctagacattggcttaggcaaggatttcattaccaagaacccaaaagcaaatgcaataaaaacaaagataggccaggcgcggtggctcacacctgtaatcccagcaatttgggaggccgaggcaggtggatcatgaggtcaggagatcgagaccatcctggctgacacggtgaaaccccgtctctactaaaaatacaaaaaattagccgggtgtggtggcgggcgcctgtagtcccagctactcaggaggctgaggcaggagaatggcgtgaacccgggaggcggagcttgcagtgagccgagatcgcgccactgtactccagcctgagcgacagagcgagactctgtctcagaaaaaaaaaaaaaaaaaaaaaaaagaataggtgggacttaattaaactaaagagcttttgcactgcaaaagaaacagtcagcagagtagacaggcaactcatagagtgggagaaaatcttcacaatgtatgcagactaatatccagaatctacaacgaactcaaacaaatcaatgagaaacaaacaaacaatcccatcaaaaaatgggctaaagacatgaacagataattctcaaaagaagatatacaaatggccaacaaacatatgaaaaaatgctcaacatcactaatgatcagggaaatgcaaatgaaaaccacaatgcggtaccaccttactcctgcaagaatggccataatcaaaaagtcaaaaaacagtagatgttagcatggatgcggtgaacaggtataacttccacactgctggtggaaatgtaaactagtacaaccactatggaaaacagtgtggaaattccttaaagatctaaaggtagaactaccatttgatccagcagtcccactactgggtagctatctagaggaaaagaagtcgtcatacgaaaaagatacttgcacacacatgtttatagcagcacagttcacaattgcaaaatcgtggaaccaacccaaatgcccatcaaagaagctgtggtatatttatatgatggaatactaccagtgataaaaaggaataaattaacggcatttgcagcaacctggatgagattagagactattattctaagtgaagtaactcaggaatggaaaaccaaacatcacatgttctcactgatatgtagaagctaagctatgaggacgcaaaggtgtaagaatgatacagtggactttggggacttggggggatgggtggaaggggggcgattgataaaagactacaaatagggtgcagtatatactgcttgggtgatgggtgcaccaaaatctcacaaatcaccactaaagaacttactcatgtaaccaataccacctgtaccccaatcacttatgggaaaaaaaaaggttaaaaaaaaaaaaaagaactttttctttcaaaaaaatgctgatgaaatgcaagtttttagcttctttttttcttgtcatttccactgatctgggctgttttagataggatgttttcaaaagttttatcatatggctctattctttttggcttattggactgcaagtgtgctaaggcccagtcattcaagattgattagttctttgtggtactatatgggcattttggtgattgtcatttctcaaaaatgatccaaaaacgattttccacattgtttaaacacactgttattactcttaacatcccaatagttattgaggtgtttattattgcctttttcttttaattggggtttttattgcataggaaaggggaaaagccctgattcaagcatttggattcaggtcctggaactgccactaactctgtgtgatctcaagcaacttgcttcctcgctttgggttccagtttttttcatctgtaaatgaagagtttggattggaatgacttataggtgcttattattgctaatactctattactgtttattgtatatttaatatggaaagattgtttggaaagtggatgacattttggctggattttcctgtgtatttctaaagaccagggcaaggtgggaaatctgactcttactcctggggctttgggctgtaataatccttccgttgtggcaagaggaatgagggtgagacattggtgaagttggcttttgttcaacattctgagcttattccttcttttaggcttttgtttgcatatgtttagcttaactctgctttcaagtgtgtgtattttcgtggaaatggtcctcttttccttttacaccaaattcatgttctcatcttccttctcccttactgaatcatccatttctgaatagttagcaattttcaacttaatgaggtctttcccctaagtgaagaacacagctgttcctcctctgatactttggcagctgcctctgcctttcccaaaatggaatgattagctctttcctttgattttttagctggccattagttcaggactactagcccatttcctgtgtgatggaactaccaaatcccatggccagaattgttccaatttgcctttagtgtcttttagtcttctggggacttaattcatatgaagtggaggatttatcaatctttcagaggtccatttgcctcattatctccagtgatttcattgttcagccttttgagatgctgatctacgaggagaacctagcctggtgtccctgatgtggttttgctggagaaatagcagataagaagatcctcaatgtattttgttcctgaatcaaatagccctcatttgtcacaggatctccacttcagtttctgaaaagcccttttgcctattccattttagtcttatgtacctgtatttaagaaagtgattactgtttttcctcatgtactttgacttcatctgcccctccagcctttaattttatgatttcacatcccttgttaattgttgggatttccttttatcatatgtgtcccttacacttaagatatcaagtcaacttctccactccactccaattcccctctcacattatgctccctgttaatcaatcaaaagcattgtgggtttagtagtgctgttccaaatgtgtgtggtgcagcccgtttttgcttccccaccccaaacgcctcattcaatttaattccatatacttagcatattaggcatcttgtcaatatttcctttctgaggtctatttttaaaatttgaatgcattctgcatgtgtaggtttttttttttcttaaatgatgagatctactgcaacagagagccagaattagctctgtgcctaggagaaaaggaaagcacagagggaaagaatatttctcacattctcagaaggtgtatgcaagagccagcccttggcacaattatttatacagtgccactatatctatctgcgtgcaccttcccctccatttgggagcataggcatccagtattctccttgggttttcttagtttctgtcaccattaacccttctactcagggccctgcattcccagtctttcctcgtttcctactttccccataaaaaacttacctggtccatgttccatttccccaaaatcctaattatttcaagggacctgttaaaatgacctgttctttctttccaaatagtatttgtatctcaatgtgatgataatccaaaagaatacctaatggtggcatttgggtcaccaatgcagcctgatggcgtgatgtcttcaggatatggccttttccccagcatcagttcctttatatcccaccaatagttggctacatggtcaaatgataaggctagcttggactccatttatcccagagaattagagctgcttgatgaataataatacctacctaacatatattaaattcttccttagtgcgaggcactgtgtagctcagcttccatgcatttcctcttttagtcattccaacaattccttatgaaggtcagtgctattagtcctgacttatggaagggaaaaaaggcacacagagtaactttaagtaacttctataggatagggctgttaagtcttagatctgggactctaaggtagtctcgctccagagcccatagtcttagactctgctgcactgcctctgggaaaaggatggtacctttttcacatgtacacctcactcagaagagctaacttcagatgtgctgctgggtagtaagcttccctttggcaaggaacaaatgaagtcttgagttgctccagtagatctagcttatatctcatcctttctggagagaagtttgcctttggacacaatgctacagcagaaaggtttgcctttgcttttctgcaccccaaaacttagcagtattaaaaactttcttcaccagtccctgtagttgtaagtcatcagtagggatatttgccaaatgcttaggaccaagcttacactctatcttttctctaccttcagagctgaaggagctatgtatgtgtgtgtgggaaggaggctctctttggtgttggtgagcatgaatatgacagactcggggtagggggatacatgaaggggagagcagactcatccacactctcaaggcaagtatggttagaaaccctgcttcactcaggtagcgctagtctcttcactgtaagtaggttttttttttttttttaaatatggtgatacaatgaattgttttctgaggtggatggttgtgttttctgttattactgcttttccttctggaccgaacttttattggctgctgcttacttactagtagaatgcttcacacctgtgggctgctgcagtcatgacaatgaacattctgttcagaaggggagcattcattctctttcccagcagctgttaccccaacattgggaatttaatgcattcatttgttctttagataaataggattaaattcagaatgaagcaaggagtagtcttagtctgtgctttgcatgattttcagggtctgtacagttccagctgtgtaaacatgattgcagaacttaagtatcgtctaatgggggaggatttcaatttaggagtggcacaccatagctgggctggagccagacattcttccacccacttcagtccacaccctgcggagtcggcttgctcagctcctagagtcagaagtgaagatggggcagctgtagttaattatactgtattatagcttcttatcagtaggggatgagaactaggcaagggctaggaaaatctaaaattatatcctcaaatatgctccagttatggcagtaggaaacaaagaaatggaagacattggacaaagtagggcagccccaaatattaaatatgacaagaaaaaatccaataaaatatctattgaaattgtagctacatttatattccaattgattcttttttgtggtcactgaaagcaagagtagagaaatattgtattgattgtaaaatattgatttgttctaatatttggactcagttttgttttcttgagatttgtttaaataatgaatagctaagtaatgctaaagacttctaataaaggagcactattattatggaaggaaatgcaatttcttcataacaaatacaaatattatggatcatccaattcctttgtccttgttcctccacccacaattatgtacagtgttggccctgctcagttcaatagagtcttagatccagtaattattctgtctctctaaagaggaacatgggcatacgtattcctgagccctaaaggatgggatttctgatgatatagcaggttttgtttgatgccatagattctccaggttattcttgggggagtatcattgatagctaacacaaaggtacttggcttcctactggatatgaatgtcaagacatggtcctgatcaaggaagacaacaaagcattgccttttgaatgtgctggggattgtaatgcatttaggaataacccaatcaatgatattcgttcctattacaactggctattgaaaaactatttttctgagaagctcacttcaaaatgtctctgagacagaatattcttttataggatggggagctctggattgaaaaagagaaatgctaggctgataaatcactgagtttgaatcatatggaaagtgttcaagaacagaaagagaggaaaattcaataaattactgttgatgcaatattggatggtcagggtgataagacactcactagagatttccagtctatgatgtacacacatgcattattttgtttactagttgtggtagcctgaagaggcagaaacatgcctccagaataccagcagggcataggggaacctctccatcatccatcatattcaactgtagtcggggggtgatcctgtcaatattgcctatgtggtatctctggaacttgggactgggatgcctattagtgcttcactgaattctgtatttgtagcatgtgcattgtagcatgtacataccatagcacttagctcgtggatgcttgtctgaatcattaggtatgaacattatgggtgccataatagcacaggaattactgcaactaaaaaggaaacacatggcttgtacttcatccacaatcacttacacttaagctattgatagttgattgggatatgtgaactgctgggcttgtgccatgggacttctaagcatatttggtgggcggaacagacaggaaggctgtagattttggcaagctgtggttcccattagtcaggctaactgtatctgacagtagagatcccaattcaccaagatgaagcttacttctctaggttttggctgatggcccaacaatattgacgtgaaggacaggagaggaccaatgttacgttaggctgtgagtttctaatgagcaaatagttgaatggtttagtgaataccctgttggttttttggtggggtaaacacaaaattcataatttgagagacatgtaagactcgaaattttcttttatagtacatgttaaccattcattctcctaatagggaaatgtgggctcttttatagggtgtgcatattatgtagttgtacagttaatactcttctctgtgtttttcttgtaaggggtgctgataacataccctactaaggaaattccaggcacagctgtttctaataataggtgccccaccccacagaattgtcaggcttactctcaaggttctttggtgggaaggaggattttctggcagagtcttggccactgccattgtctcagattgcctccctgtagcttccttggaggtatgagtttctaagcagaaagatttgctgtgatgagggaaggccacaaaactgaaggaagagagatgaggtcttatagaactaagtgagaggctgttttggtcatggcagagatgagttgaacactatggaatggagacaagatgagaagaggagtgggaatcaattcatgaaagcacttattatttataagttggaataaaaggttcattgaactccaggggacccttcttatatgaaatgcttgtgaatatgttgaaattttgtaacggcaattccatcttaaatacactgggggagctgacaacctgcagttcatggattattctatctagtgtacaatcactcttctattctaccctggacattcttccaggtgtggtcaagagaaagcggatagaacagatggaatatttcctctcaggagagttcaagagcttccttaaacaaaggcaagatgtgagcataaccttttactttctaaacaactttttctgagagctacctggaaaaatttctagcttcctcacagatccaagtaatttctgaaaatatttagagactagtaatcgtttaacttctaaaaatcaaagttggtttgtgctaaaaatatcatccggacagtctgtgtctagttgagtggggaagaaaaaaaggcaagctcttggtatcaatctttattccctctgtaaacacacatgaccagaagagaaggctgttattaatggtaatgcagaccagaaaaaagggtattattttcagtctgttgaacagtacaaaaatgcttctcaagcactgtgttcagatgtttctttttattagccatcacacaaggaattagactcatttcaaacagttcgtttccctactcttgtctccgtaaaatcgttactcatgagtggtttctttgttgaaatactgctgacctcccatattggaatgcacaacagggtgttaaaaatataaactttttagtttgcataaactctggaagaagggggacaaagattccccaggagaataaaaccattcgccaatgtccttgtttattagtgtcctataagcatcttattcaggaagctatgtcagcattacaattctgtatagactttgtgtgtgtgtgtgtgtgtgtgtgtgtgtgtgtgtgtgtgtgtgtgtgtgattaacagcagagggctctttgaattccagcaggaggttttaaaatataattctgcatctgcccctctttcttgtcctttccaacccttttctacctcccttctcatcaccgacccatccagggccattaggatagataaaggagttgtgccatgtcttaatatatgagcaaatgatgatccttagctctacagctaggcgctgtttgcattttgccaaaggtgattattttatctgcagttttaatagcaaaccagattatttgctgttcactaactaataaaagcaaataaaaacagattgcaaagtggaattaaggggataagaaagtactagagccaaagaaggctttttctttaattaataatttccatttactcttagaatatttttatgctagagttcaacatcttatattaaacatgtgtgcacccttcctcttataactgccgaattggaatctcagaatggaaatcatgcaggcttgaacggagcttcaaattctcccagtgttgtcttattgtctgtacacagaactagactcctcagggcttcccccaccacagcatggcattcctccattagccccatgtttcccagacccagtcatgaagaactggcattttaaccaacaagtagaaaacacaataaaattggagttcaggagatgcaatgttttggagaaacagattattccaagagtgtaaagatacatgatctaaagatggacagaacatttaaatttaccagcctggttttcagtgattttttgatttgttcaattaatttgtgaatgaaaatgcatcttaaggatggtgaggactggtggtagtggtggtgaatgtgcgtgtgtgtgtgtgtgattttgtggccatgatccaggcttactatgcatcagctcctaaagagatttttacagagctgtgtctgagtgtcttaattcaggtcatctcaaccagagagccttctgctactcctacgtgcaaaggctcgagttaactcagaaaaagttctcacagctgtggcccagatagattccaagacttctctgaaacttcagatggaagagcctttctctttaatagagagccattctctctattaaagaagagttgggcaagctggaggccagaggattatattgtaatcttcatgtgctgaaaggtgtaaagaatcttttcttcttaataagagcactgggacaagcatagggtgccttcaaattatcagacttcctcaaacaatagatcaattagcctttcttctgaatttgtgtaattgtttttgaggcaacaccctgaaaaaatatagcttactttttccgactagtataattaagcggacaaatggaaaaagaatcattcaaagtaaattttaaagaaaagagcaaaagagtaaaatttagcattgtccatgtaagatggataatgacaagtaaacacagaaggtggtgtttgatcccttcgattttggtattcattattcatagttattattcataaattccaggttaggcttgtgccccagtgacacatttgcattttactttaagttgatttctacctggttttgcaaacaaggatttaatgatttgggctgcctctcactcttcctctgttgcttgtcttttcatatacagtgctggcttctagccccttttacaccctttgtctccatcatcagtcttgctctcccatccaatgttttactctcactctctttctctcttctctcttctctctctctctctctcaatgttttaggaaaaaagatttctaacgtggaaaactgatatttgaatagagtcccctaaggctatcaatttacttttaatttgtctggagctaagcttttctttgttgcaatgaggaaggattaaaactgctgtaaaatttattagcttccagaaagatatttgaaatgcatttttttaatgattgtgctgtttgctgtacccagaagcagtgtcatcacaactatagtattccagatggttcccgaagttacactgaaacatcaagataatgctagacttttttatgacgcctctattggtaatgaatagtccatcccaggtagctaatatatattaattaatatatatttgtttccaatgaccatttctagtgatacccagctgatgacaaaacacacacactatccctttgaatcattacaggagacagtgattggtttactgagctctttattttccaaatgtggaagaaatgattggagatttactaatgctgtttcttagcttccccacccagtcctaggaacatattggtagtcaagaacctttaaggaatttagaagttacagttgcaacatttttcatggactcatgtatagtatggcctattctacaaaactgaatgtcctgggacttgactgaaggaagtgtcagttcctgttaaggggaacaccagctgctgggtgccctttttgttccattcaacagtaagttttcattagaaaagggaagatttttctcttggccaacgtgctctgtctactcttgctttctgtgtcagtcttatgtgtgccatcttcactatgtattctcctagaagctcatgaccatcatgaaagtggcttcttcacaagctgatgatctgctagcagtttccttattttccacaaaagagtgaaaccaagttggagataagtttaggttcagaactattttttaagtgtgataggctctgtgactgggcgcggtagctctctcctgtaaaccctgctactcctgaggctgaagtgggaggatcctttgagtccaggattttgagaccagcctgagcaacatagtgagattctgcctctaatttttttttttttttaattagccaggcacctgcctgcagtcccagctacttggaagaccgagccaggagaattcttggagtccaggagttggaagctgcaatgagctatgattgcactattgcactccagcttgggcaagagtgagatcttgtctctaaagaagtttttttttaatttttttattatttatttatcatttttttgtaaaggctctgtcatcctagatgtataactgcatgtagaatgcatctgacttttaaatctacaccaagtcaaataactgatttgaactcttcagagaagtgacaagatgttgtaggtatcccactaatataggtttgagggacttaattctgtgggcgtctttatatgaaactttcaaaaacggtcctatgtttttcagagttgtagtatctcagtgttctatcttttggggaatagctcattggccttctgtgtcacctcatatttactagtaaagttgctttttcaaatggtttataagcacctagatgaagtccagcactttgtcagattattttctccatcacagaagccaaaatacaaagatttcagtctagtcaatctctgcttatctcagtcactgtcagcacctcttatttcttagtctcaattttccaggcagccttttgcttgatttccttgctccccatgcatcagcacaaatgatttatacttatgtacatcttgaaatctcttctttatggattgaattgaatcgagccccagtacaaaaatgaaaactccaggaactgttgtgattgcccaaattacaacttggattgtatgactgtacacgccacactctcatctatcataaatattaaattctcaagcacttatacttcaatatgttttaactttgtctgtttgaccagctcagcactaaagattccattgaagataattcaattgctttgaattctgaaaggggcatctttttaatctattttcatgttgcactgggagttaagtgaatttcaggtgcatagcctgtgaatgatgggagaggcctatgtgccatttggcatcacagaggccaaatattgggtgacatttgctaactaatgctgatcagtgaaatggtctaggacaagattggggttcatcagtcttttcagccattctccctatctcaaactaaaactaaactttgcagaatttctgctgttttgtcagccatactgaaaatgccaagttatgctaaccagggctggccttttttcttctgtcttgtcttttggcaacatccctttgccagtctcaggaactttgttcccacaccccatccccatccttcatccttcctgaggcatctccacatccagacatttctagtgtttttaaccccatcaaatctctcttatcctggatacccttattcagggctctgttatgtgacccaaaaaaatctgataatctcagttcgataatggtgcctcttctaaacatttttttaaatttattttttattttaatagtttttgtggaacaaatggtgtttggttccatgaataagttctttagtggtgatttctgagattttggtgcacccatcacccaagatgtgtacactctacccaatgtgcagtcttttatctctcacactcctcccaccctttcccctgagtctccaaagtccattgtattattcttatgcctttgcatcctcatagcttagctcccacttattagcgagaacacataatgtttggttttccattcctgagttgcttcacttaaaataatagtctccaattctatccaggttgctgcatatgccattattttgttcctttttatggctgagtactatttccatggtgtgtgtgtgtgtgtgtgtgtgtgtgcatgcatcacattttctgtatcctctcattgattgatgggcatttgggctggttccatatttttgcaattgcaaattgtgctgctataaacatgagtatacaagtgccttttccatataaggacttcttttagatacctagtagtgggattgctggatcaaatagatacacttttagttatttaaggaatgtccacactgttttccatagtggttgtactagtttacatactcaccaacagtgtaaaagtattcccttttcaccacatccatgccaacatttattatttttttattatggccattcttgcaggagtaaggtggtatgacattgtggttttgatttgcatttccctgataattagtgatgttgagcattttttcatatgcttgttggccatttgtacatcttcttttgagaattgtctattcatgtccttagcccactttttgatgggattgttggttttcttcttgctgatttgtctgagttccttgtagattctggatattagtcctttgtcaaatgtatagattgtgaagattttctccctctctgtgggttgtctgtttattctgctgattatttcttttgctgtgcagaagctttaattaagtcccatctatttatgtttgtttttgctgtgtttgcttttgggttcttggtcatgaagtctttgcctaagccaatgtctgtaagagtttttccgatgttacctttagaatttttatggtttcaggtcttagaattaagtccttgatgcaccttgagttgatttttgtataagatgagagatgaagatccagtttcattcttctaagtgtgacttgtcaatgatcccagcaccatttgttgaatagagtgtctttcccccactttgtttttgtttgctttgttgaagatcagttggctgtatttacctttattcctgggttctctattctgttccattggcctacgtacttatttttataccagtatcatgctgttttggtgactatgcccttatagtatagttctagtcgggtaatctgaagtttccagatttgttcttttgtttagtcttgtttttgctatgtgggctcttttttggttccatatgaattttaggattgttttttctagttctgtgaagaataatggtggtgttttgatgggaattgcattgaacttgtagattgcttttggctgtatggtcgttttcacaatattgattctacccctccatgagcatgggatatggttccattggtttgtgtcatctataatttttttcagcagtgttttatagttttctttgtaggggttctttcacctctttgcttaagtatattccttattattattattttgcatctgttgtaaaagaggttgagttcttgttgattctcagtgtggttgctgttggtgtatagctgtgctactgatttgtgtacatttgattttgtatcctgaaactttgctgaattcatttaccagatctaggagctttttggatgactcgttagggttttctagatatacgatcatatcatcagcaaacagtgacagtttgacttcctctttaccaatttagatgccctttatttctttctcttgttggattgctttggctaggaattccagtaatttgttgaatagaagtggtgaaagtgggcatccttgttttgtttcagttctcagggggaatgctttcaacttttcgccattcagtataatgttggctgtgggtttgacatagacagctcttgttaccttgaggtatgtcccttctgtgctgattttgctgagggttttaatcataaagggatactggattttgtcaaatgctttgtctgaatccattgagatgatcatgtgatttttgttttaaattttgtgtgatgtgtcacatttattgacttgcatatgttaaaccatccctgcatgcctggtatgaaacccacttgatcatggtggatgatctttttgatatgctgttggattcggtcggctagtattttgttgaggatttctgtatctgtgttcatcagggatattggtctgtagctttctttttttgttatgtccttccctggttttggtattaggatgacactggcttcatagaatgatttagggaggattccctctttctctgttctgtggaatagtgttaataggattggtaccaattcttctttgaatatctgatgaaattcagctatgaatctgtctgactcttgttgacaattgttttattaccatttcaatctcactgctcattattggtctgttacgagtttctatatcttcctggtttaatctaggggagttgtatatttccaggaatttatccatttcctctaggttttctagtttatgcacataaaggtgttcatagtagccttgaataatcttctgtttctctgtggtatcagtagtaatatatcccgttttgtttctgattgagcttatttggatcttctctcttcttttcttggttaatcttggttaatcatttttattcatttttttcaaagaaccaggtttttgtttcatttatcttttgtattatttcttttgtttcaatttcatttagttctgctctgatcttggttatttcttttcttgtgctgggtttgcatttggattgttcttgtttctccagtttaatgaggtgtgaccttagattgtctatttttgccttttcagactttttaatgtaggcatttaatgctatgaactttcctcttagcaccgcttttgctgtatcccagaggtttggataggttgtgtcactattatcattcagttcaaagaatttttcagtttccatcttggtttcattgttgacccaatgataattcagaagcaggttatttaacttccatgtatttgcatggttttgaaggctccttttagagttgatttccagtttttccactgtggtctgagagtacttgatatcatttcgattttcttaaatttactgagacttgttttgtggcctatcatatggtctgtcttggagaatgttccatgtgctggtgaatagaatgtatgttctgcagttgttgggtataatgttctgtaaatacctgttaagtccatttgctgtaggttatagtttaagtccattgtttctttgttggctttctgtcttgatgacctgtctagtgctgtcagtggactattaaagtcccccactattattgtgttgccatctatcttatttcttaggtctagtagtaattattttataaatttgggagctccagcattaagtgcatatatatttaggattgtgatattttcctattggactagtccttttatcgttatgtaatgtccttttttgtctttttaaactgctgttgctttaaaatttgtctgatgtaagaatagctattcctgctcgcttttggtgtccatttgcatggaatatctttttctaacccctttaccttaagtttatgtgagttcctatgtgttagttgagtctcctgaagacagcagaaacgtggttggtgaactcttattcattctgccattctgtatcttttaagtggagcatttaggccatttacattcaacattagtattgagatgtgaggtgctattctattcactgtgcaaattattgcctgaatacctttttttcattgtgttactgttgtatagttcctgtgagatttatgctttaaggaggttctattttcatgtatttcaaggacttgtttcaagatttagagctctttttagcagttcatatagtgctgtcttggtagtggcgaattctgtcagcatttgtctggaaaagactgtatctttccttcatttattaagcttagtttcactggatacaaaattcttggctgataattgtttcatttaaggaggctaaaaataggaccccaatcccttctagcttgtagggtttctgctgagaaatctgctattattctgataggttttcctttgtaggttacttgatgcttttgactgacagctcttaagattcttttcttcgtcttgatttcagataacctgatgactatgtgcctaggtgatgatctttttgcaatgaatttcccaggtgttctttgagctccttgtatttggatgtctagatctctagcaaggctggggaagttttcctcgattattccctcagatgtgttttccaaccttttagatttctcttcttccttgggaacacccattattctttggtttggatgcttaacatagtcccaaacttcttggaggttttgttcattttttaaaattctttttctttttctttgacagattgggttaattcaaaaatccttgtctttgagctctgaagttctttcttcttttgttcaattctattgctgagactttccagtgcattttgcatttctctaagtgtgtccttgatttccagaagttgtgattgttttttgtttatgctatctatttccctgaagacttttcctttcatatcttgtgtcatggttttgatttctttaagttggacttcacctttttctggagccgctttgattagcttagtaattgaccttctgaattttttttctggcaattcagaaatttctccttggtttggatccattgctagtgagctagtgtaatcttttgggggtgttaaagaaccttgttttgttatattaccagaatactttttctgcttccttctcatttgtgtagactgtgtcagagagaagatctaggactcaagggctgctgttcatattcttttgtcccatggggtgctcccttgatgtggtgttcttccccttcccctggggatggggattcctgagagccgaactgcagtgattgttatttctcttctgggtgtagccacccagtggagctactgggctatgggctggtactggggagtgtctgcaaagagtcctgtgacatgatctgtcttcaggtctttcagccgtggatatcggcacctgctccagtggagttagcaggagagtgaagtggactctgtgagggtccttggctgtatttttgtttagtgcactggctttgtgttggttggcctccagccaggaggtggtgctttcaagagtgtatcagctgcagtactatagggtggatgctggatcatcttattttaacaggcattttttaatgcatgtatccagatgaatgaaaaatgtggaaatttttctccatgctgcaagggctggttcttggatagcacttctttggcatctgtcaggtaacaccacataggtgttttgaatgccaatcagtgctggcatcctttcccttctgcctgatgtctgtctgtcattccatagtgttgtaggggagggctgctaacaaggacgaggctagggaacgggagaacaaaaagaaagttttagggagcaaccaaaagtggagaaaattgctgaaaaaaagggaagaagggagtgagaaagagacaagtagttgtttgtagtgtaatttgtgatgtgcttcttgtcacatagagtgactacaggatagcttggtatcattggttcatgagtgtctacagatatctcagccttcactggtgttcccttgaatgttttacggatggaattccatcttttttttgctaaaattttactttagaatacgactgtaaaccccctgcaacattacagcctgggagggctctaggaagttgtcattacgctcatattgaatttttgctagatacataacagatattttccatatgatatctaaacacccaaataagcccaatcctcaagatatcaaacatatcaaaaccaaaataaaatgcctaaagccttggtaatattttccttccttccttccttccttttttccttccttcctttcttccttccttccttcttccatttccttcctttcttttccattgatcccgttgctgctttacttgccttgttaagttacagagatgggattgataatagtgcaggagagagcactattaactattgttagtatagaaaacttgcaggtctatggcaaatgtattttcaacgggatgttagagggtactagatctctctaacacctgtatatagtgtgcaggaaaccacacagaggctaagaggacacttaatgtttctcaagttctaaatttactttacgcctctgacaaagctacatagtttactttgtaggtttctgtagtatttatgataaaatagttatttccactttaggagttgcacagtatctggggtgggacagtatctggggcgttgaccaatattcttccttctttctgtgcatttttcattcaattaaattaaactattattaacagtttaattgacagctctgtgctggacgctttgctaggttgagatagatgtaatctttgctcatccagagcttaaaaggtagcagaaaatatagacatgaaacaagtacagttgtctcttggcatccatggaggattggttccaggactcctgagaatacgaaaatctgtacatgctcaagtcctgcagtttgccctggggaatctggtggaacctgtggataaatgaaaaggtgaccctacaaatctgagggttttgcatcccacagatgttgtattttctattcacattttgtggcagatgcagaacctgcagatacagagggctgaccatatttatttttaaaaacctacatgtaagtggacccatgcagtttcaaacccatgttgttcaagggtcaatggtaattacgcgtgtgatgaatgttataaaagggaagtgctgtgagatctaccttagtctaaaggatcacagaaggactccctggggaagtgaaatttaaatggagacttcagggataatgtattaatcatgaattgtgtttaaccgctagtaataaagatgcccctctcctactaaagaaaataaatcaatgacttaaataagagatatttatttttcttcttattaaagaagttcaagtttggtgagggtagctctacagtatctttaataacccaaggtccttatatctttctattctgccacccacaggcacatggcttctatcttcagggttgcctcatggtagtcagacagatgttgcagcatcagtcattatgtctccattccagacaggacaaagcaggaaggaataaagacaaaatagtctcttacctaagtcagctctccccttttaaggaattttcttaacatcttgctttataatgttggtccaatcttatgttacatgtctgcaagggagcctgtgaaatgtagtttcttttagctgagcacactgccattcctaacagaaatggggctttgtttctatttaacaaaaacagataaagatatttggcaggcaattagttatctctgcttcatagagtaggagttagataggtcaagggtgggtggtgtacttctcaacaattaggtttcctcgattaggcacatgtgaccaattttaacagcactaaacttcttcataatcattgtcataatctcctccattatatctcacaaaaaatggccctgctttggttacagattgtcttgttcatgaggtgatgcagaataaactaagtagatgtataagagtacaattcaggaagcttgtctgatatacacatcacttgcttgttggttctactactgctgccacttagaagtagccaactacttgagctctcaggaactggaactcactttaacttttttctttctgattcattgattgcagattatttctgaagaggaaacatattgctcttgtaactgtaaccttgaactattttagtgctggattttcgtctgtgatcattaggatctttgagttaatacacccaaactctgaatcacagtaaagaactgccagcattatcaaacacatccattgtgactggatatctatacaaacccagcagagcctcttagctcttctattccaccaggacttggaaagttttagcaaagcctgaaatgatgttttcatcattttcttttattactttggtggggaccatgggtaggctctttctagtgtggaagtacattgtttggccacatctgaggagatggcagtttcatgtcctgaggagagtagtaattgctgcataaagttttgctattatctgcacaaaatagcatattctggtctttttctgtttgaattacttccttaatctatcatgacttagtcattactgccttactgcctcttttgcctcttgtaccctcgcaagactgatgctttaattttttttttttttttggccaggggttttggaattctctcaccaagtttcctgatgacaaattgtgaccaccaaatacttactgctatgtagattgaagaaactttcacttttttctgtattttttatggtctaaaataatcagatttgttttgaactaaggagttctctggtctcaagatttgtgttcctcttccaaatttatgcactctgttcttgtttcttttgcaaatcctagggacaacttcagaagcagggaaaaccaatttacaaattcatcagtcaaccctcatcatgagtatgtttaaattaaagacacctgccttcattcatctatacgtgaatttccacaactatatgtggattttagaatgccacattttgctttgcctaggttcaggtcagaactttcagataaaaatgtagcaaagtatcaggtcacagataggttcataagaagaatctcagcaggaacttagtgaatcgtgagcccatctctctatataagctggagccagcaccttgacagtttgtgatgctacaaaatggttcttctctagtctcatagctccattcccagccactatactacatgaggactggcacataatctttacaagtcctatacaattacagaagtagtctttttaatttttatttttttacatctggtctgtcttcattgctatttttaaggggctttgtattgtgactttctcacatttactacacaatttctttactaaactgaaattttgatttttgaaaggtaattcatctgcagtatatttatgaatgtaaattaccctgtgctgggcagagatgttcttcctgcctgtctatattgacaatttttatttcatatataaagtggctataaacatatttaagctaagttagacttcattgtaactgtatagacaaaaatgtcacaaaatatctgaaacacaaaaataagaaacagtaactcagtgcccttggtaaggacttaaaaaaaatataggtatcagatccaagccaaggatgagacactgtgagtaaaagagtctcttagattcaagtcttcacttgcgtgaggaagggcagtgcatataataagtttacataagtaatctgagaaaactgcatatgattccagctcatatggagctgaggtaggctcagtgagcttggtggggaggcttagactgattgcattgttgggtgtgtcctgagttagtctccgtttctcttttcccaacagtgattgtttcatttagacagtgggtcagctgaaggcaagtactatctatacagagaaacctcagagaagattgaattccctgctctggtcttccaagatttataagatcttggaggtgtctgtctctgggctctctattctccctccccagatattctggggatccaagtctcctcatgctgttcatttgaggcagcctagtatagggaaggagcattgtacttggattcagggtgacacatgggtggtattctcctattgaatgctgttgaaaaaaactaaatctcaaaattagaggacagtcacttcatattaaaaaactcaaagaaataagagcttcgtgttgaagacattgggcagatggtactcaattgtacttcactactgctctgctctagaagtgtgagcaagtggcctgaaatatcagtcttaatcttggctgggattttcttttcttagttggtcatatgtccatggtttcagggctcaagggttaggtctttatgcttttatgcctttcaggtagggacaaaaagggcagagatcttatagccttctggacatttttttgctggcttccagggatttttactctgatttgtagaaatggaaataatttattgaacttttcccccacctgcaactgcttactctctctaccctgaaacactctcactaattttttagaggtattatttggaaagttaccagataggccttggaagagatgaagaggcaaaaacagcttattgggaagccctaaagatgtgacttctgttctactgaagggatcttgggacctcctgtggaaagcactatatttggaggaaactgattaaaagtagatcaactaactcttccactcatactgtttagtctacacaaagtgcttctcaagtatatcccaaaatgcttcccttactttcatattttctgcctcccaggtacatgcatgttgaatgataacagggtatcagatggcaacacagagagtttgcagggaaggggcggagaaagggccttgacagacctttcattttgcagaagtggccatgcagcctgatgtggaactgagctggagtttgcagaaacattgtcctaactaggtggaaggcactttccctgttcatgatgttgttcatttgttatttggttccactgtacaaaattctgagtgtttcattgcccagcactgaaagggggatgaaagtgtccatcttaaagataaattggcaaattatgtcaaggtacactgaagaggtcttgtctttagtttgcttttaagtagcttaaatgaggtcaagggccatgcccagaattgtgttgaaatctggatttagcttggattaggtccttgatatttaacaggcttctaatgtctttcctccaaataatgaagtgtacagccaattcaaccattattccttgagccctctgccttgtgccccttcaccaaagaacctttgatgaatgaggcatagcagtaccttgctttgctatgccatttactctttaaaaacaatgaagaagcaaacaaaaaacaccaaaaatatagaaatacaagtatacaaggaagatgtgttatatatagactgatgccaagtaagactctgaattgcagacatcttccccctgcaaaataagtcacaacataaatatatatattttatatacatatgtatatataagatatatatatgtattttctgtaaatgttaagctgctcatattttgatgcattgcgcaatgttttcattaggtcatcctcttgtaagaatgtaacataaatataaatagatctggaaaactagggctataaaacaaacattgagattaacagttttccagtaacaggcagaagttaaccctgggtccatgccttggtaaagcctgtgcagtaagcctctctgagagccagattgaagctttaacccttagtgaacctgacctggaaagataaatctatgtctgcccaataattatgaattgtaactgctgagatcttccaggatggagttaaaataatccatgaaagatttctttaagaaatatttctctaacaaaactgcagataagaaagataaggagggatggctagttgggtctaattaacaatgaccaacatgtcactgatgtttgcgtagggccaattgaagcttatgggtcagctggatagaagggctctcagtttattccttctgatgggaaatcaagtcatggaagtggcatagtgaggagattggctggtgggactggtggtcaaaaagaaggggtgtgattgggctttcacagagagtaggatatcaatctaaaattaaattaagcactgtgtatcagtgatgggtagggtggaagggtgtttggcagtgctgttgttcaaaaatatggccaaggcttcttaaatacactgactgttggattcccttccctgcctccactccctcatctgctgaatccagtttcaaacacaggtgatttttagcaggagttgttgattaaaatgctgactctcagcaccttgacactccagatgaactttagaatatatatgtattttcatcataacgtgtttccctttaggttttttgttttgtcagtagtgggaaccttaaaaaggatatacatagagggagatcttcagccttttaaaaaaatccagttcttcacacttgtcccaaaaggcaataaaggactacctaaaagtgccatttcccacaagggcctgtggatatctaagaaaccagaacactggggagtaacagtgaatcctgggaaaagctgatgaaattgatattttcttttttccaaacagatcagaatgaaggatttcattgccgggaagaatgccggattcttggccactctgacaggtgctggatgccccggaaccccatgcccatccgttccaagtcccctgagcatgtgaggaacatcatcgcgctgtctattgaagctactgctgctgatgtcgaggcttatgacgactgcggccccaccaaacggactttcgcaacctttgggaaagatgtcagcgaccacccggctgaggagaggcctaccctgaaaggcaagaggactgtcgatgtgaccatctgcagccccaaggtcaacagcgttatccgggaggcaggcaatggctgtgaggcgattagccctgtcacctcccccctccacctcaagagctctctgcccaccaagccttccgtgtcttacaccattgccctggctcccccagcccgtgatctggagcagtatgtcaacaatgtcaacaatggccctactcgtccctctgaagctgagccccgtggagctgatagcgagaaagtcatgcatgaggtcagccccattctgaaggaaggtcgcaacaaagagtcccctggtgtgaagcgtctgaaggatatcgttctctaaaccagtctccaggaagaagagaaagaaaccacactggctagtgaagaagcaggagcttcttgttttaattgctcaccaatggttggttcttgagtggctatatttcagagcttttcctaaatgtattgtttataggtgattatcattctgtgacagtcccttgtttcaacaggcagcaggggtgttcagttggagcaaattagctttggcttgagttgttcatggggccttgatgttggggaaacagagacaaattcagttgtgaaaagtattatgtattaagtgtttgaatttatatatttttctatgtcaaaattataatataaattaccattgtttgtggaggattacatttaaaaaagcaaaaagtgaaaaaaaaaagctctggacacctttaataagctcgccactgttttttgtagtgtagacaagttaatggtcatttattgtgtactattcattgattcagtgatgtgaaattgagcccccaaaaggttgtttctgaagctcgagtacttcccaatgccgctactttgctgtggacacccctgctttaaaaacccttttgctagctgtgctattgttgtatttgatattgcaaattgctatgtgtgtggtgatggcaaaaggcttttaaaagttggtgttttctttttcttaaaaaaataataaaactacagacaaaaacaaagtgcaaacaactgagacagcaaatgaatgagcaacaccatgcatatagattgagtacttggagaatactcacgttttttaactcatgtagtgattgctcaccactttgcaaagtatttttcctgcctttcagtggtctgcccaggtccatgatagatcattgcagaaagtcatttttggataggctgctatctaatttgcagttgtcagaaatactgtgctgaaagttttatgacatccatcttttaaattttcaggccctgaacaggaaagttgctcctgaagttatgtttccaggcttagaaattccctctctccaatcatctaaaattgaagatgactgaatctattttaagatctaaattagcatctcttcagacacacacttcctgattcagtgtttcccaatcatgattagaattagactgcaaagcacgtcatgggctgggattgagaactccatgttgctctgtatcttaggcttatatacgtagggatagagtaagcagtacaaagtgtatattttggaaaagacaggtaacaggtaacagcatcgctaatccaattactgtgccttctaaacggagacactcagacacttgaactcatctttttatgactaatagttttttgattaaaaatgtgaacaagaaaatactaaaataaaaatcctttcgatttagccaactctttttgctgtaggctaggaatacaccctttttaaattaacacactgtagatcctttttttctgttttaacattcctctaactcccccatttatcttttgtctattaatattcactagccaacatagtatttttgcagcctaagagttcattatttaaaaataaactaaagaaatatgtcacctttgttctgccttggtcttaagagagttgtttctagagaaacaagttttatggttctgttttcatttgtttcattttttgaaattcaggaatacacagagagaaggcctagaggttagagcactagaatgcaaaagaggatttattttcttaagtttaggtagataagtcagctcttttgaatgttttacttatttttgcctgagttcctagctttacgcattactaggaatattttcttttacaggagggagaagggttttgagggagggggtgggtaaggcagtagggatggggttaggtaggggagaacatttctgaaaaagaacttataatgaagctacaaatccatccttatttcttattcagtgctgaatactacctcatgcaaaatattggtgtggctgcaaatttccctctgaagctgacacaattaaggatgaattaccataacatcttcatttttcctcatttcattgcctctcatacagttttctccctctgatttatttcattttggtagtggattttgaattaagtatttatttctctttgcaagtgactatttgattaacacattaaaaattttttaaaaatttcccctttaagttatgatggctgcctatagaatttagactgtttctcaccctgatccatcctgatattatgttattagctacgatttcaaggtcactttgaagtcagacttcacagttttctacaggtgtatttcttgctatgctcagtgggaaccagggagcagaaaagattgtggaaagtgggaacattaattgtcacgtggctgttgagccagagaggccactggctgccatgcctcttaccagccaagttttaaatggttagagtggcattggcattgattttgcttttctcttgggttttcttcatttcttttcataattcatcttcaagctatagatccatccttcttccctatccaaatactttgttctcagtgggcagtcagatttttttggcttccaaacctcactgagcatgttcagagaattcctctcattaaggaaatatttttccccacaattgtctgatgtatgagtcctctcagaagcacaagtgcatactaggaaggctttgtaaactggttttgtaggcaggctgtacctgcaaataggcattctgagcaaggatcctaaatttccctttggctcatgtcccccccgccccaccccaccttctcctttttggcatgtctggtgaaaagctacaaggttcacagggccaaatattctcccttttgttctctaaacatgttgcacacataaactcaagggagtgatttcggttcctaagtcctagggagttctattccatttattctgatgtcccttttaaggaggagttggtgttgaagtgtgacatgctttaatgataactgctttggcaattccccagacaggtatacttcttcatccaaaattgcacctaaggtgttcatttagacaaaattgttcgcttagtgatccactgatctctaatcagaaatatttttaaaaaatacaatttagatctctgaaaattggaaccactcaagagtatcatcttgatagtgttacttcagcatatgactgactgattttatgaagggagtttagctgacttttccctgtagccctatcatattaaaaacaaaaagtggtccacttgaagcagcaaggacaaagggcagtttagggagaggcagggtgaaggggatagctcgattgggcatccagagtggaaaaggattattattgtacataatagcagttctggctggaattccaatccactttctggggatcattttgatgttgaatgttcccccaaagcattctgacaagtttggtccacttggctctttaccccgggtaataagacccttattgactttgaaaaactggcataaatgagcttaagaaatccattgtatacagtcctagtgtttgccttcttggtaaaattacatttaaggatgtcatttcatgagtcaaattgtatctgctgacactgaagtgtattgagatgttgttctttagtttaagtatgtaacaaagtaatattcaaaggggatgtttgggggtggggctgggaccgggtggctttatattgataatgaaatattccagagcaaaacacattgtcctaatgaagttgttgcagctctcttcgttttcttgtgccgctggaattggcttgtgggtcacttgttgtgcaaaagtgaattaatttcaaataggaatcatattgcttttgtgaaacaaagaaaatttaccaccttgtctgatacatagattggaaggcgctcttggtaaagaataacccacaaacacctgatcttgattggaaagcattgtaggtcattagggaaaactgatgatgctgactgttgctccagctgtgttggcaattcaagatgaccttgttactaactgaaagttgctgtcaaccttagcaaacaaaccagctaacaccattacagcactggttaagtagatttttactggcactggctggcgttcagctgaggaaggctaggatacagactttaatgaccaagagccagactagctcgagctagaaatcagcaacaaatacctccttgtgctatttgaatgctaaggtattagttgcaataggcttacgccttcgctcctctagtgaggggaatgagcctgatgacactattactgtttacctgtcaaaccagggtggaaatttagagggatgcaagtacagtatgtctcattaagcagtctctgttgctgattatatgaagataaaattgttgtatatgctgatctgtatgttatgtacattttcacagtgattgaatcattgtaaaaagaaaaaagacaaaaaagaatcaccactgtctattttatgaagatgataaagcagctttattaaattattacagttatgtttcaaatggtgttatctgccacattgtttccttttatctggtggttctctgtttccccctttaaatgtgttttctctgcttcaaaaatttaatgcattttagtattaaaggctattatggaaaaagta

SEQ ID NO: 352 - DNA, 5576 bp, Homo sapiens
  source 1..5576: mol_type = genomic DNA; note = NC_000022.11:38957609-38963184 APOBEC3A [organism=Homo sapiens] [GeneID=200315] [chromosome=22]
gttggtgaagatcttaacaccacgccttgagcaagtcgcaagagcgggaggacacagaccaggaaccgagaagggacaagcacatggaagccagcccagcatccgggcccaggtatgggaagcccctccgagcacctctgcgcctcagcctcctctttgagcttttctgatgagcactcacctctcaccctcaaacccctggggcctctcttttcctcctgaccctctctctggacctggcctcttgctctaggttcccagttttggtcccagcgctggtctctcctccgatggtaccaattccaggtctccttccacctcccggggcaggtgcacagggagcctgaaaatcccaatagataatggtgctgtgccccagccagtgaagacggtcagagaggggattctcctcacttgtctttaaatgagcatctactatttcttgcaaatgttccatgtatctggacttggcctaagccctttttatgttcagtgtcatctcgttctccctaatattaagaaaagggggttgcttgtaggactgcttggctatgaggaagccttgtttcctttttttgagaacacagagcaagtgagtggtagagcccagattcatgcccaggtctactcgaaatggtggggaacattttgaaccttccttccttctttccttccttccttcctccttccttccttccttccttcaattctctctctctttctttcttctttctttctctctctctctttccttctttatttctttttcttctttctctctcttccctccctccttccttcccttctgtgcttccttcctttcttccaatatttccctttctctcttcctcccttccttcctttctctttctttctttccttctttctttctttttctttcattctttccttctttctttcttttacttccttcctccctccttccttcctctctttcttctttcctttccttcctttcttccttccttcctctctttctccctttctccctcccttcctttcttttttctttcttttctttctttcttctttccttctttctttcttttccttcctttcttttttctttctttctttccttctttttcttttccttccttcctccctccctcccttccttccttcctccatctctctttctctttctttctttctttctttctttctttccttccttctttctctttccttctttctttctttctttccttccttctttctctttccttctttctttctttcttttgtgctgcctcccaacagagatttttctaattctgattatgtcaggatgcatagagaggggctgggagaggtcttcaaggtggggctggtgtttccagcccaggagtcctgagctgccccatctcaattgcctgagaagcacatttgggagacctcagggcaccctaagggatgtggaaaatcctatgaattacccgaaaagaagtccctggcaggttcctctccccagtcatccccctcaggagtgtccctgtcccgatgctcggtgtggtaggagttaaccctgcaggcaggaggaagccccagagggtccatctccagcaggggctgtgggtgagcagagccaggacaggggtgcatggtgaggccacagaataagacccagctctaccccagggagaggagcagggtcctcctcggagggcctgagcacactgagctgaccctggggagaccctgacaaggcttagacaggccccagggctgcagtgatctcccagtgagccatagaaggggtcagagggggaggtttggaagtgtgctaagggatgtgcggagcagggggaaggagggtggggtgcaagggaggaagtgtggggagggaggaggaggcagggcagtccaggagggctcttcctcctctggtcttttccctggctgtccacagacacttgatggatccacacatattcacttccaactttaacaatggcattggaaggcataagacctacctgtgctacgaagtggagcgcctggacaatggcacctcggtcaagatggaccagcacaggggctttctacacaaccaggtgaccgacccagccatccgaatccgggcagggcccttccaatccagggacattcataggtagaaggttccggattgtacttgtggtttcctgcagtgtttgtcacttgtgcttcctgcagctgctgctgcttggccctggggttggggggagacttcggcttcagtgactatccatgcccaggtggggttgagtctgcccaatggcaaagtgcttcctgaggaccctcccaggatcccctcacagacacagctctcaccaggaacaattcagcaatgtgggatctgaggactcagggcctacctgacctcacaaggccaggatgccccagtgccctctcctgggcttcatcctgcacggagagagactgaggcaggagaggctgaccagggatcctgtcctgcccagggtggagcccacagcaaggccagaacaggtcccatgtcaggatgcagggatgtccagcatttggggaggagctgggccaggccaggctgaggggccctgagcccgggggactttcttccctggcccctacccagcacagcctctgtctggagagaccaggtaatgcttggctccggtgctggaaactgggaccttctctgggctctatgagctcaatgtgggcctcgctggatccacacacactgcttggaacatcctttcaagggtgccagtctccatcaccgcctaagcagtgggactcccccaggaacgacccacagccccttctcagcacaaaccatgtcatccactccaccctgcatcactgctgatggagtccctccctgtctttgtccccatcacaatcacagtccttgctgccctgctgtccccaacttgaccgattcctagtcttagtggaaaatccttttctctggagtttggagtaaataccatatttctataagtcaaaataatgacaattataccatgtcacagggaccttcccacgttggagtgagtcctgctggtcttctcttccccactacttttggtggaattcattttggcctaagtctatatcacatttgggctcagcacaggttgtggcacagaatagaagcttctagaattatgggccacagatgggatgggagtaggggagttgatgagtagagcaggtcaatctccccttgaaggaagcacactcactcagggccatcaggccaatgacctcggggctccgccggcccctcctccctgcccccatctctgtagcccctccctgcagggctgggtctggggtgagggtcctgaaggctctgaccttgggtacaaaattgatgggggctccaaatgctcagtaattagagaaaacacattttaatttaataattaatgcaatattttaaaacgcaaatttaatacaaatagatcatgatgaataaaagcaaagattttaataaagcctggcaggagagtgctgtcctgtgtatagtggagctggggcaaaataaaacctcattgctcctgatctgtttgtatttaaatgggcaacattttgcttatcttgggatttttgcataacatctgatatttttaatattgcatagaaaatcatgcatcctaataaccggggttttggtgacccctctaatttcgtgctggaggcccccgcctccccagccccacctggtccaggcgctccctccctgttcaccacacatcacctcacactctgtttccttttctaggctaagaatcttctctgtggcttttacggccgccatgcggagctgcgcttcttggacctggttccttctttgcagttggacccggcccagatctacagggtcacttggttcatctcctggagcccctgcttctcctggggctgtgccggggaagtgcgtgcgttccttcaggagaacacacacgtgagactgcgtatcttcgctgcccgcatctatgattacgaccccctatataaggaggcactgcaaatgctgcgggatgctggggcccaagtctccatcatgacctacgatggtaagaatggaaggttcaggtggggtggggtgggtgggggcaggagaggttcctgggaagaaaaggagaaaggccttggtctgctgcctgcagaaacgatggctggactctgggacctgactttggggtcgatgggaagagagaggccaggccaggagatgtgggcccagggagggcagggagagtggctggaagtggaagcagaacttggggctttctgaaagaatgagaactgggctggcccagattccaatgggaaggaactgcctgatgaaggagctaagtccctaggggagggagagggaaaggagggactgaaaccaggatgtgggaagtctgtcctgagagtcatgggccctaggtgccaccccgatcccacagcgggagcgtgacttatctcccctgtcccttttcagaatttaagcactgctgggacacctttgtggaccaccagggatgtcccttccagccctgggatggactagatgagcacagccaagccctgagtgggaggctgcgggccattctccaggtgagggcttcctccctctgcccggtgccccatcggcctccccctcctccccactcccctgggccttgccttcccctctgctcagagcctcctctgggttccctgctccccacagggcgcccagctccgtccctccctttccttctcacagcctccttctctttcccacctcccgcatccctccctcctctcccgtcattgtcactgtccccaggccacctccctgtgccctctttccactctctcacctcctgctccattcaacccccctgctcttccagaatcagggaaactgaaggatgggcctcagtctctaaggaaggcagagacctgggttgagcagcagaataaaagatcttcttccaagaaatgcaaacagaccgttcaccaccatctccagctgctcacagacgccagcaaagcagtatgctcccgatcaagtagatttttaaaaaatcagagtgggccgggcgcggtggctcacgcctgtaatcccagcactttggaggccaaggcgggtggatcacgaggtcaggagatcgagaccatcctggctaacacggtgaaaccctgtctctactaaaaatacaaaaaattagccaggcgtggtggcgggcgcctgtagtcccagctactctggaggctgaggcaggagagtagcgtgaacccgggaggcagagcttgcggtgagccgagattgcgctactgcactccagcctgggcgacagtaccagactccatctcaaaaaaaaaaaaaccagactgaattaattttaactgaaaatttctcttatgttccaagtacacaatagtaagattatgctcaatattctcagaataattttcaatgtattaatgaaatgaaatgataatttggcttcatatctagactaacacaaaattaagaatcttccataattgcttttgctcagtaactgtgtcatgaattgcaagagtttccacaaacacta

SEQ ID NO: 353 - DNA, 9800 bp, Homo sapiens
  source 1..9800: mol_type = genomic DNA; note = NC_000003.12:c196942528-196932729 NCBP2 [organism=Homo sapiens] [GeneID=22916] [chromosome=3]
gcattgtggtccgcttctctgcactatgtcgggtggcctcctgaaggcgctgcgcagcgactcctacgtggagctgagccagtaccgggaccagcacttccgggtgagggaggccgggccgcgagacgggaaggccctgggcaagaacgctgagaaacggtttgctcttgtctcattgtgtcgcctcccattcagctgaaatccgcaaacgccaagtggggccccggtgcctgctggcgaggcagggaatgggtgctggaagggcgcttggatatcactgaagccacttgctctggaagacggggaactggaggctcgcttatcccattcgctcgcagccgctccctgtaccccagccagtgccgagaggtttgagcggtggtggtggtggcggctcccgtttccacggttgtgcctccgcagacgactacgtagcaagggggaggggtgcccttctctctcccagagtaggcagaggcgccttcctgatgcagatgcggggctttttgctttgttttttaaatcggcgaagcagtgcccttcggcgattcgggccccttctctgggaggatggtgttacggaagctgtacgcggtgcgtgggagacacaagtggagtcctcactccgccctcggggaagcttcggagtggggaggtggacccgccaagctcggcactttgagggtgttcggatgtaaagatcggagaattgctggatttcagaagagggaaatttttagtccggactatatcacagtatattttgtggaaaaaggggaggcagcagatattcaaagtagacttttcagtatcagcggaggtagggatggaatacggttgggggttggcggggcgggactcattaacccaattatttagtaaacgtttatcgagtgctgtcgccaaatccttgtgctaaaccctagagggagagggaagacagtttctgcgctctgcgagctcataatcccctgtagtgaggattcagaaaagggaaaaatccccttgtgactgggaaaggaaggggcgcatatagcagagggtaagtgtggagaatgtgtgaaatgtgttactagagtagggaaagggaaattttgtttgacgctaaattagggaagctcttagatttatttagtcaaggctgggaacggtggctcacgcctgtaatcccagcactttgggaggctgaggcgggtggatcacgaggttaggagttcaagactagcctggccaagatggtgaaaccccgtcttactaaaaatacaaaaattaggcgggcgtggtggcaggcgcttgtaatcccagctattcgggaggctgaggcaggagaatcgcttgaaccggggaggtggaggttgctgtgagatcgcgccactgcactccagcctgggcaacagagcgatattccttctcaaaaaaaaaaaatttattcagttaatgtattttattttttgagacagagtctcgctttattgcctaggctgaagtgcagtggcgcaatcacggctcacgcagcctcaacctcctgagcctaagtgatcctacccacctcagcctcctgagaagctgggaccacaggctcgcgccaccacatccagctaattttttgtagagacagggtctccctgtgttgctcaggccagtctcgaactctgggactcaagcgatccacctgcctggggcttcccaaagtgctgggatgcctaagtgccaggcatgatttgcacttctaccacttttagttactactttagacagttccacatcctgaccattttgaacttaaagcatcctgtgagatgaaaactggaaccttctgactttgtctattattcatctcctcagtctaaacctgtagctttttttagatgctaatgccatactgtcatgtggaatttctagcattctgtgaatggaatccatattaatatactttaagcacttacaccacagttatcttaaactgtaggctatttatttggatcttacttacatgtgtgagaaaagtagaaaaagaagatgcctcctttccatgttcacaaatcagtaacagcagtaaaatgaaaggaatttactttctctaatgtctcactccaaagttccgaaaacctctttttaacatacaatgactattgtcctgtggactttttttttttgagatagagtttcactcttgttgtccaggctcaagtgcagtggtgcaatctcagctccctgcaacctccacctcccaggttcaagcgattctcctgcttcagcctcccgagtagctgggattacaggcgcccgctgctaccatgcccagctaatttttgtatttttagtagagacagggtttcattcactatgttagccaggctggtctcaaactcttgacctcaggcgatccactcgcctcagcctcccaaagtgctgggattacaggcatgagccaccgcgcctgaccccgatgagccattttggacccagggctttgtctgtcaggtgtgttggatgaagcccagttatatgcttaagtctctggcttcatcctgtcatcccaatttggaagcccattaagaaagtgagctctgttttgtttttagtgatcactacattttcccctaaactcagagaaagatctatgagcacgtaaagcatcaaggttgtggctttcaacagtctctagggggttattaaagaggaactctctctctctctgaaaacccacttatttttcactacgaaggataaaagggccctttgtcatatattgggtcaaggtccagagtctacacttgggtttaaaggatgcactgctgaggatatggtgtgtgcagggaaaagggaagccgcttgcgtggcagtcgggcgtagaagtgactttgttgtatgtggtataacttttgagccctgtctctactaagagtctggacttcgcataagtgcttcacagaaggtcgacatccccctttttgggcaagggatttctggtaggctgggatgagagaagttgatttccaaaccagaattaatgaatgtctctaccgtacttagaaatactatttaagcaaggctctgaagttgcttaacttttgtctctatttgaaattctagggtgacaatgaagaacaagaaaaattactgaagaaaagctgtacgttatatgttggaaatctttctttttacacaactgaagaacaaatctatgaactcttcagcaaaagtggtgacataaagaaaatcattatgggtctggataaaatgaagaaaacagcatgtggattctgttttgtggagtatccttcccatggatctaatgtagctgctgaaccagggtagagctgagagtggtagctcataagcgtccctgcactcgtccctacgttttccttcatctccctcctactttccacccagtgtgtctctgcccttatactgtaaagctgatactatttatattctcttctgaaatccatgctttatggttctttaacaaaaagtttttcaagaatgtttgcccttcacgtaaaaaaaaaaaaattccaaagaatgtagtgaaaatataaaaatctcgtactgttctaaacccctaatgccctttgccagaggcagtcagttaccagtttcttgggcgtctttcaagaagtaaccctgtgggtgtgcggtagtgtatttcatgtgctgtttttaaaatcatttttttattttttattgttccatttcagcatatgtaggtctttttttaaaatagctgtacagctgggcatggtggctggtgtttgtagtgccagctgctcaggaagctgaggcaggaggatcagttgagcccaagatttcaaggctgcactgagttgtgactgtgttccagcgggggtgacgggttaagaccccatctttaaagaaaaaaacttttaagtaaatagctgtatagtatttcattatatagatgtatataacctgactgtataggtacaaaccaaaactatttactttgatcatttaattcccttactcagactcttttaagtattggacctcttggatttatcctatgttctttttactgtatgttttggtcattcaatttaatattctgagaaattttgcaggcccaatttaatatatcttttgaattttttcctgtgccctgaattatgtttgtttcggttgaaatttttccttaagtgtctggtgatccctggatttctgctcataattaaggaaaagaatgctgactcactggacccaggcagggcttctctcccagattgcaggcttgcctcggggatacacaggtttcccaaatgctagaatgaaaagagattttattttggcttgctaacatcaaagatactagtttctccagatggtttattcagaacactgttgtcttatttttatttgtctgagattaaatgtcttcccctttaattaaagggaggtctctgatgaagtaggtttgggaactgctaccttggtgacagcttgagtctttcctttagtgaagtgcagcacaattccacgtgcacggtgaccttctcttgattagggtgccttggaatgtacagaacctaacttgaatatacagcactggtttcttggataagaagtgtacagtgatctaaacttgcaaaccaaaatacagagatgatgggaccaaaaattatcaacaggaatgtccaagaaatatgatcagtgtagccatggatacgtgtcatatttgactctatgtgcttccaaaccaatcgcaaacaggcctgggcaagctgaattactgtctttgaactccatctggttggattagctcttgtactttttaacaactcagcttcatttacatgttgttcccctatttccagaaatgtttggaaaaatgctagtgttccttaatacttaagatattactcacgcgcagatgcggaaaacgccatgcggtacataaatgggacgcgtctggatgaccgaatcattcgcacagactgggacgcaggctttaaggagggcaggcaatacggccgtgggcgatctgggggccaggtatgcaagaagggtctctgggctcagccattgcctgggattccagtcacaatgacaggtgttttggcaatttgtatttactcttttgtaaataactttgtgtctataaccttggcttgaagtggatctgaaaaccacccaacggtttgggtgaattttttttttaaaccgtgaaatggtatgttctgtacgtttctaacaagcaaccattcttgaacttctgctagggctaggtatcttccacctgcaggaacatctaaaatgaaagcaaaacgcactgaagtgagctgaagtgcatatgtcctgcttgaaatgttcacattgtggcatctgaacaggtttcactgtttgtctaacatgtttgtgggaggcatatttgttacaccattcttttccatactgtaactctggattctttccattaaaggttcgggatgagtatcggcaggactacgatgctgggagaggaggctatggaaaactggcacagaaccagtgagtggtgagagctctgtcagtgacaaacactcctttggcctgttgaatttgctgaagaacatcacctaaagtctgcacacgagcccatttttaccaagatttgatcagtgtctttactgagctggaagcctctgaaagttattaaaggacagaatccaaaagaatgcctttaattcttgtctgagaatcttggccatgtgtcagattatcagaacaattttgttaccaggtcagaaattgtgttctttgacaacagattggatctgtaatgttgattagtctttagccataaccactacacttttagaaagacagaaaaatgtaagaatttgtttttaccataatgagtcttaagtaggttcatgatctacattggggcctgggattatttttttaattttaagtttgcatgagatagcctaataaatggaggtggggccaggcatggtggctcacacgtgtaatcccaacactttgggaggctgaggaggaaggatagcttgaggccaggagtttgagactagactgggcaacatagcaagaccccgtctctacaaagcacaacgaaaaacaacaaatggagttgtgctatgttgtattgctttgcacaaaattaggaacaggtgtttgacaattgaatttgttttctgtgaattctaacctctaaaggcatgcttagaggtcaaggaccttcctgtgtagttggtgcaaaagcaatctccacaggacagcactgcttccatgcttcatacatcaggaaatgaggccagaacttgagtatttactaacacgtttttcaaaagatgtcagtgttatacctaaagctaaaaaaaagcaagggtttgtcatagagggaacctctaaataatttcaggggtaggggagatgttgtcaataggaaatgggataaaatatcaagagacaatgaaaacactgccttgacatgaggaccagcaagtttattcttttcattttcagtgatgttgggaatggactgggttttaaaagggagcttgaagagggaatgtttgacagtcacagaaggttcctgcagcagatgcctcttttagccatttctcatttttttcctcaaattttacctactgaggctcaagccttcacagtgagctgatggtctctacagggaggggagtctagggaatttatttggtatttgtaaggcaagaggtgatttctctctaatatatctgagttattgctcatttaaaactgttaagtccagtataattttccctgatatgaaaaaatgtgcatttttttcacttagcaacaaagtaccttctaatttccaatagtccgtgaaagttggggctgaagtacctaagtgtgaatgtctctcccgttaaactgagtgtagaaatctgaatttttaaaagagctgtaactagttgtaagtgcttaggaagaaactttgcaaacatttaatgaggatacactgttcatttttaaaattccttcacactgtaatttaatgtgttttatattcttttgtagtaaaacaacataactcagatttctacaggagacagtggttttattcggattgtcttctgtaataggtttcaataaagctggatgaacttatcgttgttgctgcctgtttcctggcctataaagagggttgtgttctggaattcctgtactctggatacacatgaatgagttccagggggattctatgaatagtgtggacaattcgcgtgtccattttgattgactgacagttggaaataactattgctgcgtgtgaagagagcgcacagattttcttgtgaaagtgatcaaataggcaccaagcaacctctactgatggaagaataggttagttttccaaaaaacatgctctggatgattgcaagggaagggaaattgtgggtggattaagaacatcttatgtttcctgggctagagaacactaaatgtgagtctctttactgcaccattctttcctatttctcatggatagcatctgacctgtttctcactttaatcggagaaaagtgaaaattcaaacgtacagatgaaggcatcactattaatacatgttagtgaagtgtgagaattaaacattcagtttctcagtcaagctaagatgaagatatagaacatttccgttgtagaaaattcgagtgatggtgctgctgctctgagggtgagctggttagggcctgcactgctcactgttctgaaatgacctctgtcgtgactggaatgtcacaagaaaaaaattactcctcgccaaacagtacatgttactcaagacgagagaacacaagtttataaaggcatttagtttatttttcaaaaaaatactttgctagaagggttgagtactgtaattttacatgatcataatctctaaataaattctttttctgaccaacaggtaccagttaagtgaacagctcgtctaggtctgcttttgtaacacccaaatacaattagcacttctctgctggtattccctgggccgtcttaattatctagaggccaggaggcaaagcctagcacgtaacaaagtatgtgctttgtaactgctgattaattcagtttcttaactaggcagagcaggtcatcagtgtatctaattcacactattaatacactgtcttgctgaagagtctgacctgcccagaaccccgttatggctagcccagggaagcagtaaactgcaaagcagagaaaaggggcagctaagatgaggctagtgctggctgagtcccagttaggtctgttactgttctgttccaactataaatccaggatgactgttactcagattcagtgctatgtagaaaatagaatgcacagccaaaaacataatttggggatgactggcagcacctttttttccctttcttaagaggctaactgaaagttgattaggattcttgagagaacgtaactaaaagttgaatcaaatctatattcactgctatagatttaataaaaggaaagaccactgtaaagatgcaactacaacctgatgcgtctgctgaggagaggactgggcagcttgttgaaggctcgtcaaaagtagcgcttagttatcacaaggcctgcactcaacctcaaaagcgtaaggtttaggccaggcacggtagctcatgcctgtaatcccagcactttgtgaggcagaggcgggtggatcacctgaggtcaggagttccgagaccagcctgaccaacatggcaaaaccctgtctctactaaaaatacaaaaattagctgggagtggtggcgcacacctgtagtcccagctattggggaagctgaggcaggagaatcacttgaacctgggaggcaggggttgcagtgagccgagatcacatcactgcactccagcctgggcaacagagcaagactccgtctcaaaaaaaaaaagcataaggtctgcctacctcatgggcacccaaacagttcagtgccaaactagtaccagtaaagccatgcctgcctctttcaccaacagtccagagtatatttcaaaaatatctttattaaccaaggaagcaattactgcaaacatcaggacaaaggacattctaatctaggacttgagttaaatagaggtttacacctaatcacaagaagagagggaaagcaattacgtgtgctgaaaccaagtttcatcaatgacaaatattttaaaatgacttttaaaatacttaacattggccaggcacggtggctcccgcctgtaatcccagcactttgggaggcccaggcgggcagatcacttgaggtcaggagttcaagaccagcctggccaacatggtgaaatcctgtctctactaaaagtacaaaaatcggtggggcgtggtggcacacacctgtaatcccagctacttgggaggctgaggcaggagaatcgcttgaacctgggaggtggaggttgcagtgaggcaagattgcgccattgcactccagcctgagggacagtgagactctgactcaaaaaaaaaaaaaaacaaaaaacccaaactcaacatttagtctaagccacactgggcagcacacctcaaggtgccctatgaagcatgagactggaagtggaagagtcactggatttgggcagctctctctcggcgttgattttcttacaggaacaattctgtctcttctgcatgccaggttctgtcactgaggaactgaaacacttcctcactctgaagtacaagacattttgaactgacagcccagtgactggctactttggtataccacacccccacaaaaaaaaaaaaaaaaaaaaaaaaaaaa

SEQ ID NO: 354 - DNA, 39701 bp, Homo sapiens
  source 1..39701: mol_type = genomic DNA; note = NC_000001.11:203127705-203167405 ADORA1 [organism=Homo sapiens] [GeneID=134] [chromosome=1]
ggtgtgcggagcccgattgtcactcagctcctgcgccgggggcgacagagccgcaggcgcccgagtcgagtcccagccagctaccatccctctggagcttaccggccggccttggcttccccaggaatccctggagctagcggctgctgaaggcgtcgaggtgtgggggcacttggacagaacagtcaggcagccgggagctctgccagctttggtgaccttgggtaagtctgagtctcggttcacccctggggctccccaatgggggtgcaggagagggttgaaagaagagaccggaatgcccccttggggcaggccatgggcaaggttccccgacagagctggaacgggaccagaggactgctaagatccaggcaccagacgggtctcaagtgggtgggcgcagggcaggtgcgggcacgctggggaatagggagaaacgccccagccttgtcctgggctccgtccccagacccacgtctgccaccccagtcccaggtgcgaaacaggggcgctacctctttaaaagcgtccggggctgagtctctgccgtaccatgtgattgcttgaaaggccgggctgggagcgctgcggcgggagccggaggactatgagctgccgcgcgttgtccagagcccagcccagccctaccgcgcgcggcccggagctctgttccctggaactttgggcactgcctctgggacccctgccggccagcaggcaggatggtgagctccctgcatcctgttctgtgcacaggggtgggcagagccagtcatgggagacccctctgtgcgtgtgtctgtgtgtgcgcgcgcgctgggagctgcctcacacctgataaaaaagccagtggaggagtgagcgctgctattttaagttgctgaatggaacctctgggaatgataaagggaagggacaaagattaggcagagaagggtccgggtgcccctccagcctgggtaggagctgcatgtgacaagtgggacacatcacagggtacctggagttccagggcagcctgagctccctgcccctcccagacgggtctccccatcccaggcttccctgaccacacaggtgcttgcctcgtgccccttggtgcccgtctgctgatgtgcccagcctgtgcccgccatgccgccctccatctcagctttccaggccgcctacatcggcatcgaggtgctcatcgccctggtctctgtgcccgggaacgtgctggtgatctgggcggtgaaggtgaaccaggcgctgcgggatgccaccttctgcttcatcgtgtcgctggcggtggctgatgtggccgtgggtgccctggtcatccccctcgccatcctcatcaacattgggccacagacctacttccacacctgcctcatggttgcctgtccggtcctcatcctcacccagagctccatcctggccctgctggcaattgctgtggaccgctacctccgggtcaagatccctctccggtgagtccacagcgccgaaggtactcgcagcaccacatgatggctggcttgagggccatctagaaaggaaaaaaggtagagcataagaccccaagtaagccagatgttctttgggccatcgtgctccagtcctcactctgcctttccgtgctccgctctgcagggccagagaaacaggagggggatgggtggctggaggactgtactgtgaacttaccagtgcccatgacctcagagctgaagctcttgcagccagggaacctgaggctgcctgtcaggcctggggtggaggtgggagatttggaagagccactaagatggggtcacagtgagtgctgggtaggaatgagctgagctctgccagtcccagggaagaggaagaggaagaggcagagaagagagttagggtggggtgggaacatactgagggtggcacaacaggggcaggagtgctgcttctccagccagaccacggcaggcttcccaaaggcacgctttggctctctcattcaccaggtatctctgtgctagccagctgttccttccagggctttccagctgaacccaacagtctgattacctttgcctcactcccacttatgggacctctgttacagacaggaggaaggaaaaatgctggtgcctacttctcatattgctgttctgttgcaaaaccacctctttgctggtcacagtagaggtgcttgtgctgctcccaggcagcactgggatgggtggcctgctggtgccgtcctcagtgtgggtgtccagcccatgttggagctccctgccaggccacaatctcatcaccaggcagtgccttgggccaccaagtgccagcgagtgcctgggcatattgccagggactggccctgctgggacgctcttgtgaggcatgcttgccccctctttgaattcttgcccccagtagattccttttctcctggggagctctggccatctccagcacctgccacccccggcatagcttctctgggatgtagggcctctgacctcacttggccccttgcccgggcaggcctagggacccatgtttctccctttgtgttacatttgtgcacatttaacttttcaaagcctttcttacatgcatgattttttcctgttatcatcacgccgctgtaagggaggtggagcaggagcttttaaagggggaaactaagactcagagggtctccttgaagctcactcagaagtgtgatctaattatctgccttccttcctgattccccatgcccagtggcttgatgccagtctctctgccctgtctacctccctccaccctccaggttttccagggaaggtggggtgaataagggaacacagccagaagccccataggctcatccactgaggggcccacatgctgccattagtcccaggttgctgctgggctgcacatataaagctggtctcagtgcattagaagagcggggcctctgagcctggccattataacgaagtgttgccacatttggaaactcatgcagatgtccagctgtaggaaggctgctggagaaattctgtctgctgagtgagtgttaaggtgagccaaaggtcccgtcttgctgtgacagaatgcaccctacttgccctgtggggctgggatggctgcactggtgggaacagcagacttattccttcaggaggcagctgctgtggctttggagctggggtcctggggagctgtcctttgagggtggaggcagggacctgcacagaggctgccatgggcctgagttcaaatccttgctgggaatttctagctgtgcaaaagtcacttacctaaccgctttaagctttaatgtccttatgtataaaagggaacattaataatagtgcctactccctagggttattggaataatttaatgaactcatatatgcgaagcacttgtattaatattatgcctcatatatgcaagccatagggaggtcttatttgtagttttattgtcactattaacatatggctcaagtgtggctggataggtgagccctactcctgccactcacgctcttaggtgtcattcggtgtcaacacatacacacgaagaaacacgcacacaaacacatacgcaacacatctcccaggaggtgtctaagtactgtgaagttatatctatacatgtttctactcctctggtgcagtgttggtgcctcaaggcagcatccacatcttatctatttctgcaaattcttcagaatgcccagctcagtgtctggcacatcacagaccctcagtaaacgttgattgaattggccaggtttacggaacacacacagttgagcctcaagcctatcttccagaagtctaacctctcactttcttgctgtgggctagacctgtccccacttctgattcagggccatgaccacagatgcccccactggctcagcgtggctccttgacagccacacaccagcagtgcctgggagtgtcctgccccatggagaggagcctttctcctgagttagggaaaggctgctggggcctcacttctcaagcagggatcctggctgaggtgttgggccattctgggctcctgcgtggcactgcccaggtcccttccaggaggaacagcatgctttgctcccctctacgtggctggagtcagcaggctgctgggtctacgaaactcctcttggccagaggtccccaggcaccaggcttgctgccctgacatgccagtcaaaggtagatgtggccctgggcacagagagtcgtactgaccgagcactggtgaggcgtgtctggggcacccggatacaggtgtctgctggctatcaccaagtggggcatggtttggtcagtcaaccacaaattttctttctttctacttggcagaaaaccaagagagaaaagagattcacaccatataatatgatccagttacaaaattttttctttttaagctcaaattgttgattcatcagtaacctgtggtcatttgcatataatttgcacgctatttgcatagcacctccccatgcttggtaattgaagccctattcccctcagctcctggttctagggaatctctattatttgtcccttaacccctcacccagagctttcttggtggcaatttggtgcctactcccgagggctagttgtagggaagtgtgccaacagagggctccctgaccaaacctctctgtgggaaggagaccctagcaagggggctgtccatggccagctgggttggagtggagtgagggatggtgggtgtttgcgagtcaggcagacctgagtttgaaccttgctctgttactaattagctatgcaacctttgataagttattcagcctctctgagcctttccccttcaccatctgttaaatgaaggggttggaggtggggcatggtggctcatgcctgtaatcccagcacattgggaggctgagatgggtgtatcccttgagaccaggagttcgagatcagcctggacaacatggtgaaaccccatcactactaaaaataccaaaaacaaatagctgggcgtggtggcacatgcctgtcatcccagctacttgggaggctgagacaggagaatcacttggacttgggaggcgtatattgcagtgagccgagattgcgccactacactctagcctgggcaacagagcaagactctgtctcaatataaataaataaataaaaagaaagaaatgaaggggttggatttgaggtctctgaggtacctttcagctctaattctgtggttcttccttatcctgactcctgccagtgctgtgttgggatcccgggagggttttgttgtgttgtgtgttttagctcctagtgagtgtatgctaggaacaatgctatgtttttaatatattttatctcattcaatgttcatagtctcactagtagagcttattgttacccccattgtatagacaattctttttttttttttttgagatggagtctcattctgtcgcccaggctggagtgcagtggcacaatctcagctcactgcaacctccacctcccaggttcaagcgattctcctgcctcagcctcctgagtagctagaattacaggtgcatgccaccatgcccagctcattttttgtatttttagtagagatggggtttcaccatgttggccaggctggtctcgaatttttgacctcaggtgagccacccgccttggcttcccaaagtgctgggattacaggcgtgagccacctcgcctggcctctctatagacaattctttagctaaattgagggctgaggcttggggagtttcagtaacttgcccaaacagcttgtcaggggcagaagcaggatttgactctaggcctaacagatgcctttaaccagtaagcccatgtgtatcttgcgtcagcccaagaagctgtaggatttttggaggagtttctatgaagttgtcagtagggtgatttttctcctctgatctttgccaatggcctctgcactctgctcagtccccgcccagcatcttcccctccaccttcactccagtgggcagttgagcccttggcagttcctgcctctgtccatagcttgaagcctgccccactgggctgctgacccggggaaccacagcaaggagtggtggaggagctcggcgtgctgagccagagtggggaaagaaatctggtaaattagggcacgtttgcgtttaggcatcaatttagctgtccccaccctggctagcctgggcttttcttgacaaccctgaaatgccttgtgtgccgtcatgcccccgcaggtgactgtctgtggcttctgggtcccagaacagttgctctcaggtcatgccttctgctttcagagaggtaggccgtcttcagatcctgtatctaaggatggattagtcataggcctggagtgtctaagagggaagaggagttggaggaagccctgaagctcaaactctcacacttgcggactgaggaggaaactgagattggagagaggaggagcttacgcaagattacttggctgggagttctttcctcctcccatctggatgcttgctcccccgcctctgatgtaaaaagcttgagcagaagagctctttgcagtcacccgcccctcaaggaacagaaaaggaaagtatgcagcctcagtgggtgaagtcagcagatcagtggcaggcttagaggggaatgaggcggagggaagttgctttgtgattgagaagataatttctctgaattagggatagccttcaggtgtgttaggccaagcagcttgctgggccaagggagaacatggcctttaattgaagaggcatctggactcctttcaagtgtgaaagcttcccccagctggcatcgggtggcttcccggaagtttctgagtgcttgaggggcaacctgccgaggtgtcagctctgcgtggaagccggagaatggccaggatgccttttacccagaggcagatctgtaggggccgcaccctgacatttgctatttatttccaagcataaaagcaatccatgttgattgtgaaaaatggaagaaagaataaagatggtaaaatcaccagtaattctaccacctacagagaactaccgttaacattttggtgttccagaaaatttttccacacacacacatatatatagatatattatttttacatattgagaacatctatatatacatggttttatatcctattttattcacttaacattataagcatttccctgtgtcaactaaaatgattttgtaaggatttttatggcggtataatattggattgtattattactcatcttttgggtctcagctaaaatgggctctccttaggggggccttccctgagccccaccccacctggaccagtttcctctggtagacactcaagttggatctccttctccttccaagtccaccactcatcacctgggtagctttctagtcaatgtcgctctttctgggcttggtaagttcccaaaggccagggacacatctgcttacatacccccatttccccatgcctggcacagagcaggcatgccggaaaaatttttgaataaatgaatatttgaatatcatattttatttatgcattcttatatcactggctacttcaattgtttctgattatttattgttatgaaaaatgctttactgtgtaacaaacctgcacatgtaccccttaatctattaaaataaaagttgaggctgggcgcggtggctcatgcctgtaatcccaacactttgggagcccgaggcaggcagatcatttgaggtcaggagttcaagaccatcttggccagcatggtgaaatgcgtctctactaaaaatacaaaaattagatgggcatggtggtgcacgactgtaatcccagctacttgagaggctgaggcaggagaattgcatgaatccaagaggcagatgttgcagtgagctgagatcatgccactgcactccagcctgggcaacagagtgagactttgtctcaaaaaaaaaaaaaaaagttgaaattataaaatcaaacaaaaaaacactttaatgattcacaatgttcatagggtcagagccaagtcagaacctgggctgtgtcacccagtaaatagtgtaggtgctatctagaaagattgccttgtgaggttaaatatttcccaagtccctttactccaactctcccttctccctccccaattttacccacactgcaaatcccccgggggcatttggcattctttagcccacttccccttctgggctgggttgggcaggactgtatgggccccaagtctagtccttattgcctggtctctttcctgaaggcctcggcatcctgagggtgaggaagcagtgtccctgggagaggacttggggtgaggcacatcttggttggcctcattcggcaggtggggacagacacatagagcagagaggaaggaagtggagagacacggctccttgggcggcatgaatcactcctttaacctcagccttcttaattcaagcccagagggaactatcagctgccgcagtccaaagaaaagcctggcaggcaggtggtcgtggggataaggagaagaaggagaggcagatgggtgggtcttggcatacacgtcctcttagaaatactggtttgaaggtgggcagggagatgggggcagctggcaaggggcttccctgaccccaagggagaggacatgggggtaccttctcctgccttgctccttaccttggaattttattccccagcagaactgcagagaggtgtggggctgaggggctggcaacatccatttatctattttataagtgtgctttgagcacctgctatatgtcaggcacttggccaggcctggggatacacagatgggcaggctgatctggtctctacctctgtctgacagctcagagtctctgctgagatgatggattcccacagaccaaggtggccaaggagaaactctcaccccacctgtggtgggagtggggatggcaggagactggcagctgatgccttgcagagctgggctgggcagctggatcccactccacactcactccatgcagctcaggttgtgtaggaaaggctctttgaacttaccttcttgcctcttgcttcccctttgagagagaagggcagctgatttgtccctacaccgggccctggtacagatagacctactcattcattaattcattcatttgttcatttattcaacaaatacttattgagtgctcatatgagccagggtctgttgggatactttcattaataaaacagagatcctcatggagactgaattctaatgaattggaaatcagatgctagataataaatgcaatacctaaatcatgtagagtgttggaaggtagaatgtgctattgaaaaaagaaaaagggggcagggtaaatgggattggaaatgccccagcccagaatggggctgggagaaagggttgcaactttaaatagggtggtccgtgaggctttactgagaaggtgccatttgaccaaaaccctggaggtgagggaacacaccatgcagatatagggagggcatgccatgcaggggaaagaactagaacagaggccctagcataggaatgtacctgaagggtttagggactagcaaagaggcctgtggggctgagatggagagataaagggagagagtggtcagagataatgggtcactggcccaggtacagcatggaggccactggaaagacaatggcttttactctgagggaaatggtgagccattgcaggatttagagcagagatgtgacatgatctgacttaggctttaaaggatcactctcgttgccgtgttgagaatgtgctttagggacaagggtgcaaacgggagtagttaggtgctattgcagtgattcaggtaagggaagacggaggtggctctaatctgaacaatagcagaggaggtggtgagaagtggttaattctggatatgcatttaaaatttttaacttttaatttactttgtatcaaagtaaaaattttatccagtaaagtgcataaacctcaagtactcagctctataaaattttgcatatgtatatacctatataccactaccccgatcaatatttaggacacttccagcattgtatggggctccctcccagtcagtaccctccaaaaggcaacctctattttgatctttatccttatagattgattttggttgttcttgaacttttatatgtggagtcaagcagtttgcacccttttatgtctggcttctgaagctcaaaattcttgccaagattcatccctgttactgaatgggacttttcccctcattgctgttagaattcaattgtatgaatgtaccatgatttgtttaaattcatgatgtattttgaaaaaaagagccaaagaatttgcttatgggttggatgtgggaattttcctatagattggatgtgagaaagaagaatcaatatgaccagacttttacttctaagcaactgggaggatgcagttggcatcatctaaggtgggaaaggctgcaggtggtggaaggaagaaaatgagtttggatttagacatgctgactttggcgtgtctaacagacatctcagtggaatgttgagcaggtggttggatatacaagaatgagaggcctgggcgggtggttgtaaatgtgagagctatggcatgtagatgggtttaaatccatgaggctggatgagatccccaagagagacagtgcagatacagaagagaggaagaccaagaaccgagcattgagaaagtgggaaaagaggaggcaccagcaaaggagactgaaggagaactccagacataggaagaaaactcagacccagtgtggtacctggaagccaagtgtagacagtctaccaaggagggtggacaaatgggtgaagtgagataaggactgagaattaccagcggattttgcaaggccattggtgaccttgacaagggcaatgtcaaaggagtgatgggggcaacgcctgaatggagaaagctcaagagaaaagaggactgggattgaaggcaggtggtatcgagtactcttgaggaattttgttgcaaagagagcaaaggaatggggcagtagctgtcaggggaagtggaaacgagctgtcttactctgggattttatttatttatttatttactttgagacagagtctcactctgtcacccaggctggagtgtagtggcatgatctcggctcactgcagcctccgcctcccgggttcaagtgattctcctgcctcagcctcccaagtagctggaatcataggtgcatgccaccatgcccggctaatatttgtatttttagtagagacagggtttcaccaagttggccagcctggtctcaaactcctgacctccagtgatctgcccgcctcggcctcccaaactgctgggattacaggcgtgagccaccgtgcctggcccactgtgttgtttttaagatagaagggaggttagtgcatttgtgtgctgacagaaatgatccagcagagaataaaacactagtgatgaaataaaggagagaatttctaaagtgatgtcctggtttaggctagtgggacatacgtggagagacaggctttagacgggatcctggaggctcttctgtggcaacatgcggcatctgtgggcgcagatgctggtaggtgaagctctctcctgattcttcccattttcgtagtgaattgggaagcaaggtcaccagctgagagtgaggatgcagtaagaggtggtggagagagcagcaagcgtgaaataattctctaggaagtgggagagtgactaggctcaggaagtctagtataattgggggcagcatgaagggccccccttaagtttgcagtgatgaatttgaagtgcaactcagcagtgtggttgtgtgtttctcaccagccatgttcagctgcatgggcacaggcatggaagaggcagataatttattccttcattaactcagaatggcagattcatgatgagattaaggaccttaccacgggcaagaagggggctcgggtctctgccctcatggaacttataggctagcagggagcgagagcccatggacatgccagcaagcaggtggctttgactgcaatttgtgaactcaaagggagccgtgctggtattctctggggcaggcccttgttggtttctccaaaaccccacgtcgatgtccagagagacccacaagggcttcagtaaggccttggaggccttgtggttcatggtcaagagtttggatttttttctaagtgtgctatgaagcctctgagtggtttaagcagggaatcacataattcagattacattttaaaaaggtcaaaagtccttgagaaaatattagcaaatcaaatccggtgatataaaaaggataatatatcaccacccgaaagggttcattccatctaggcaagggtggtttaacatttgaaaaaaatcaatcagtgtaattcatcacaccaacataagagggtcactctgcctgctctgtggaggatgggttggagtggggttacagaggatgtagggaggctagttaggattggggagcagcaggcggggcttgaggcaggcagggagtggaggaggctgtggagatggacagaactggaaagatttcaggcatgttagagttggaaccaactggaaataggttgaggtgcaacgtgggagaaggaatccaatgtgacgatccgggcttacggcttaagccactgggtggatggtgatgctgtttctggggatggggaagggtggggaggaagaagaaattggaggacgattcagatcctattaggtatccaaatggaagcactgtgatggcagggtcgctggtgtcttctctcttaccactccccagctctcctcccctggtgtggtcaggaggaggggctctctcttacctcacacagcctcatagaagggtctcttaaacacccagcaatccagacattcccaggtgccttcagccactccagctgctctctttccaccttacttctcaggaagccattgctttctcaggctgggaccacagcagtaggaacatgaggcttcaggctccctgaagcttccagaaggagacagcagagttggggggctcactggctaggctctttcagaatgtggcacagtggcttctgggacattaaggcctcttttccctaccccaggcctctgcctctccccaggaagcctttggagaatcctggcctctgcatgcctccagggtctcatttcttatcattgctggaatgcagccagtggtctgcattgtggattgtgttaactcgtgcacagtggttcccactctgactggcaacaatcagggtcctctcatagctgctgtagagcactgagtggccccatttcagcgaatgcagctgagaacctggtcaatcaataagcaggcatcaccaagtgtcagatttagcccagccctgatggcagagcaggtgggatgggggagccccagggctggcatgggggcacgctgtgtcccagtcatcctggcctgctcgtggcagccccatcagctcctacatgcagaaatcatctccttttgcctcatgtaggagagaacactttgcactgcagttggcagggttggtgtgggcggtgagagccagacctctcagctctcaccatgcaccctgctctcagaggctaccagtttccagttctcacttccccacctctgggagagcaggggctgggactccagcatggcaagagctggttctcagctccttttctctattccaacagaactgagggctctgaggcacacccacactgctggaatggtacctcaccagtgattctcttgggggcaggagaggggacggtctgtttgaaaaaagctcctctaacctggattttttttttttttttttttttttttgaggtagagtctcactttgttgcctaggctggaatgcagtggcacgatcttggctcactgcaacctctgcctcccgggttcaagtgattctcctgcctcagcctctcgagtagctggaactataggctcatgccaccacgcccaggtaattcttttctatttttagtagagatggagtttcaccatgttgaccagattggtctcgaactcctggcctcaagcgatccatctgcctcggtctcccaaagtgctgggattacaggcatgagccaccacacccggcctaacctggatgtttttaatgatccccctttccaagagacatcttcctcctgctgctttacagagacactctaatgaactgaagggtaagagcagtctccccaggcagtcagactggagtaaaaatcctagttcaggcacttagagctgtgttgtcttggataagttgcttaacctttctgagctgcttccatttcctcttctgtaaagcaggattcgtaatacctccttcctagggttgctgtgaggctgggagatagtgtacgttcaagggctggcacatagtaggcactccataagtggggctgttactgttgttaaataatccaaagtttgttttttatttaccacttgatgttatgtgaccactgtgatccctgtgggttccggtcagtggcaaaatgatttgcttgcactatgagggcagggcgtggtactgtcaactctcctgcccatcgtaaccaacacctaacacgtgtctgactggcacttagtaggtggcttaatcaatgtctgtggagtgaagaaatgagggaatgctccaatggaggaaggacaccttagtggggaagactgagtaagccaggttgggaagatgtcatttggatattttatattcgcctacagaagacaaaggcaggtaatggagaaggaaaagttatttaattaaaacatccctaagagtttagagggtggggtgcacagaggggtgaatgggatcaccggagcttgtacagcaagttagggtgtgagtatcctggtctcctgactctcaccttggctccctgctgtccccatgctgcctgtttgtatgtggggaagagtgttgacatgactctgcttccagggtgtgaatagttcctcctgatccccccgtctcctggaggccttgtcctgtgcagctcctggtggggagctggctctgagggagctgaagtgagggctcccctggggcctggcagctctgtaaattgactctagggagaaaaccgttcagtgtgtttggggactcagcaggctgtgcccagcacacacacctgccgcaatgccctgttctctgtaaacacaacacccccactcaccattacggtcccctggggccataactgggagagctgatagagtggcctggatgacaatgatgcaaacaacattcagagtggctgtgtcaggtcccaggggctaataacaacttagaatgaggggtgttgtcttagtctgttttctgttgctgtaacagaatactacagactgagtggtttacaaagaaagaaagtttatttggctcatggttctggaggctgggaagtccaagagcacagtgctggggtctgatgagggcctccttgctgcgtcacagtggagggcatcacatggtgagagggcaagaacatgccagctcagatctcttgtcctcttcttataaagccaccagttccactggggggacccctaccttgatgaccttatctaaccctaattacctcccaaagaccccacctccaaatgccatcagcataagaatttggggattaagttttcaacacatgaaatttgggtgacacagtcaggtgtgaaggcatgaagccccctccccccacccaccaccacagtggcttcaggttcttagtggggtgtgtgtattcacatatgcacacctgtgtgtgtgtgtgtgtgtttgtgtgtgcagggggttatagctttttaatctttatttgtaagtcaaaaaataatattcttggcttccagacctttccttcagttctgcttgctcaattccatgcagcccctgcccccagtccctcattctccatggtccagacaaaagtctgagccaaactaatctgtttcctgtttgtgccccacccattcatccttcttgatgtagaacgaagttcacatgttcaagtcaacaagtgttttctgacggcataagtctgtcctcaagggcatagatccacagtcagtgtggagacagacacgtttccaacggccacggtggcaggaggcctgagcaggcctggcccacacccaggcacacagcacgaggccacctccccggcttggaagcgcagcgccatacctccttccacctgtactcaacactcactttccttgtctcccggtcagtctcttcttaacctgtctaggagttacggaaaatgataaaagaaagggatttaacatcaagactacctcttacacacacacacacacacacacacacacacacacacacacagctgttcctttctcttgtctaatttctacttagtctgtaacactcagctcagatgacacctcccccaggaagccttccttgttttgcctgcatgttcccacagctccctgtgttcccctttaatataacccttatcaaattgcactggcgtgtgagcaatttgaaagtggggtccaagcctattcatctctatatccacagtggtggatagtttctgctgtttcagtgttaatgaatcactgaatgaatggtaatagtagtgacgcttgtgtgcttaggattgctaggccctgtgctaaatactttatgtggattatcttgctgaaatccttgtgcaattttatgaagaggtcctaatagtattttatactaataaattaaataatatatccccattttccacatgagggagccgaggctcagagaaattaaactactaggtaacagccacacagctaagtatagccagaattgttgaatgaataattgaatgcatgaatgaaaagatctgtacttgagccttgactccagtgcttgctgctgggtgaccttgaggaaatcacttacctctgcgggtctcagtttataggatgggcgccattccaatccccactgcggagctgtctgtgaggcagtgctcttggaacaggagggagaatggcttcattgttcaggggcgagttggctctgagtgtgcctgtggagggggtgccctgacaggaagagtagggcctggagaatgtcccctccctgtctgtgcagacttcagctgtgggagagacaccgactcacactcacctcctgtgcagaggccccagagccacctcatcctcaacgggttcaagcccagtgccagtgtgcaattcaactgctgtgggttccctcccagccatccccaaggcatggctccctaccttatgtgcccaggagtttgaattcagtccagtcaaggctggaagaaaaaatgttcaaaggaggagaataaaggacaggagagcccctcaccccccaccagacttataaaccaatgtgtataagaggtggctttgatgtcaaatccctttcttttatcattctccacaactccaaggcctagagaggttaagaagagactggccaggggacgagaaaagtgagtgttgagtccaggtggagtgaagtgatcccccaatctgcccagcacaggggagacttggggctgggaaacaggatgcctgaactctgggcctgggctgccatggtgcccacttggaggccaccttccccgctgacctgcacccttgttagtaaatgggaatggcagctcagcctgacttctcagggttgctgaggcaggtccggccgcctgtaaggatccggtgagtggtgtgtgcaggggctgacagaagggaaggggcgctgagaggcacagaatcctgaatgcagcctggagggacacaacacagcttgggctttggagtctggctggctgagccagtctcccagtcccagctctgccacctgcttgctgtgtgcccgaggctgttctctctgagcctgggcttctacctcggtgaagtggaactagtattatatgcctcacaggactgtggggagaaccaatgtgtagccaccatctctctccagtttcaggggctcattcctcttttcctgctgtttggtgggagggagggggatggatggatagtggcgggtgtgtctgtctgtctctgttgcggttggggtggacagtgtggcctgaggagttcctttacaagcctgccaaggcctgaatttggcaaacccggccttggggaagcggctgtggcagggcagggaggtgtataaagccctgcactcaggtcagagtgtgttctgccactgctctgggtatggtgcccggggcatctgcctctgaaatgtcggatgggcacctcccttcctccttccagctcctctgggagcccaggggctgcctggcactagaagttctcaaggaaggaagacttgcagtctggtgggggaggggtgcctacatgttgggcatctcctcagtgtcaggggtgggggaggggcctacatgttgggcatctcctcaatgtcaggggtggcactgcgtgacttctttggtagcagatttaattttatttagtcttgcaaggctggtatcaacttcactttacttcccttcgccactgtcttcagggagtttctaggctgagggcaagacagaatataagatcttggccaggcatggtggctcatgcctgtaatcccaatactttcggaggccaaggtgggaggattgcctgaacccaggagtttgagaccacttgggcaacatagggagtccctgtctctaaaaataattttaaaaattagccagatgtggtggtgtgatcctgtggtcccagctacttgagaaagtgaggcaggaggatcgcctgagcctgggaggttgaggctacggtgggccatgagtgccactgcattccaggctgggtgacagaatgaaagcctgtctcaaaaaaaaaaaaaaaagagaaagagagagaatacaagatcttgcagataacagagaaatcagcactggccaagctaagaggtctgagatttctgagatggagagtgctgtgggcacgagccaggcccggtctggcctgctgcctgggttcctgtcggtcctgccggctttctctcggcctgagtctgctgcctcaatcacaagtgcaggggagctacctcaggaggtgttgctagcatcatggcagcagaagtaatcccacatggtccacagaggtgagaatggtggagatgggctggagaagcagcccagtaggccccaggagtgaggcatgatgaagggcccagggagaccctctctgccaccattccataggtagagtgcttcacgcaaagagcaccaggcccagaggcagaggagactgggttcagtctcagcttaaacactaaccatccaagttgtagccgtaggcaggcactgaaccttcctggacctcaattttcccacctgtaaagtggcaaccacagaacctgctcttcttcgctcacaagctggggtgtgcattgggtaggatcgttggtttcgttggtttggaagtgctctgccaggggtgttgtgatggactgctatcattttgctgaggcagggagcctctttgccctctcttctcccatcctggttcctggccttttttttcctcgtatcgggggaggtggctatccattaagagaaactggtcactctggtgaatctgtgacggaccctgcagggatttgtgttcctatttccttcatgatccaaaacaatgcctttctttttctgggcttcctcaatcactctcttccccaaacaaggttggagagagctccttttgtgcccgatattgggccgagtgccactgggccttgctactcaaagcgtggtcagggaccagcagccttggcatctcctgggagcttgttagaaatgcagagtctcagtccccagcccagattgtctgactcatcatctgcattttaaaaggaccccagacgattcatatgcacattacagtttgagaagctcagacaatgaaggatactggggaatataaaaccacagtccctgtcctcagtttcttcacagcctcatgggaatggcagtgcatgaaatacaaaattgactttaaaatctactcttatagtaatttagaaagctggatttgctcactccacaatgtataaatgttttgaaacattacgttgtaccccataaatatatacaattaatgtttttcagtaaaaagaaataaaattccatgaaataagcaaacaaaaggcatggtagctcatgcctataatcccagcactttgggaggccgagggaggcggatcatttgaggtcaggagtctaagaccagcctggccaacatgatgaaaccccgtctctactaaaaatacaaaaattagccaggcgtggtggcgggcgcctgtagtcccagctactcgggaggctgaggcaggagaatcacttgaactggggtggcagaggttgctgtgagctgagatcccgcaccactgcactcaagcctgggtgacaatgagaccctgtctcaaaaaacaaacaacacaaatacatgctttggaggcagctggcctaggttgcaatgacaattctggccactagctgtatgaccttgggcaagttgcccagtctcacctgtggagatggatcccttcctcctaggatgaagagcagaggagggctgtatgtgaaagctcaatgctaaatggtagctccaacatcacgggcggagcaatcggctccatcttatggatgaggaacctaatgttctgagaggtgatgtgattcgctaacagcaggtctgagtctgatcccaatccaggtcctctaatgctgtcacagtgttttgcctgtcacagtgttttgtcaccctgagccttggcccccctagccagccagtgtgctctattggagacagtgggcaccagctgaggaggttgggaggggagagagcagtgtggttggtcaggcgtttgtggaattggaagttggaggccctggggttggaccttccaaatgtcccagactgtcagtgtttctatcaactgggtgaaggaagccactctatgcctgttcccccacgtgccctctgtgccactgctcatgtgtccgcccctcccctggctgcagtgcatgtcctacccgattcttgcctggtggcgttccccaaggcccgttactactgtctctctgcattttttttttttagacggagtttttgctccgttgccccagctggagtgcaatggcatgatttcggctcactgcaacctccgccgcccgggttcaagcgattctcctgcctcagcctcctgagtagctgggactacaggtgcatgccaccaagactggctaatatttgtatttttagtagagacagggtttcaccatgttacccaggctggtcgcgaactcttgacctcaggtggtccaccctcctcagcctcccaaagtgctgagattacaggcgtgagctactgtaccaggcctgcattttctttttccagctctgagcacagcacctggaagtttccatgaatggtggatggaaaaaaaaggctttgatttgataagcttcttcctcccccacacacatcatgagtttcccccatccagggttgtggcagagcggagtgatttataggactttgcagaagtggaagaaatgacggaaattgagtttattgatcaaccctcagagaagctgcctggcaggctcctggcctgggatactgccagcagctaacatgctgctctgttttacccgtgcaaatgacaggggcacagaccagctcccagaggaggaggaggacaggctgttccccacctccacccaggccgggagttgaggagaggggctggtcttgcagttggaggaagtgtgttagactcctgtgagaaccacctaattaagtggcttgagatatcggggctgagtggttgaggcgggaccttcgagtggagaccctgagcattctgtagaaggcccctcagctgtgactgttgggagcagagctctgctgcctgccaggggggatgttgttgttgagatgagcaagaaggctcagaatggcttcctcttaccagtttctcctactttcttcacatttaaggtgattattgcaatagttggcttaatctctgccatgtttataactgttttctagtcattatatttgttttcttttttttttgcttctctttttctgcctctctggttttaatcgagcattttatatgatttcatttccttccccaaatattattgagtgcttactgtgtgccaggtactgtggtaggtgctaggaagatgattttgaaccagacttcgtcttcgcccttcaggtacttgcagttatgtgctctgagagaaaaataaagaatttttctgattatcccacatggggaagggaagggaagggagccagccaccagatgatctaggagacctcacattcccacttcctgctgcatgttgttctggggagggggatctctggctcacctgcacccactgggtgagcctgggtgctccccacctcccactgcatctgtatgtctgggcccctcctccacaaagccatccctggagctggggcagaagcccctgagcacatgcagtggagcaggagggctgcagctgatgctaaactcttctgtgtgctctgccctggcctgggtggctgctggctggggaggactggttcccggattgggcctggcctgtggcttctgtagggactctgtacactgtgggcttggtgagtgcttatgtggagggacacagggcaaagagagcatcaggagataccaggagggtcaatggaaaactgctgggtcctggggtccttcctgctgttatttgggctctacacccctttgcctggttgcaaggtggggagaaaggccaggatcggggagaatatgactgtacttcttccaggtcccaaaagtggtgtcttcttgagttctgatgcagcaggaagaactgaagttagactctgggaaggactttctaatgtggaagcacaagctgtggaatgcggagctgagtgtgggggtggactctttctttggaaagatttccaaggtggtgagctcttcctgtcttctctgtcctccccctatctgctgtctgttgaatcttttccagggcagggggctaggtgctgtgagctttagggggccctgacagcccaagctcagtgacagcagctgcctcctcagagcacagcatcccaatctccctggctcaagaggcacctcctcttgtcactccagactgtcagcaggcatccaacctgctttctaggtcccaaccccagcgggtgcctttgggctgatctcgagtctgcatgggatctctccagtgggggtcggatttacagttccttggtggaaacaggccttcaggcagatgccctgtaccctgcaagcgttcagggttccaggcaagccaagagatactctgaagggaggtgggaggaaaggcgtgggctcaccctgagtccgcctcccatatctccagtatcctccctggccacttccccagtggagctttactggggttctccagggagcgtgacttctccaggaccctgtgtagggtttagtgctgggctgagcaggttcccaaacccccaccccagactcagacactttcatcagatagatcagggaacacagacccgttctgtacgaaggttgaattaggtaggagagctggctgtgaaatagatatggaaaccatgtgactggccttccaaagtgaaacagaagtaattttttgtttatctatgtccttgcaacctgttttgtatctcttcaagggtcgattgtgtattccagtagaatcaggggtgtgctcctggtggagatagcaatgggcacctggtgctactgttcattgagtgcccagataagttactgcgccagcctcatcctcacagggggcctgccaagccaaccttctcctcccattgtgcccaggacaaaaccaaggctcaaggaattgttacttgctccaggccacaagctgttaatggtggagtcacagtttgaactcggatcttaccccacagcacacttcatgcatgcatgcattcattcattcattcattcattcattcattcttatactcaataaatatttatttctctttacattccatcttgccccccatcttcctctccatggggcacagagctacagcatggaatcctttcagaagggactcccttccggggatgtatgggtgcccctcaccactgcccctgggctcctcctccccacaaggagttccgtgttcagtgcccctccctcctttctgctagcgctgagctcagctctctatagaagatgatttgacacattccagaagaagggaaccgtgacctgctagagcccagaaaagatctcattcaatccctcatcatccagacaaggacacagaggccccaaaagggaaagggtctccccgaaggccagctcactcctggcacagcctggaccagaatgggggtctcccatttcccaccacaatgaggtattccaagggaggactgcccttctttgggggtccagcatgggccccctctgctctcctgagcctgcagaattctgctgcttcctggctccctcctgcctgggccctccccatgtgccagctgggctggcggattctctgctgttctcctaagaggccacagtctgcaaagaccagagaggcctatgggaagccgcataaagccatcagctcccttcccaccatggcggacctttccacttcactggaaaaggaattttgccccttttagcaccctggccatcccagtgaggcctccctgcagcagctactcacaggtcattaagtctgaatgcagatgggatggttttttcctgtcccacgggatgagtcagaaacagtcacccatagcaggtggggctaattggccttgctccttttgccatcccggtcttccttggagagatggagagaatcaaatctcagtgcagaaagagctgagaatgccaaggtctgggtccagttttcctgcatttactgtccaggtcagacaccctcctccttgaggaccaccgcctcacggggatgtgggtgctgtgcttgactttgggaggggaggaggtggctgtattgtgaaatcgcccagggcattgtctcaaagtgtgataccttggccttctggctgtggaaaaacattccataggatatgccctggactgggagaaagggatgaggttcagaggcaaatatactttgaaaacatgcctcctccaaatctgaaagcctcccactttgcaccccaccctctgaagccccctccggatcagaaccactgagcaaatccaaacttctgtttgttgggatgagaacgcccacccagagagagagagaaaagagctctctgcaggcacacaggtctggggggagcttgtgctgtcagtcatgcatgaaacctttgagtgggggagctggcagggagctctgccctgtgctttgcagcacatgccgctctcatcacactggggatccctttgctcaggtgctgggcctctcctgtggactgagagttccttcatggtgggatctatgtttattctgctcacgtccagcgctcagaaaggggccttgaatccgaaggacagacagttggggaggttgccagaatagagggtgttactgagtcacacacaggaacctcattattttccccaccaggctgtggagttatttgtcctcagcaagtgaccaggagtgatttccaaggcccattacactaatgacctaatcaatttatccagctcttttctttcaagacacagagtgtctgccctcctccctgtagccctgcagactggccctggggtgtcagcccgagtctccttttggggattggtgggcactgatgttttagatggtgagtgatgccacagagcccctcacagcgggattcaaggcaggattcttaggcctgacatcctgccccctccccagggcccctgaagcagactcccctgggcaatgttactgttaaatatttggcccctggagtgtgcccagcacctttgattatatctggtttcctgttctccttggggaggaagaatttctccacaggaagtagtttaatagtctgaaagccttactttcctgctcttgagatccaagtttccagttacaagtggctgagatccttgataagagaggaggcgggaaggaggggaccagagctatgaactgtcactccctcccagccaagagtgagggaacggaagagggaagattcaatccctgactatccaaaccgcaggatggtggaaagacgtggacctctgccaccccccggccctccacctccctgctcccatgtccagtgcttccatgaggagcaggtgatgagaaacagggacggccaggcctgaggaccctgctctggtctcagcagttgacaggacactgtgtcatcctgccctcaggcaagccatgcttagcattttccaaacccacatgtgggttctcttgcctctgagtgaaggcgtttgtaagagttgggtggctcactcgtacctatacctctggcagggggttcttagggatgactgagctcagttcttcctgatgcagctttactcttgaactgtctgagtctaaccaggaacacaaaaatcattttaggtgtttacagccgagggccttataccaggaattggtgatgaagcagccgagacacaaacagggagagtgaagtaacccagagatgagtaacaacaggaagctaccccaaggcagaaggacaaagtgaggaggcggtgatcccggagcccaggggctgcagttggctggtagaagccgcacccatggtgggcttgtctggtgtgtgttggagccatggaggagtcataaccactgcctagtacacagctgggacagggaggtagacagctccccaccaccgccccatccccactgctccagcactgcagtatttcccatggacctggatagccccagggcttgggaaatgcagcctgccggggtcagccccatggtgatacaaaacagggcagggccaggagagaaagccaaggacagacagcttcagaaccagcacactccagtctcatccctgcagtggtggctggcttctttgcacctttctcagtttggctgttctgcattcaccaaagagaattatgtaggacgtctatgcccaccccctcttccttcttttttctctgtcagatgtgtcttcgctggttggtcccatggtgtgttcaccatctgatggcatctgggctcttcctatttattattattattattattattattattattattattattgttattttgagacggagtctcgctctgtcacccaggctggagttcagtggcatggctcactgcaacctccacctcccaggttcaagcgattctcctgcctcagcctcctgagtagctgggactataggtacccgccatcacacccagccagtttttgtatttttagtagagatggggtttcaccatgttggccagggtggtctcgaactcctgacctcaagtgatccacctgccttggtctcccaaagtgctgggattacaggcatgagccaccgtgcccagacagctcttccttttctaaagtggcttatcgtttatgttctctgagtcaacctaactatcagtccccaatggcatccagaaggagtgccctctaagggtgtagacaaggagaggccacccctctgtgcacagtcgggtctccaactagaagtgatctcatccctgaaaaggacgattcatgaggcaaaggaccaatgaggaacttgggcattctcatgacgactgctgggaattagcatgagatgaaggcttgcttttctgggatgcaggctaagagactctggggaggtgagttctggccagggaagcctctgctggtctcacagtgtgcagggcaatgctgggactccaagccactatggacatgttggtggctggctggtggcctggtggcagtttctcatacatttcataagaggcccttgtcatagcggccttatgtcgcaggacctaggtaggggaccaggagttgtctgattcagcagtggatcccctacagctcccagcacagcagggaataaaccagggaatgattttcctcatccagggcattgtaattgccttcagggctagggtcatgcctttctaatctgactgtctctaattgagcacctaccatttaatccttatctcttgttccctgagatgtactcacgttgcaggtccttgagcaatcatttctgaataagtggatgtatggtttcattaatccatttttacatgtatttattcattcattcaacaaatagttattgagcactgatataggtactggggatgcagtggttaacatgccaaaggttctgtcctactggggcttacattctactggagcactggagagaaactaataataaatgtatagatagatagatagttagataggggggaagagagggtgtgagagagagggaggagggagagagtcaggaaatgctatcaggaaaattaaatatggcaagaggagacagtgatagagactatttttcaggagagtcaggaatcttcccttaggacctgacatctgagtggagacctgaatgaacggagaatgaaccttcccagacatttcaggaaatgaacaggaagtgcaaagcccctgaggtaggagagtgccccaggtatgtaaacaaaggagtgtccactagcatggtgatagtagagtggagttcagggagagtgaagtggagtttaaggtaaggggatgggcccttcagggaaagaagggtcaaggagactgggggaatgacagtgccctctgctcagtggtcaggataaaaaccagacagagtcatcttgttgactctttctctcacctggacatctgtcttacttcattttctgctgctataatagaatagcacagactaggtaattcataatgaacagaaatttatttggctcacagttctggaggctgggaagtctaagattagagggccatgtctgataaggaccttgttgctgcctcataccatgtggaaggcatcacacagacaggagctgaactcatccttcagaaggaccccacttctgtggtaacaaaactaatcctgcagtattggcattaatctattcatatgggcagagcctcatgacctaattacctcttaaaggtcccacctctctacactgttgcaatggggattgtttccaatatatgagctttgagggacacattcaaaccatggcattctgccctggccttcaaaattcatgtccttctcgcatgcaaaatacatttattccatcccagtaggccccaaagtcttaactagttccagcatcaactcaaaagtcctaagtccagagtctcatctaaatcagatatgggtgaggctaaaggcaggattcatcctaaggcaaatttccttctggttgtgagcctatgaaatcaaaacaagttacatgcttccaaaatacaatggtgggacaggaataggataggttccccattccaaaggggagaaacaggcaagaagaaagcagtaacaggatccaagtaagtccaaaccccaacaagccagacaacattaaatcttaagattctagaatagccttttactccatgtaccacctcctggacatattggctctactgggctcagcccatgaagcagctctcgtggattggagtctcatgcctgcagctctcccatactggagttgcatgctggtggtcctacagtgctggtgtctgggcagtggcctcactcccatggctccaggaggcattgccctggtgagggatctctgtggtggctctgtccctgtgacaagtttctgcctgggcttccaggctgtccatgatatcctttgaaatctaattggaggctggcatgaccccatggcttccacactctgtgcacctgcagaatcagcaccatgtggacactgccaagacctacctaccacttgtgctctctggagcagcagcacaagctacatctgggcctgcttgagccatggctggggctgccaaggagcagagtcctgaggtggccctgggcagcagaggcctgaggtggccctgggcagcaaatgccgaggtcctgcctggtgtctctggaaaccttgctctaaaggtcctcagctgccttgaagatctctgaaatacctgtgtagtcattctcccatcatcctgatgaatagaacctggcttccttctatccatattattctctttagcaaatggtgttttggccacatccttagtattctctcctgaacacactttttaattctgtacatggccaggctgagagttttccaaatctttccattctgcttccctttcgatgataagtttcatctttaaatcatctctgtcttccttcactttgctataaatggcaaaaagaaaccatatagcaccttgaatgttttgttgtttgtatatttcttctgctagatatcccagttagttgctctaaagttctgccttccacaaagtcctgggacacagacacaattccaccaagttctttacaactatataacaaggatgacctttactccagttttcaatatcttgtttcttgtttccatctgagacctcatccaaaattctttactgtccaaattttctgctagcattgtgatcacgaccattcaaatcatcccttaaaagattcagttgctccttacagctcttgtcttctgagctttcaccagaattacccttaatgctccatttatggcagtctgggcattttttagcctgctcctccaaactcttccagcctatacctgttacccagttctaaagctgcttccacattttcaggtatttgttagagcaacaaccccacttctggtaccaatcttctgtcttagtccattttgtgctgctataacagaatgcctgaaactgggtaatttataaagaaaagaagtttactcagctcacatttctggaagctgagaagtccaagattgagggtctgcatctgacaagggcctttttttctggctcatcctatggctgaagggtggaaggacaaagagcacactccctagagagagaaaagaaggtggccaaactcatcttttataaagactccactcctgtgataatgaagccacttctgcaattaatggcattaatccattcaagagggcagagctctcaggatctaattacctcttaaagtcccacctttcaacattgttgcattggggattaagtttccaacacatgagctttgggggacacattcaaaccatagcaacatccaaactcagcagcaggtccttttggccctgttcctaaatacatctcaaagccatatgcttctcctcaattcccatgccgccagctacagcatcccaccctcatctgcctggatggctaaaatagcctcctgctggttttcttgccttccatcattccctgctgcaacacattctccacacagcagcctgagctatcttttaaaaacagcaattcgattatattattcctttgcttaaaatgacttcccctcgtacttaggataaaccccagaacacttgctgcagccctctcagccctaggtctcttctctgactgagccggcctctctcgggccttcacccctgaggctccttcacactagccctctcttgccactcttgcctcagcacctctccccgatggtgccttctgcctagaaggctctgtcccagatctttccctggctggctcgttggtggtcctttggctctcggctcattttctcatcctcagagaggctgccctgcccactcactctctcctggggtatcctcttatttcgcttggtaggtcttttcactctctaaaatgatctggtttatttgtttgcatatctattgcctgtttctctgtctgcagaatgatattttcatgagtctgttctcttctatattcctgaaccctaacacctagaacctggcacctgataggtgctcaatgaatacccctttaataaatgaaagggtgagtctcaactgcctgattgcccccagcaagaacaagacagcaactaaatacctaggcagcacatgcatgtgaacaggtcattctgatggctcagaaagagctcagactttgcaggaggagtgaggctcccaggcaaagcacaatggcatcctcacaactacttagtccagggagatttgcctggagcaggagaggcttgccttctgggccctagccatggctcctttctcctgctccaagcttccatcccccaatcctcacgtgttctccatctcccagagtggcagagctgggtccaatatgggctttgcacttggacatactggagtcttagaaattcttttcctgctttttcctggcagagtggccttggacatgttttctaatctctccaagtctcagttactgcaattaggaattgagaataatgacacaggttgagtatcccttatccaaaatgtgtgggaccagaagtgtttccaattttggattttttcagattttggaatatttgcattatacccgctggttgagcatccctaatctggaaatctgaaatgctcaaatgaacatttttctttgagcgtcttgttggcattcaagtagtgttgaattttggagcatttgggcttttggattttcacattagggatgctcaacctgtagtatctaagtgatagggttgcgctgaagtatcaataaaaccatgtctataaagtcagtgcctagggctgggcgcagtggtgcacgcctgtaatcccagcactttgggaggccaaagcaggaggatcacttgagccctggagtttgagatcagcctggtcaacatagtgagacccccatctctacaaaaacacttaaaaatagctgggcatggtggcacacacttgtcccagctactcaggaggctgaggtggaaggatctcttgagcccaggagttcgaggtcacagttaactgtgattgtgccactgcactccagcctaggagacagagtgagagcctatctcttaaataaataaataaatagtcagtgcccagcacatagaaataaatgttagcgcttaccagcatttttattgttgttattattgatcagataactattattttcaagctccttcctcacttagcccccagaatctcccacccctcctatggcagccctgccagggtgtccagggaagaaccaatggctttctctgccctgccctatttggacacaggatttgcagacttcattccctcatttccacctctaaaccatactgacactcttgcagcagctatgatatgaaatccttttctgttcagccaccggctcttgccaacactgagaggttcaatgggaaccctcttccatttctctcctcaagtgatccctttccctctcagggtctctgtagcccattgctccggggactcagtcttttcatgttatcatcatcaatgagaagttccgactaataaactaattcatactatggagttcatgttatttcagcttttaaaaataacacacaggtgggcgtggtggctcatacctgtaattccagaacttcaggaggtcgaagtgggagaattgcttgagcacaggtgctcgagaccagcctggacaacacaggggggcccctgtctcaataaactaaataaataaatagcccacagagaaggcaactcttaacccaaaggaacgtctcattccttgtgggattttatgcactttgaaggagattctggaggtggggctctccctggttccctcagggctattttttttttttttttgagacagattttcgctcttgttgcctaggctggtgtgcaatggcgcgatcttggctcaccacaacctccgcctcctgggttcaagcaattctcctacctcagcctcccaagtagctgggattacaagcatgcaccaccacgcctgactaattttgtatttttttttagtagagatggggtttcaccatgttggccaggctggtcttgaactcccgacctcaggtgatccacccgcctcggcctgccaaagtgccaggattacaggcgtaagccaccgcgcccggccccctcagggctatctttaaggtactgtctgccctgctggcctgtggacggggcccctcttggtgttctcccgtctctgttctgttgctctcccatttgtgcctgcctgagctgcacactcctgagagcagcatctccctgcttagctcccagcacagccctcggggatgctgtggacttgggaggggcattcccaagagtcagaggcaccttccacacacccttaccccatgcgtgccccaggacttgcagcctctgtttcctttcccacgtgtaaggataggtgagcttctctcctggccttgggaggcagcccttcctgtgagagcctgccccacctcagccaaggtcttgggtccagccctttcccaccagggagaaaatagcaagaaaaacagatgagagctgataccctaagctgcagggtctgctgggactgggtcctggaggagccccaggaaagctttaaccccgggggctctgggtggtcagaagggtgaggggtgaggagagaagaggggagggacccacttctgtagctagaagtctcctccctctctcctgtctagggctatcactgtctacctctcctctctccataggtcatcactgccctgatgtcagtcccaggctagatcccccaatccataggctggacggcagcaccagaggtcacctaccccaccccactgactctgggtggtgccttccttgggcagagtcttgaagttccccttttaaatctcttaggcaagggatattttcaacctgccaatcatctgcatctcaacaacccacagtcagcctggcaccctgaagaagagctgggcttggagtcaggagacccaggccagtggagcttctaatttatgaaatggggattcccttatctgctgtgctcaccacagcagcagttatgaggattacctgagacaggactgagaaagggatttgtaaatgataaatgtggtataaatggcagatgtgatgggtggtgggggtaggcaggacacctggccccgtcctctctgcagtggcagctcgctttccctgctgaggttcacctggggatctggccccactctccgctgtgtggctgctgagacagcatccctcagccttcagaatgacctatgttcctttggtctttgcccgtagactcatgcccagaactttttccaccatatctgagaggacaccatatctgtggggaacacattgagatggtcaggaacaagatgtgagcaagatgtttaaatagcccttaggctgtgtttgctgagcatccagagatactggagttttccaggtggccatttgtctgggagcttggaggggtaagaagagctcaggcaaaggaatactggtcggatgtttacagagtacttgcacacgtagtatctcatttgatcctccccctctgaagtaggtctcttttacagaggagacattgatctagcaagttgcagactggcagcccgagtttgggtcttctcactcccagtgtctgcaccaggcctggccattctgctgagggtacagaggagggaatgggcttcaatttcagcaagagagtgaggattgtatctaagaaaacttcagaggcacaagtgcactggtcacctctcaaggccccttggtggtggtggtttggggcacaagaatcctatgatcacagagtaggagaggggaactgctccaaaggtgttggagtcatctagtcctcaatttcttcactgggacaatgaagggatagaaaatgagattccaaaggtctcttctagtccttatcttctagatggggtggagaggggcatctggttcctcccactgggcaaattgtctcccttcctacccctatagccttcacagagcaggtgggctttgatggatggtgaaggatctaggagaagcgttgtccggggcgagacagactttaagcatcatcaccatgcaggagaaagccgcagattctgcatccctggggcggaaggaaacagtcggcagcctctcccttcacactcctgggtctcaggagctatttacatgctcaggagggcactccatccatttcagaagccgcattggaaaataacaactgggcaagctgctgctgctcagctggcttctcagcacagagctgggtgagacccagcccttggcactgtctccaaggccagtatgtgggcagaagccatgatggctgctggctagattggtttaaagggaagtaggaacccctgagatatgaaaacgcccaacccttgtggctcacgagcagcctcgtcatccagatgtttctatcttctttgtgggtcatgacctgaaaaaagttagaaagctctggcccttgactcaacctatttcctttaaaggacatatcatgatctatagttgtcttgtttattttcttgcttttgtgttatctgtctcttcacccaaaatgtgagatatgtagaagcagggatcttttatcttattctcagcacagggagcaatgcctagcacagaaagcactcgacaaatgcttgctgaatgaatgcatccacgtatgcatgcgtaaatgcatgaatgaatgactgaaagtatctagcatgtagtagatgctcagtgaatatcagttttctttcctgagcatcattcccagttagcttgggagtgcagagctggttcttgagatcaagcccttaggaggtaagtgctgcacagtgattggaaggggaaacaggaggttcatatggaggtgggagatggggcatggcaggggagtatgggacaaggccaagggaaggggggttgtgtgaaagattttttaaaatgacagttgtgtctgctggcccaagagaagggatggtttgttaatcacttgggtgtttcggtcagtgtagacgtgttttaggaagcacggaacagcactgccaccttccatgtggccttgggcagatcctgtgattactttgaacctcagtttcctcatctgccaattgggcagtcctcattctgccggtgacttcctacgcgacaaaggctgtcatgaagcaatgatgagataaccagtgggggcatgctgagcacatgggagcaatttttactgtggtcatttccttgaaattcataaaggagctcctctgtgattttctattattatttttgtcattaatcaggatttcctctctctgtaggagaataagccaatgcatggcaagcactaaatcttagatcctgaagactcagccctcgagcaaaagacatgcacctccccactcaccgggccctggaagaggagggtgctcctcttagaggcccctggaggccaggcgtgcctcagaggggcctttcgaggcagctgggaggcagatcctcacactctgccctcctctcccccaggtacaagatggtggtgaccccccggagggcggcggtggccatagccggctgctggatcctctccttcgtggtgggactgacccctatgtttggctggaacaatctgagtgcggtggagcgggcctgggcagccaacggcagcatgggggagcccgtgatcaagtgcgagttcgagaaggtcatcagcatggagtacatggtctacttcaacttctttgtgtgggtgctgcccccgcttctcctcatggtcctcatctacctggaggtcttctacctaatccgcaagcagctcaacaagaaggtgtcggcctcctccggcgacccgcagaagtactatgggaaggagctgaagatcgccaagtcgctggccctcatcctcttcctctttgccctcagctggctgcctttgcacatcctcaactgcatcaccctcttctgcccgtcctgccacaagcccagcatccttacctacattgccatcttcctcacgcacggcaactcggccatgaaccccattgtctatgccttccgcatccagaagttccgcgtcaccttccttaagatttggaatgaccatttccgctgccagcctgcacctcccattgacgaggatctcccagaagagaggcctgatgactagaccccgccttccgctcccaccagcccacatccagtggggtctcagtccagtcctcacatgcccgctgtcccaggggtctccctgagcctgccccagctgggctgttggctgggggcatgggggaggctctgaagagatacccacagagtgtggtccctccactaggagttaactaccctacacctctgggccctgcaggaggcctgggagggcaagggtcctacggagggaccaggtgtctagaggcaacagtgttctgagcccccacctgcctgaccatcccatgagcagtccagagcttcagggctgggcaggtcctggggaggctgagactgcagaggagccacctgggctgggagaaggtgcttgggcttctgcggtgaggcaggggagtctgcttgtcttagatgttggtggtgcagccccaggaccaagcttaaggagaggagagcatctgctctgagacggatggaaggagagaggttgaggatgcactggcctgttctgtaggagagactggccagaggcagctaaggggcaggaatcaaggagcctccgttcccacctctgaggactctggaccccaggccataccaggtgctagggtgcctgctctccttgccctgggccagcccaggattgtacgtgggagaggcagaaagggtaggttcagtaatcatttctgatatttgctggagtgctggctccacgccctggggagtgagcttggtgcggtaggtgctggcctcaaacagccacgaggtggtagctctgagccctccttcttgccctgagctttccggggaggagccttggagtgtaattacctgtcatctgggccaccagctccactggcctgcccgttgccgggcctggactgtcctaggtgaccccatctctgctgcttctgggcctgatggagaggagaacactagacatgccaactcgggagcattctgcctgcctgggaacggggtggacgagggagtgtctgtaaggactcagtgttgactgtaggcgcccctggggtgggtttagcaggctgcagcaggcagaggagagtacccccctgagagcatgtgggggaaggccttgctgtcatgtgaatccctcaatacccctagtatctggctgggttttcaggggctttggaagctctgttgcaggtgtccgggggtctaggactttagggatctggggaaggaccaacccatgccctgccaagcctggagcccctgtgttggggggcaaggtgggggagcctggagcccctgtgtgggagggcgaggcgggggagcctggagcccctgtgtgggagggcgaggcgggggatcctggagcccctgtgtcggggggcgagggaggggaggtggccgtcgagttgaccttctgaacatgagtgtcaactccaggacttgcttccaagcccttccctctgttggaaattgggtgtgccctggctcccaagggaggcccatgtgactaataaaaaactgtgaaccctg

SEQ ID NO: 355 - DNA, 12756 bp, Homo sapiens
  source 1..12756: mol_type = genomic DNA; note = NC_000002.12:c27212342-27199587 SLC5A6 [organism=Homo sapiens] [GeneID=8884] [chromosome=2]
tcgcgcgacccggccccgcggccccgccccgcagcgcgtcaggccctcttccccgggcgtggcctaagcggcccggtccagtcgccctggggctgcttgggggcttttcctgctcgtggagctctgcgctggtcttcatgcgccctagccctctttcggggatactggccgaccccctcttccttttcccctttagtgaaggcctcccccgtcgccgcgcggcttcccggagccgactgcagactccctcagcccggtgttccccgcgtccggacgccgaggtcgcggcttcgcagaaactcgggcccctccatccgccctcagtaaacatggcggcacggcgagcggggcgggcagggggcgggcagggggcggggcccccgcgggctcccggccagggctctcggccgggctctggctacccacgtgtggagaccgggcaggtgggcctggagagcgtgagccggtgccgagaggcaccggggagcggcgtctgagccggggcggggacaagggggcggggaggggcggagcgagccggcctccggcgtgggtctgagatcttaagtgcgagcggtaaggtggtggtctccgccgcgtagagggaagcgggaaaccgagaaagaacgagggtgagggtgatgagggaagggcaaacctcaaactccagcgggaggacacgagcctggatcgccccgggcacctagtcctcttcacctcaatgctgatagcgcatagcgtcccggagcctggcgaggaggtaggagcgggatagacgcttccctaactcattttctttgccttcccaggaaaagggagcgatgttgatctcaggaagcacaaagggaccttcctagctctgactgaaccacggaggtaagggagtgcgttgctgccccagggtgggccagcgccctgactgaagggcgccaggggatccctgctcccggcgcgacagtgttggttagggccagccagaaagctccttaaagccgacccaagtgatcatctcgagtagccgagccaggcttcccttccacattacccccatggtgtctgcctggaagttcctgaaaggtttacgtttagctggctggcaaattttctaaggtgttagtagctattagcattttaaggagggcccccaaagcctttcacaccttgaggaattataggccccaggacagattttgagggaatctttttggaacagttagtcctgcagtggtctcattgccttttgtaggagtcaatgcgatccactgcagtgtgtgaccaaagtgagttcaggtttttatttttatttttatttttattttgagacggagtctcgctctgtcgcccaggctggagtgcagtggcgcgatctcggctcactgcaagctccgcctcgcgggttcacgccattctcctgcctcaacctcccgagtagctgggactacaggcgcctgccaccacgcctggctaattttttgtattttttagtagagacggggtttcaccgtgttagccaggatggtctcgatctcctgacctcgtgatctgcccgcctcggcctcccaaagtgctgggattacaggcagtgatgtgggaccccttttaaaaacctgaacttggcctggcgcggtggccaggccaccgatccgccaaggcaggtggatcgtcatgtcaggagttttgagaccagcctggccaatatggtgaaatctcgtctctactaaaaatacaaaaaaaaaaaaaaaaaattagctgggcgcggtagcacatgcctgtagtcccagctactcaggaggctgaggcagaagaatcacttgaacccaggaggtggaggttgcagtgagccgagatcgtgtcactgcactccagcctgggcgacagagcgagactccgtctccaaaaaaaaaggggggggggtcccacaatctgctgtttgtgccttggcatgttatagttgtagtgaaacaacagctagctcttgcttttggccgccctctttctggagagatgcgagaccatagcgtttggatcaatgtagggtgtttagaaaactacagatctgttctcagaatctggtctgttgctaggtcaggtttttcctgtcttccctggggctctctcaggccatccaggggaattctccatacatcatgcaaatagaattttatcaggaagtcccatcagcagagtgtctttatttctgtacctccgtgtcccatactgggactttccttcctgtctctggccacctacctctctaaaccactaaccctatagttagttctttgttctgtgttctttgcacacaggagacctcttctttcctcttactccccagtagttcccatcatctctatcatagcagtaaaaacttgccaaagacgaatgagaaaactcagggtgttgcaatgtgcaaaggcccagggcatgtttaggttaaaccagagtttaagcctgttgggaatcttgtagaacatgtgatccaagagttgccaggtctgattttccctctttattggccccaagaggttcagagttcaggtttagtctgcatgaggccatatcttgccagccagccagtgtctgcccaagaacacactgtgggagagcggaaaggcagcctaatctttctcctagtgggcaaaagcagaagacatagtttatgttagtctgtctcttgattagttgaaatctaaactatgtcctgtgaatgactgactgcaacactctgctcctgtcctggttctgggaatagtgaggacagggcccttgctgaacacctgtcatagctgcagacagcactgtttctctctctcttgttttgtatcatgctgcataaccttgagcaagttatttaatctctcagttttcttgtgttaactggagagtattcgtgtcttaatctgagacatgctgttttgaaaatgttagcttcattatgtattattactaatgtttataaagcacctcacacactgctgggttacatagcaggtgttcagcaaatgttaactgtcgtcatgttaggctgtgtaactacatggcattctctggtgttttttcctcataccaataagtaccccagaggattgcctttgaagacaatatgatacgcttggagaacagacagggtggatggtgaatccctagacctgggttctaatttatgctctgacaatagtcggctctgtgcttttggaaaggtcacttgaaccatctgagccttagcgtgtttatctgtgaaatcgtcagtggtggggggttggttgtaatagtggtgtccaaagatttaagattttaaatattatgatcccttccctctttctctgaggattgtggtgtattcttgggggattaacatttcttgtgcaggagttagaaaatcaactttcaactttcccatgttttcagttccttctttccaactccctcccgcacagagtgccaagagtactttaggctgaaaggctaatccatctaggaatgctgttgaatatgagctccctcttccctgttctggagcctctagggctgagttggagtttgggggccatagggtgatagggccatttggaacacagccattggttccctgaaggggccagaacaaatgactgctgagcttcaccccacccccaattcctgatctctcacctcagctactcatagagccagatcctcagctctgcagctccaggcaactctgcctcagaacagggattgcttctccaggtaggtgtctgtccccagcaggatacgaccactctctttggctggtccctttgcctctcagctccgtgactgggttgcttctctccagaatggagaatcgtcattctgaaaccctgactccagcatggtgccctctcacctttcccctctcacttttgaatccagccgctcttcctgcgtctgctgttgactgtgatgttgcaggtagaggggctgagaggtgggtggcagcacttatctagtggtgttggggagaaccttaagaaaggggttggcctggggacgcctgaaatggagtctgtggctgccacagaggcagtctcactgatgatcagttagaagggtgacactggggatcacaggaggcgagggccgaggccaggggcagtaggggaagccctgctgccattagtctccatgctgtgtttcctgctgggctgtggcgccaggctgggctctgctggcttagtgtattgtagtgactgggtctgtgccttcaagtggggctgggaaattctgctaagaaacttaggctagagtttatttttcttttggtactcgggtggagacctaagaaggttgttgaatttcacagctgtgcatactcaaaggtcctggccaagttatattgtctcctggctgtcgcactctgatgcttctccctcacttatgtcccctaccaaacccataccagggcctctagaccttgaagggctaccactatgctggctggtccacttctgatggcatgcgatgtacaaggcccaagggtgaatggctaccaaggccagataggcctcactaagagctaattcctttgcagctcaccctggacagtatcactccgtggaggaagactgtgagactgtggctggaagccagattgtagccacacatccgcccctgccctaccccagagccctggagcagcaactggctgcagatcacagacacagtgaggatatgagtgtaggggtgagcacctcagcccctctttccccaacctcgggcacaagcgtgggcatgtctaccttctccatcatggactatgtggtgttcgtcctgctgctggttctctctcttgccattgggctctaccatgcttgtcgtggctggggccggcatactgttggtgagctgctgatggcggaccgcaaaatgggctgccttccggtggcactgtccctgctggccaccttccagtcagccgtggccatcctgggtgtgccgtcagagatctaccgatttgggacccaatattggttcctgggctgctgctactttctggggctgctgatacctgcacacatcttcatccccgttttctaccgcctgcatctcaccagtgcctatgaggtgagcagggacagaagggagaagtgcgtgggacacgggttggggtggagaggagggacaggcacataggaaggacctgggaccctagacctcctccacctaatgagagggacagaaaactcattgtgtgtttataattctttctcagtgatgttaggtataggggcaggattggagaggagggtgctatgccgagtaggactcagagtgggtatgggttggatattccctcatgttcctgagcatcttgagggaatttgtctgtgagttgtcggggtgaagtcaggagaaaaatctttttttctgtatacccagtacctggagcttcgattcaataaaactgtgcgagtgtgtggaactgtgaccttcatctttcagatggtaagcagaatgaggatagaaaccgagcctagggcatgttgggggacctgaacgcaagcatgctgagggaattggagtctcccctgctctcagattggcaggattgaaattcctgctagaggttagcatctgtgaggaccccagaggcatcctgctgcccatgccttccaattccagcacagatactgtggtggcagcaagccagaatttgagaggagaaggaagagggaagtgagcctaggtgaggggaagccatgggcatattggcgctgaggcccatctttcttcctctctcttcccaccattctccggcccccatcacattttttccacatgcaacaggtgatctacatgggagttgtgctctatgctccgtcattggctctcaatgcaggtgaggagtcacacagcccctggctttcagccgtggtaggttaggaaagcacctttgggagaggcagatggaggagcgtatgtggaaaagaacctgaccttgaatggggaattaattcaccgcttgggcccttgggtgggtctctaccagaggaaggcttggtccacctcaattgacagctagtaacatgttaccatgccctatctgaactggttagtcaatatcttttggtggagctctgcaaacatttttctccgttgtggtgaatgatttatttcattgttaatgaccaatgctttatctctgtggcatgacgtgattgccctaccagggcttctcccctggggaacccttttccagggataagaatgtggcttctatgcttacagtgactggctttgatctgtggctgtccgtgctggccctgggcattgtctgtaccgtctatacagctctggtaagtgcagtaagccgtggtgtggggaggggaagggatgaagtaaggaggggacatgggaagagaaggaaaagaagagataagctgagaatatagatgaggagaataggtgaaattctggggtggtaagatttatgataggatttagcagtggggatggtatatgaaggtagaggatgggatgggaatgatgtcaacagggtcacagcaattacatgcctaatggcaggagagtcccctcactggtagtatgttcttagggtggatggtttcaggagtgtccaagggagagaatatagtcatgggttcttagtttctgtttctggttgggtcagtaaagccccttcgtcatccctcttttatacatatcaccagagacagaaactaaaaactggcttcaggctgcaaaaagcctaaaacaaaacaaaacaaaacaaaatggagcaacaacaaaataaggcaggttggacaagctgggtttagaaggcctctgtggcaggtttgctgtgctttccttgcagggtgggctgaaggccgtcatctggacagatgtgttccagacactggtcatgttcctcgggcagctggcagttatcattgtggggtcagccaaggtgggcggcttggggcgtgtgtgggccgtggcttcccagcacggccgcatctctgggtttgagtaagtatacccctactcctggctggggtctgcagtgcctgggcgctgagcccatcctagaggctggtcttggctatagtaagcagaaggtaaactgggaagcctgaggtgtaacagcagacagtgggaaactggtcctgcagagatggagggtgattacaggtgcccggctagtgtttatagagagtcaggacattacctgggatgagtacctggaatgagcctggggtggaagaatggagcctccctctaactggctgtgctgtctctcgagtgcacccagcttcttgctttcagtgtcccccttggccctagcagtggtgtctctcctttcctgtccactgactcctgttgccaagagggcaggaaggctgtgtctctcaggctttgcacaatgactgggtggtgtctgttacaggctggatccagacccctttgtgcggcacaccttctggaccttggccttcgggggtgtcttcatgatgctctccttatacggggtgaaccaggctcaggtgcagcggtacctcagttcccgcacggagaaggctgctgtgctgtgagtgcagggacaggaagggagtggagcaaggtctaggggaaggggttccccagagataattggggtggggcaggatgccagagtgcatacacatccactgtggtcaggatgtgggtctcctttctggaggtcaggggcacacacctgagggtgtctgttaacgccggctctcctcctggcactgacctcttttgcagctcctgttatgcagtgttccccttccagcaggtgtccctctgcgtgggctgcctcattggcctggtcatgttcgcgtattaccaggagtatcccatgagcattcagcaggctcaggcagccccagaccaggtgagaaggcgctgttctgttcccatgagggcaggcctggccccacaacaggagtgtctaggtaggaaaggactgactgcagaaaggactcccaccctgggtgggagacggttgtaaaatcctttcccactctgagatgctaggaatctagcatgtgaggatcgcggtccctagcatcacctaaccacagtgctcatcctactggggtgaggacctacccttactgactccccattgggctccatgtgctctgctgggagctatcacatacctggtctcacctaagcctctaacagcctcatttcacagaggagaaaacagactcaatgaggtagccagtaagcagaagtcacactagtagccagaaacagagctgcgggcgaattgtgtcattccctctgtagagctcattttctctccacttaatgtgtagacacttgggtcagcagaggtgccccaggccctggcttcccttgtaatgcacccagtctcggtagactcgctggggcacatgtaaagggagcttccctgcagagccggccctgggaagacccctctctgaggactgctgtgtacctccgctctgcttgcagttcgtcctgtactttgtgatggatctcctgaagggcctgccaggcctgccagggctcttcattgcctgcctcttcagcggctctctcaggtacccactttaacgatttccctcaggcctggtgcacctgacccctatttggtacaaggtgatgggtggagcggggtgatagtgggtggggaatccctctaagtttctcactgtgcctgccccatctgtgtgcatgacaagggatagctcatctttgtaggccacagcacaacagagatacccctgttttggttaagagttcttttatggtaccagaaattgatctactcgaatgaaacccatatccacattcaaaaaaggactgtgtccttgccttccaggcccgctctgaggtggcatcaagtccaactatgaggaggtttcttggtggtacctgtcatctccccgctttaggacaccatttcctccatagagtcccatagagctgacaattttgcctcgctcaactcctcatcctcttcctctttttcagcactatatcctctgcttttaattcattggcaactgttacgatggaagacctgattcgaccttggttccctgagttctctgaagcccgggccatcatgctttccagaggccttggtggggttatgcttcctcatctcttcagtctgggtctttctaagcttcatcctgaccattgtcatcagtttgctgtaaaacacccactttatccggggctcagcacttgcctaatgaagcacacaaccttccctgcatgcatggttgtttccatctcagggcatgtcctagggaggtctctgagtcacataggagtgaggacttggtgggaggaagctggggcgtgatgtaatatgccttttgtttccagagagacagaggtggtagtttggctgggcagggagccttgctttaccccattgcttgtgttaactcacaccttcttgtttcctctcctgtccttttcccccagcctttggctatgggctgctttgtctaggaatggcctatatttcctcccagatgggacctgtgctgcaggtaataactatagagggtaggaagcaattttaagggagagaaggaattgattgaaacaggaagttgagaagggcagctatattgaggggaatgaccggggggcaggcgtaagagattcccctttgatggaccgtctttactgtgaacagacttgcaagcagccagaggacgcagggtcattcctgggatgttgtaggctgagagagagctaaggatcagcctcagagaactcaaaacacatccctctccatcagccccctagcagcctttcctgccctctggagttcttttttttttttttttttttttgagacagagtctcattctgttgctcaggctggagtgcagtggcgcgatctcagttgactgcaacctccacctcccacattcaagtgattctcctgtctcagcctcctaagtagctgagggactacaggcatgtgccaccgtgtctggctaatttttgtatttgtagtagagacggggttttaccatgttggccaggctagtctggagctcctgacctcaggtgatcctcccgcctcggcctcccaaactgctggaattacaggcatgagccaccgctcggccacctctggagttctgattgttcccacagaagagacagatctgacaagtggggctccaaggtcatggctggtggctatgctttatggtgagtctgggcatctctgagtctgtgttctttttccttttcttctcaccctgtcctcctaggcagcaatcagcatctttggcatggttgggggaccgctgctgggactcttctgccttggaatgttctttccatgtgctaaccctcctgtgagtgatgcatctggatccacagtcatgtgtagcaggatggacctgggggttggcagggctgtcaccaggagagctgaggactgccgtgagggctggcaggactggccttgtgacaggcctgcactgtgtctcggcagggtgctgttgtgggcctgttggctgggctcgtcatggccttctggattggcatcgggagcatcgtgaccagcatgggctccagcatgccaccctctccctctaatgggtccagcttctccctgcccaccaatctaaccgttgccactgtgaccacactgatgcccttgactaccttctccaagtaaggcagggcttgctatcttcttgttttctcaaagccctcctttgagggctttcacaggggtcttgctaagggatgggccaccagaggccccagggaaatgttgggtattgggtcccaagaccctgggaccatgcgggcaagtagagattggtgcccaaggaatgccctgccaacgaattgctaattgttctcacctctgctcttcccaggcccacagggctgcagcggttctattccttgtcttacttatggtacagtgctcacaactccaccacagtgattgtggtgggcctgattgtcagtctactcactggtaagggtgtgggattgcggtgcagatgagcaccgaggggttaacagagggccctaagggactctagggagaaaggctcctgccctctgagctcttgggtgtccgtagctgtcaggcttttctgctgggatgtaggaggtgggtgggggctggggtctctgggggccaagggaggacatggggcccgctgctgtggatggttccacccagagactcagaagcacatttccattcagggagaatgcgaggccggtccctgaaccctgcaaccatttacccagtgttgccaaagctcctgtccctccttccgttgtcctgtcagaagcggctccactgcaggagctacggccaggtagtacctgctgtccaagtgacccctccctgcccttctccacagatgccactgactcttcaggttcccttctaccccttttctctccccctgccccgggtgcctctctcaggatcagctaagcctaggctgtcccacacggctgtctcaggttctacccacaggactgcactggcttggtgggcagaaggatctcagggctcagaggagctcagccccagcctgggccagtcagctcccctccccagcccaccctgtgctccctgctgtgctatgccctccctcttttccccctgctctccctcccgaacccagccttgctgggctcccttctggcggggaccttttttgtgtgaatcctgtcaagcacccgtcatccgtcttcaccagttccacccctttggctctgtgtttgcaggaccacctcgacactggcctgtttcctgagaagccgaggaatggtgtgctgggggacagcagagacaaggaggccatggccctggatggcacagcctatcaggggagcagctccacctgcatcctccaggagacctccctgtgatgttgactcaggaccccgcctctgtcctcactgtgccaggccatagccagaggccaccctgtagtacagggatgagtcttggtgtgttctgcagggacaggcctggatgatctagctcataccaaaggaccttgttctgagaggttcttgcctgcaggagaagctgtcacatctcaagcatgtgaggcaccgtttttctcgtcgcttgccaatctgttttttaaaggatcaggctcgtagggagcaggatcatgccagaaatagggatggaagtgcatcctctgggaaaaagataatggcttctgattcaacatagccatagtcctttgaagtaagtggctagaaacagcactctggttataattgccccagggcctgattcaggactgactctccaccataaaactggaagctgcttcccctgtagtccccatttcagtaccagttctgccagccacagtgagcccctattattactttcagattgtctgtgacactcaagcccctctcatttttatctgtctacctccattctgaagagggaggttttggtgtccctggtcctctgggaatagaagatccatttgtctttgtgtagagcaagcacgttttccacctcactgtctccatcctccacctctgagatggacacttaagagacggggcaaatgtggatccaagaaaccagggccatgaccgggtccactgtggagcagccatctatctacctgactcctgagccaggctgccgtggtgtcatttctgtcatccgtgctctgtttccttttggagtttcttctccacattatctttgttcctggggaataaaaactaccattggacctagaa

SEQ ID NO: 356 - DNA, 92524 bp, Homo sapiens
  source 1..92524: mol_type = genomic DNA; note = NC_000012.12:c18738052-18645529 PLCZ1 [organism=Homo sapiens] [GeneID=89869] [chromosome=12]
gggaattcagaccaaaaggaaaaaatgacagtcacctgacagtgtggtgcccagccaaccagctatacctcttttgaagattttaagaacttagcctcctgaacagtcttcttcgaaagtggtgtgtctctgtgtgcattatatgttgtcaacgatctagagaagcagcccaaagtttcaagagtgacagcactttgcaacttcaggaatcacaatggtgttgatttatactcaggctctcagagtagctgcccaaacccactggaagcatattatgatgaaaggtttgaggggtttaaacaaagtagtaaaaaataaaaggagatacaatggcagttcatggaaaaatgccagacatcagggaaagctgtgttttcaaatattgtgggtttggaggtggtcagaacgtaagaagccaaacagtttcaagggcagggtagtgcaggtaccacatcttgcatactgtttctatggttaagtgtgagctagcttcaaagaacgaaggcaaaaaaaaccactgtgtgttctctgctttctccctagaaaagtggtaacagctgatgagtatcaagaaattattttctgcaaaggggcagagttaattgtatttggaacccatgacagcacctactggggaaagacttctaagtgaggagaaacggctctacaggtcatgaaactatggaaatgagatatccattgagagcttctttctgctcctcttcttctttctcctacttatcctctttacttgatgctgttattcttttcgaggagttctgaatttaagtcctcttcatttaagttgaactgcttttccctgtttgttctgagcttttctaactttccctgcattctggtatctttttcttacaagaacatgagctttgctggattaagtcataactattaaatttaaggagatctcattaattcgttctaacaatctgaaacttagtagttttgcacaatttttacctataccttttataattttagtgataattgtcattatctcatttcgatcttagtttttcaaatggaagtgtcctagtttttgtagtttatctatgataagtaagcttttaaaaatttttttcgtttttcataccaaatatacactcaccatggtatttctgatgctttttgatggtactgtcttgagtgtgtgtgtagctgggcattggactaatgtagtaataataactttatcagtcatggttactatttattgaacactaagtagcagaaactgtgttcggtggcatattaggaattcatctaatgcttccactttccttaagattcagggttaatttgctcacctttctggaagagagaactaaaacagagaggtcaggtgagaggcgatcttgaagtctagctgccttccaacttcatgccttcaggcaatagattgttataatgttttaatgtatgttctaagtaatgacttcaattctcaaattttaactttaattcttttttttgtatttttactgtgctatgccctttcatacctttaccatagcatagtaactacttaattttgttttttaaaaaatatttatcatacaattatactataatttactttaaacatattctttaaaaataaaaataatacagtaaatcaaatgtttctttaggaattttaaatattcaatgactttctgtgagaatttccttaacttttttgtgcttctacatggtttttgtcaaagattcaggatgacttcagaggtggaaaaattaacctagaaaaaactcagaggttacttgaaaaattagatattcggtgcagttatattcatgtgaaacagatttttaaggtaagatgacatccaccccctgcctatcctatcctaggtggaacttaatccaatgtcagtaattgtcatataaaggttagtctcttaagaagaaaagcaattaattatactaactatatttacaatcaagatggagagcatttcagtagaaggtaaaattagttgttgagaaaatctgaaataataccaggatatcagtttagaataatttcctgagcatacagaaatgctaacattaaacctaggattggatgtctaattatatcagactgataatggtaactgtattagatgttagtgatttataaaaagagtggagaataagcccaaagttagcagaagggaggaaataatacagattagcacagaaataactaaaatagaaaagaaaaaaattagaagaaattgaggaaactaagacttgtttttttgaaaagttaaataaaattgacaaatacttagagtaagaaaaaagagagaggagtcaaataaaatcagaaatgaaagtggagacattacaacagatctcacaaaaatgaaaaacacatagagcaatcatacaccataaaattggacaatctagaaaaaaaagggaaatttcaagaaccatataacccatcaagactgaaccaagaagaactagaaaggttaaacagaccaataacaaaaaggagactgagaggctgtgtgcagtgatttgtacctgtaatcccaatgctttgagaggccaaggtgggaggatcacttggggctaggagtttgagaccagcctgggtaacatagtgagaccctgtttggagacttaatcagtaatcaaaaactgcccaacgaagaaaagcccaggaccaaatgacttcacaggtgaattctaccaaagatttaaagaagaattaataccaatccttctgaaatgcttctaaaaaatagaagagggaacacttccagttttattttataaggtcaacatcatctggataccaaagctggacaaaggcaccacaagaaaacaaaactttaggccaatattcctgatgaacatagatgcaaaattccccaacaaaataatagcaaatcaaatttatagcactttaaaaggatcatattccatgaccaaataatatgtgtccctggcatgcaaggatggctcaacatacagaaatcaatcaatgtgatacaccacattaacagaatggagataaaaatcacatgattatctcaaaaatatagaaaaagcatgtgacaaaatttaactccctttcatgataactctcagtaaattaagtataaaaggaacttaacacattaaagtccatatatgaaaagcttacagctaatatcatataaaataaactgaaaagatttttttctaagatctgggaaaaggcaaggatgcccactctcaccacttctgttcaagatggtactggaaatcctagccaaagcaattagtcaagaaatgaaaataaaaggcaattaaattaaaaaggcagaagcaaaattatctctattcactgatggcacaatcttacatgtagaaactcctgaagattttgttaacaaactaccacaaggccgggtgtggtggctcatgcctgtaatcacagcactttgggaggctgaggcaggtgcatcacctgaggtcaggagttcgaggccagcctggccaatgtgttgaaacctcgtctctactaaaaacacaaaaattagccagacgtggtagtgcacgcctgtaattccagctactcaggaggctgaggcacgagaattgcttgaacctgggaggcagaggttgcagtgagctgagattgcgccactgcacttcagcctgggcaacagagcgagagtcctcaaaacaacaacaacaacaacaacaacaaaaacaactactagaactattaaattcagtaaagttgcaagatacaaaattactatgtaaaaatgtgttgcatttctattcattaactatgtactatccagaaagaaatcaagaaaacattttcatttacactagcattaaaaaatatataatgcttaggaataaatttaaccaaggaagtgaaaaactggcacaccaaaactgtaaaccactgatgaaataaactttaaaagttacaaataaacagaaacacatcccatgttaatatatccatactacccaaggtgatctatagattcaatgtaatccctactaaaatcccaatggcatttttgttttgttttcacagaaacagaagaaacaatcctaaaattcatattggaatcaaaaaagaccctgaataaccaaaaccaatcttaaaaaagaaatataaaggtggaggcatcacaatttttggtttccaaatgtatttaaaatacttcagtaattgaggcagtatggtaggggcataaaaacaaatatgtagactaatggaacagaatagagagcccagaaataaaccccttcatatatagtcaactgatcttctacaaaggtactaaaatacataatggggaaaggatagtctctccaataaatggcattgggaaaactggatattcgcatgtaaaaaatgaaattggactctaaccttaccccatatgcaaaaatcaactcaaaatccattaaagatttaaacttgagacctgaaactatgaaactcatagaagaaaataggaaaaaagctttttgacattgggcttggcaagaatttcttagatatgattccaaagggattgaaacaaagacaggtaacaaaaacttgtctaaaaatagaaaagtgggattacatgaaacaaagtggctattgcacagcaaaggaaacaatcaacaaaaatgtaaagccaatttacagaataaaagaaaatatttgcaagccacatatctgataagggatagtatccaaaattgaatcccacaactccatagaatggaaaccccaagtaacttgattagaaaatgtgcaaagggattgtatagacatttccctaaagaagctatacaaatggccaacaggtatataaataagtgctcaacatcactaatcatcagggaaatgcaaatcaaatcacatgagctatcacctcatacctgtaagaatgattattataaaaaagtacaacagaaaagtgttggcaggaatgtggagaaaagggaactcttgtatactattggtgtgaatgcaaactggtacaaccttgtggaaaacaatatggaggttccacaaaaattaaaaatagaactgccatataatccagcaatcccatttctgggtatatacctaaaggaattgaaatcaagagatatttgtactcctgtatatattgcagcattattttatgatagccaagatatgcaagcaatctaactgtccattatgaatgaataaagaaaatatagtatgtacatacaatgaaatattactcatcctgaaaaaataaagaatatcttgttatttgtgacaacatgggtaaaactagaggacattatattaagggaaataagccagacacagaaggacaaatagtgcatgacaccacttatgtgaggaatctaaaacagtcaaacttatagaaggagagagttgaatgatagttaccagggctgggggaggggaaaacaaggaagtgttagtcaaagggtatagtttctgttatacggcacaaataagtcccagcgagctactgaacagcatagtacccgtgataaataacattgtgttgcatatttaaaagtgtaagagggtagatcttagattgagtattcttatcacacacaaaagttataaagagggtccaggcgtggtggctcatgcctgtaattccagcactttgtgaagctgagttgggcagatcgcctgagctcacgagttcgagaccagtctgtacaacatggtgaaactcgtgtctacaaaaagtacaaaaaattagctgggcctggtggtgtgtgcctgtgggcccagctacttgggaggctgaggtggaaggatcctttgagctcaggagatagaggctgtagtgagctgtgatggcaccgctgctctctagcctgggtgacaaagagagaccctgtggggaaaaaataattaagagggcagaaggaaacttttggaaggaatggatatgtttatggcatagattgtgttgataaattcatggctgtatacttatctccaaactcatcaagttgtatacattaaatatgtgtagctttctgtatgtcaattatacctcaataaatggatttaaaaaatcaagaaggaataagtaatctgaaaacataggttatttcacttattccacaaaagaaaatcatccaaaaattatctttgtttgaagaataactagtaggagggaaacctggctcaatgctgtcactagatgacagaaggaaagatcattaacaaaattaggaaaagccattttagctgagttttgtactaggaagatgacaaatttcttggagaatgaggcaagaaagctacactggccaatccagatcaataggaaccttaaaatcctgcgtatgattttgttttttgaaagtgagtactcagataacacaatctgtgttgaagttgttattggttacacaaactgggaaaggtctgatattttaccctccctgcaagctaccaattggcctgatgtagctccatggaagctggtggaagcaggcttgtgcgtcaaaaaaaaaaaaaaaaaaaaaaaagacagcttattactcacagaaatgacagttgtcagagtattagcattttgacgttatttccccaagccccagtttttaaagtgtggtacgaagaggaacaagtgacacacagtgagttgcattatagagtaggtaccttaagcttaaggaacctgggccttttatggtgggcagtaagcctacctgatctttgccctgtaggctgtcatcattattataggaaacagtaaacaaaactgctttttttcctctggaaggagacagtatctttacgaaagctgttcgctatacaaatgtccttgaaaatctagtatggaagaaaagcaatcaatacctctgctcagaaaacacatagaaacacgagagacctatggagaattgtcttccaacaaccacttctctcaataacatttagccctcaagtttacaaaccacaaagaggaggttaaaaaagaaaagttgtacttctcaggagaccccagtgaaaaccaaagttgcagaactgtgtctctgaatccaagcagtgcatgtggccataaggtatcagaattttaatcgattcatggctaataccacattcaaagaacacaagtttttatgaacatctttacatgtaggatttttcctccggtagtatcttccaaagggagaaaagctattgcttctcgatttattaaaatttacattaaaggcaaaataaaaatagtaatatattgaaatctgtatcaaatgtgaaatgtaaatattattcagtgattatcaagtttctttatgttatcttcagggcagagatatctgaagtgaaatttagtaaaatacatgtcatatttaaaagcattacatagaatgctcaaccattataaaagtacggaaatggctcactaattgaaatgtatgattacggacatgagcaggcctgaagatctattgtttagcaaagtgtttctggagtggctattaatataatattaattataaaaattagagacacagagtttgctaagaatacttcaaaaacctccctaaaataactgtaagtactttagaagcataaattacatataaacaaggctgataatcatgataaactattcttatctagtaacataattctagaaccactaatttaaaactttgtcaccttaggctaaattgccatgtatgcattaaaatgttgattaagtagaatccttagggaaggtgtattggttaactgtattttatggatagctgaagattaagctgcttacacattcaactcacttgcttcaactcttgttgctaattttttctcattttatggatgcaccttttcccagagtaaataaaatgagtcctacgtgaccaaaatcttctagtctctcagagcactagagattcttggctgtaagacatcctagctgtttactacttggcaagttaaaaatctctctgagcaaatttcttaatccgtagaatgggactaacatagctatctcacatgattgttgtgggtattaaataagatattatgtatgaatatacctagtactaggcatgacacaaaataggtgctcaataaatatatgtagacgctgcatcagttaagtatacacaattgaattacatttattcattatctaagctgacgtaaattctgatgtgagtttattttcttacaaggtgacattttattataaatttgagtaaagaaaatataactttgtgatcttggcaatatattctgaacttctttctacaagattaattattgattcatggcttgagcagcaattctctaagattttttaaatccctttactaaaaaagcctattgcttttatcatgcaatagtctttatagcatttaaaatattttataggaaatatatgttatttcaatacacagtatgagtgttggattacacttttgattgttggttgagtaagaaatagtatcctttgtaatttcaggattttttaaattggatttgccctgagtcttcaaattctttaaggaattaatagccactattaaatctatagtatgtggtgacactctgtaggaaactgtgaactgtaaaaaatgaataaagtgttatctttcttttaagggcagaaaaaggaatgcagaaattactgttttataagtagcttataatatatctcgtgggtaatacagggaatctgagaagagactctatttagtttgggcttttatagaagatgccatgatggaagtggcattcttgctggaccttaaataagaaggaatatgtatggagtatgtggaaagagtgcatggagaataaaaagtaatcaaatatgactggagtacaggatgcatgaaaggaagtggtaagaaagagttgcaaatgacagttatagccagatgatggaaaccttgaatggtagaccatggaaattatatttccttttgcaggcaaggggtactcactgaaatttcttgagtaaagaaatattacatattttaggataaataacatggcactagttagaatggattggaagctagtattcagagagagagagagaaattatttctctactgattctgccctacaaatccgctacctggaatcaactcagccacttatattctgtttggttccacctcaagtttatggtttcttactttagttggtcctccacaatgtaaacttttaaaaagtctcatctaaaaaataaatagcaccatatcctcttctaatgttacattccctgttttagcagataaaccaaaagaatcctttacatttctttctccactcgttcaatgatccattgcaatctgttttgctttcatacctatctcgaaaatctttttaggtcataaatgctaaatccactggttagcctctctgtgcatttcacttatccctttttataaaaaatttccctgttctgacttctatgacatcattctctcccaattttctcttcaaatctgtgatcagtccttctccttctgtcctgtgaccactccttctgctctcctcttaaagttgagctctttatatcctttatttttacattacaaacttttcctgagctatcttattgactcttaacggctacttcttaaataggaacaagttccaagttttctatcctgaacgttgaagacatgtaaatggcaccatttgttcatcatctgccataatgtagacactgattaggtgttgcactcattttattaaaaacatataaggaagttattgttagcttctttttatacataaggatattgagtgtaagaatgttgatataatttcttcatatctcacataacagtagaaactcatgtctgggtctgtctgactgcaaagttatcattctactttcttctatagcatattgttttcctctattcctaacacacaaccatttgcctgctggctgtctctgtttagatgtcatctcagatgtacttcaaatttaatatgtttaaagtgaaactcgtctttccctcttaaactgtctttcctcctttatttctttgcttggtgatctcggcaccattctcagttatctaagcagaaattgaagaggttttcagactcttcttctgaccctatctttttaggtccatatacttgctacaccatgtcaattgctcttgaactacttactacttattgtggtcctcagaccagaaatgaagctgattgcatttcaacaagtcccaagttgactcatatgcatatcaaagttggaaaaaccctacagattggtttgttttaaatcccaacatctaccttctacactgctgccagagtaatctttctagaacgaaaatctatgggatttctctcttaaaactgatcaataactctttattctttccaaagaagtctaaatttctcactgtggcttccgaggaaccctgggattcagctgtgcttcctgccttatctgctcccgcagcttcactaacattctctctaattacactcttctgttttgtactttgtactttcatttgctctgatcttaacaaatagaattagcccctttcctccctaatttcaggcaaatatcttccttctcacctctgaagactcagttccaggatcactttttctataaagattctcctttgaccctccaggaagaattgtccaactttccttattgtgtctattatctatagaatttattttatttttaaaatgttaaaaaaattagagaaaaggtcttgctctgtcacccaggccagagtacagtggtatgattatagctcactctagccctggactcctgggctcaagggatcctcctgcctcagcctccagagtagctgggactacaggcaggcaccaatgcacttggcaaattgtttttttttttacatttagagacagggtctcactatgttgcccagggtgatctcgaactcagcctcaagtgctcctcccaccttgacttcccaaagcttggggattgcaggcatgagccattgtgctcagctacaaagattatatttcggcacctgtatacttccatgcctactttctttttctagactatctgcttccagagggcactgacaatatgttacttttgcatccttgttacccagtatagtatctgactcatatatttggtaaggaggaaagggaagaagaaaaggaaacaggaaaactgccaaacaatttaaactagcgcgagagtttgggaaaaaagaaagtggcaagtcatatcatttcctgtaatgtaatttgaatttacttaggctttatttttagtgtaattttagatacaaccaactctaaaatgctgtattttacattaaaagtaaattctgttttgataaatcagctttctcatcacattattttaaataacatttcatatttttactagcaaactgagcattggaaatggaaaatggtgacaatatggaaagccttcattctgtttctgaaagtgtacactcagaatgacaatcaatagaattattttgaattttattttcccttgtttattcaatcactcatttaaacgtatagtaattaagctcctcctctaggtaggtccagtagtaggcattgggaataaaaagaataaaatgtctaccttcatgatgttcacggtcttgaagcatatggtgtatttctaaatatacaagacattgaatgaattgtttgggaaagtgctttttgtaatgctttgcaaagaataaccacttaaggaacgttttttaaacaggagacaaatgattttattactcttattttatgttgtatgtttaatgattaatacgaaacattttaaaggtggtagtgaaccctgaggtggggcctgagattttgcatatcttctgggatatgcatttttaaatctcttttcctatcctccttaagtctagggagatacttaattcctttatgtaattattgtctaaatgcacttatttcatcagtttcataaaactgggtggtaggccacactctgaatatcttcagtcaggcacttttttgagtcctgaggatacaagaaacaaatgacaaacttgctgtctgaggcaattctagaatgaatatagaaaaaggctgtcattccaatctaataaggcctgtaagagaagaaagtggagtcttctaagaacccagagaagggatattttaatgcaacctggggaggagatacagaggaagatttctagagtgggtgacactttttcaaggattagtagaaattggtaatttaaacagaaagaaggatattccggaaagaaaaacaaacaaacaaaaaacaacaacgagaaacataggtaccatagcaagagatggtttggtacctgtactgcaactaattcagagcacctgaagtgtgaggtggaaggaggaaaaagataagagcagaaatcatccatgacattttagatggccttggatgctacacaatacagttggggttttgtcttgaagacaaaggaggtacagtgagaactttaagagggagttgagatggtcagatttgcaatttacagaattgatttctgcatatatactgttaatctgtgtaatggtatactgactttttttcttccagctgctcctctgggtggtcttagagttagttaaaaatcctggtctacctgtgtggctggggacaatttacctaagatttttgtgcttcagttttctcttacagaggagtctagcacgttggcagtctgagctgctgtcacgtgcctcagcactcaaattgcaccttctttcttattgcttttcttctccccgcttcccttgatcatgatgctaccacgtcctgcttttcttccccattgtcacttgctccttgttgctttccttttccattctctttctactaaaattagatcttcccctcttcagtgatacaactctcactattctgtgtggttttcatttttctgtaatttgattaacatttgactttgaattcttctttgattttgatcaactatagtgattctttggatttgtggaattttgtttggacttatatctccaattctttttagtacaagatggcaactttgaccttttagaagaacacgagacaaaacaaattatcagagaacatttcggatgaccaagcttatactctgtttgaaagtaataaaactgtcattattcagtgaataatgtatattttattttatgctgctattcagtagaaccataattttttatttacataattttctataaccaaaattttcagggattacgggcacattttaaatttttattgacttgcttaagattttatgacaaataagaagtgagataaggctaaaatgaaattaattctataacatccgcttccacagacctcaaaatccagaatttaaaaacagtaagttgaagcatgttatttaagtaaggtaatgaacaatacgcatgaattactttaagattatataattttaaggtgctatcattgtttaatcagctctggagaccccgcatctgatttgacaaccacagatcccaccatgacacaatgccccttcaacacatgcttcttgcattcaagctgtttacaatgtaacaagagagttaagatgttataaaaaagcattttttaaaaaattaaatctccctcttagctgaaattcctatttcccagtttttttatttgttagtgatactatagttctaccagtttttctaactctccctgaccccagtcattcttgagttatctctctcatttgtctaaaatttcattgtgtcgaattcttctgaattcttccttcgtcatttcaccgaggtctgttctttagtgtctattcaccacctcccacttgaatttcatcttatctgctcttacctgcagttctctaactcttccaattggaaatgcacaactaatcaaaccaatcttctatttttggtattgattttcctattcagaaactcccaatcatcctggtacttttaacaacttgccttttctcgtaaagttcaaatatgacctttcgaatccactctttcttattggaactcatcttgtttgtacctgccccaaatccttcaatgattactcagactccacttcctcaaggtattgcataactactacagcttctgcagtttacattgatcttgaatgtgtctgactcactctgacatatatggtccaggctgcacaccagtggcatgagattacacactgcctggtatggttttaagaagatattgaagtaaagtggaatacaaaaatgaaatgtgaaattgaaagacaacctggaatcctcattttctcccacattcctttctttatccctataaccactgggtttcaagagttaactaacccttttccaattttgacgtcactccatgcagctttgtatattttatcttcaataagaatccaatgtaattttcatcttctttcaagtataaattactacatgttacataaatactctaatattcattttatgtattttttatactcacaatgtgagcccaccagtcatttttttagtaggacaatgacaggctgaaacaaggaagaatcaccatagaagaatttagagcaatttatcgaattatcacgcacagagaagaaattattgagattttcaacacatattctgaaaaccggaaaattcttttagcaagtaatctggctcaatttctgacacaagaacaatatgcagctgagatgagtaaagctattgcttttgagatcattcagaaatacgagcctatcgaagaaggtatgtttgcatttcaaacttttatcggaatatttatatgtgaagtattttttcttttttcaaaaattatttcaaagcaaagtatttttatgaattgtggttatcaaattaccgtttttggatgggtcaaatatctttgagaaaatatattttatagaattgataccttttagaatgctatagtatgcaaccatgacatcctttcctatacattgttcagctcctttcttttaactgcttccacgtatctctcaagtgttcagaaatgagcttggaggtgaaagtaagacaatgattctattacatgtaccctattagaagaaagtatcttgatctcatgaataagataaaaccccagttataggtggtcttccattttaatgcattatattattgaaaatatctatgaaaattaaatgtgctaaatgaaaaaaaattctaagaagaaaatattataaactgatgaattttactttgtttataaatataattatctacaacatttcgtaaatatatatacttttcgcttgttcttcatttttgaacacatagtgatttggtttaaattaaatgaccatttaggctaacgatctgtcatagaatttgtgatctttgttccatctttcaatgggtaaaaacacttcacagtttttcatttatgttcattttgaaataaaattataaacacataatacaataaaataatcatatatggtaccaaaacattgttaaagcacaatgtttgaccttacagaaactaactgatagaatagctcaaaatattcacctaggaggggcgtatgaaagttctagttttgcctctttaagttggtttaggctaccaatgtttaacacatgataatgtagtttctaaaaaaccaaacttatttctgcattggatcatacattcataatttattcaaatatttatctgtagtaaccaagtatggttttgggggctgaagatatagtgaagaataaggcaattaggtcttgaattcctgatgggttggaggaaagttgacagtaaataatgaagcatgtaaaaggatatcttaagagagtgctatgtgatacggaaacatagagcaagaaggtgatggagagtaaatgacctgggaggcctagttcaggttgggtgttcagaagaaccctctctgagagtgtgagatttgagctgagacttaaatgacaagaagggacaagttatatgacaaaatgggagaagtgtctaaggtccaagaaagggaagcattaaatctgaattgaataactgaaggaacaggaggactgtgtggttagaactttgagaatgagagagagatgagtttggagagactggcagagatcaaaccatataggttcttataggccacaataaagattttggcttcatgactcagtgccatgcaaagattttgaagggttctcgatattgtagtggtgtcattgagttgagtcttagtgacaatttggtctcagcaccattaaatttttgcaggttagcagcaaggtaaagagcttgcacaagaatactaagcgactatatcactaagcagaactgatgagttcagatgacttttttttttttttttaatagcaagactttctctaaggaagtagtgaattgatttatgttctggctcaagctctttatgtcattgccaactggaaacaaccagtttacagatgagcactttaagtagcactgatctagagaatattaccaaaacaattactttggcactgtaaacttcaggtggtaaattaaaagatacaaatgagatgttgggatggaggcagtgacactttggaattgtgtttgcattttaactacaatattatactgttcatccatttcctcttttgagccttcacctgcctcaaatactctccaacacagccaggaccttgcatttcatttacatgattattgatcactttggtgtcttattaaggccaatttgaattatgatcttatagttccaaatgctgccaagttcctcagcctcatccctcattggtatgtgacaggcaccaaatgaggtttttaaaaatccatgtgattaatccttatttcaaactggtagtttttaagggaacaaaatgagtttattttctattccattaccaaagatatttatttaattattcagtagttcaaaagggctaagccaattactgctaattaaacagggaaaaataataaatgtatgcaagtcattactgttacaatgcatgattcatttgctccatacacttctatcttcctaaatttatatggcttgaaatagagggtttgtatacctataaaaatttcatttattttcttctagcttttatttttttaaaccaaaatagtaatagcattttgaatgctgtcttcttcatttttatgatgtcataacatttacttacatcactatatttttatgatacattattcttaatggctgcttagtattgtatcatattttgagctttaatttgtttattcccctgcacttatcttgcttttataaataatgctaatgtgagcattcttgtacatcactgtctgagtctctacttccataggataaattcctggaaataaaattctctgccaaagatcacactctaatcaagtgaatgctcatgtcaccttttctttttggttgaaatgaactatcaacagtaataatagcaactaaaaattttagagtgaatatataagggtagatcctattattacccccattccacagatagggagaggttagctaatatgctcaagatcatataacaagttaaatggatatgagtccaggctgtttccagagccagtcttctgcttgatagatattttggtacatattacagtgagtaaaacagttcagagattaattactaaagatgatcagatacaaatgacccagaaattccattcctaggcatgcaccatacagaaatgtgtatatatttgcactaaaagacatttactggttatttttggcagcacaatttgtagcagccccaaacaggaaattatctaaatgcctatcagtgatagaatgaataaataaattgtggcatagtcatacaatggaatactgtaaagtaatgggaatgagcaatgtataactataactacatgcaactacaagagtaaatctttgaaatagaatgttgagtaaaagaaaccaggtacaaaaaatacatactgtctgagtcaattcatataaagtgcaacaaccaaagaaaactaatctatgcttttcgaagtcagatcagttgatatacttgggtgtggtgagtgactgggaagttagtcggaggcaggcttctggaacactgcaatgctttgttcctcaacctgtgtgccagtcatccagatgtgtagcttgtcgaagttcattggtccataatatatgtacttttcttgtgtgtattttcaaaacataaaaaaagagataattaaataatatattatttacttgaatgttaatatggaagaactgaaggttttactacaaaaatttgtttccaaacaacataaatatagtattaatattaattctaaaggaatattttagaaatatgctctactactgagtaagtttacaagtgagatgtagttttttatcttgctaatggtatttttgcatccttttaacttattttattttatttttttagttaggaaagcacaccaaatgtcattagaaggttttacaagatacatggattcacgtgaatgtctactgtttaaaaatgaatgtagaaaagtttatcaagatatgactcatccattaaatgattattttatttcatcttcacataacacatatttggtatctgatcaattattgggaccaagtgacctttggggatatgtaaggtatttattttatttttaaatctattacatttaaaaatacttggaagttcctggcagtgtctacctcagtaggcaagagtgcacaataaaaagaagactctccatgttatccaaactcatagggaatagaaatttttacttgtacatatcttgaagatccaacatttggatgaagtggcaacgtaatttattgtatgcattagtatcatatgctttccttctaatcccacctgttaacctcctctccatggttatggcccctccgaagtttgctgaataacctagacacttctcaaaggaaagcatatgaagaagactcttatttagctagtcagaagatcctctattttaataagtatggttaaaattaattctcagacatcaggacacatactataactaaagccaacacataaatacagtacattgtacaacttcacatttgtggatagtgatttttatagacttgtatgttaaagagtttacatagattaaaaataatccacattgcattgctgattttatacctaacaatgtacctatcatactgttaataccagacttcagtttagtcagtcagctcagatacagtgcagaataagattttcaaagctgctacatttatctgtgtacaagcagatagacagataataaccaggtaaaaaatgttttcaaggatgaatgaatcatacagggaagatgaactaaggtaatgtgatagaaagtgactgtggggtggagggtgttacttagggtaaagttgtcagaaaagtcttctcaagaggtaaaaagaaatagttgtggcatgagtgatgatacaggaagccttagaaacatctagtgggaaggtcatgttaaacagagtaagtgattggcatgtttaaatgagagaaaaatggcaaatgtggctagagacaagtcaatggtgaatgaagggaggtgagtttgaggaggtaggcagagtcagttaatgaggatcttgtagagcatggagaggagaatagattttatcccagctgcactgagaaggattttccttaagatagtgtcataatttgatttattcaataatgtggaggaatgactgatggggccagagtggaggtagaagatgatttgggaagatggtgtagcagtgcaggtgatatagctggtggtgaactcatgaggcagcagctgagatgacaagtagttgaatttgagatacagatgcttctcaacttacaatgtggttacatcccaatacttgaaaatatcttaagttgaaaatgcatttagtatatctaatctaccaaacattatagcttcacctagcttactttaacacacttacactagcttacagtgaggctaaatcatatcctcactcccaaagcacccccaaaaactggcaacacaggacaccatagagttttggttgtttacccttgtgatcatgtggctgagtgggatctgtagctcactgctgctgctcaacatcgtgcgacggagtatctcatacagcatattgctagcttgggaaatgaccaatattcaaaattcgaaatgcgatttccactgaatgcgtattttctttgcattatcataatgttgaaaaattataagttgaaccatcatatgttggggaccatgtaattttaggaggtatagccaacatgacttaccaggtgttttgaagagagatatgagggaaagagaggaatcaagatgttcattccaataaccaaattacagtaatactgttggctgagatgttgaagcccaagagagaagcccattgtagggtttgaggcaacatgcaagggttctgtggtttccatgctaagtttgagatatcaattagtttccaaatggctagatcagatagtctgatctatgtgtgtgtggaattcagaagttatcagactggaaaaacagaattggaagtcatcagcatatatgggatatttaaaaccaaatgattagatagcattacttaaggtaaaaccatcaatagaaaagatatcttctaattccaagataatatcaaacatacaagtaaatattgctgcttctctaatttcaaatctaagtaaagacataaattcacaaattttgaaatgtattcatttagaattctgtaaagacagcccaatttatagctataatttcattataggaatttccattcattttttgttattttaatttttttaagagagaaaatataaatattaaagcagttatatttagaaatatatataattacttttacattacaagaaaaagtttcacccaactgcaaatttacacttaaatttaattgtacttttctctgtttctttatccacctttggaagacacatgcttagtatgaaagtctttcaaaatatttttccttgtgactagtggcataatatagtgtttaaatatcaatgtttaagtttctagtgctcatatttcttccctttccctcatctgttaattttgtgacagatataaccattgtgtatctcgatttcctcatatttacaaaaggaaaaagaatattactgctgtaaagcattcaatatcttaatgtaccaaaagattcttaaatttatttttattaccagttaaaattcaacttcaaatagaaaatagtaacattacacaatctaaataagttacaacaaaaattacagtattttataccttgatagtttataggaagtatttgaaggaaatttaaagataaatagatgaaataaagttaagagtggaaatttcataccacaaagttctgtacaaattctagaaggcatggagactatcacctgtaagtttcctagcagccgaagtcaagagagaaacaggattagttacaaggtttacaatgatcataaaaaacagcagtgaatgagagagaaattttctctgtttccaaaaaggctcaaagttaaatagtggagtgtcctcaacatcaccattagagaaggtaaaactttctcttgggtgcctccacatgtaagtggttggcatgacattgcataatcactgaaaacattttgctggtgaccaaaccatgtagtctgaatatgcagttttgtaaaggttgacttgatccatggataaaattaaaactatctagagaagtagcaagagccaatattatttatgaaaagttttctttcacaatatagttcttggtggttttttccccccaccccaagtaaaaagctcaagattgttctctggcagcactccagagaactcatactctgttgataaaataggcaagacaatttaccgtcataatcaaatacgagtcaggaaagcaaacattcttccatagaaattaagaaactttacaaataaacattgtttcttctccaacttaaaatctaaatacataaataaatccgtaagccaagaaatatattcatttgcaattctacaaatgtagccgaatttagaacttctgccttatttgcccagagagtatccacgggccagacaagatttctctatgaatattctaggtccatttctccaatacaaagacaattagttaagaaaactctgaagttttacattatagtgcattgccacatgcctaaataaagcactgtgcacttaaacaaacaaacaaacaaaaaccaaagcagattacccaaatgtggtagcatgtgactgtagtcccagctagttttgaggctgaagtgggatgatgacttgcgtctaggacttcgaggctgcactttagtgtgggtgacagagaccccatcttaaaaacaacaacaaaaaaacaaaaacaaaaacagacacaaaaacaaaaagcaaaatttaaaaaccccatcctggctaacacagtgaaaccccgtttctactaaaaatacacaaattagccaggcgtggtggtgggcgcctgtagttccagctactcagggggctgaggcaggagaatggcgtgaacccgggaggcggagcttgcagtgagccgagatcgcgccactgcaccccagtctgggcgacagagcgagactctgtctctaaaaaaaacaaaaaaaaaaccaaacaccccaaaagaatttattaagaatttaattattcttaataaagatttggcttggttggtgaagcctccaagttaaatgagattcaccaattctctttctctctaaagccttacttcctcatcagggttcttccaacttttatctctattattcccaagggtatataaggtctctctctctctctctctctctctctctctccctccctccgccccccccccccccaccgcctttctctcatattttaggcagtcctgaattcagtacattgacttagtgttataattgttttatctgttctcagctatgctcttacctaagtacttcttgggtcatctccctagaaagggactgcatatgatcgccaaagaagaactaaatctaaaagattcattttctcatatggcccatttggtgctctgtgcttctgtttggaaaaactactgattttatataagtacttggtgctgggacgacactcccttctccaggttgtcatgacttacagcagggtttctcaaacttttcattttttaagtcagataattctttgttgttgggggctgtcctgtgcattgcagaatgtttggcagcattgtgaccgttacctgctagatgccagttacaaacctctccctatctccagttgtggcagccgaaaatgtctccagacattgccaaatccctcctgtgaggcaaagtcgtcccagtggaaaaccagtagcctgtagacatggggtaatttaatgtacttactggttttctatggaaaaatatctctatgtatgacaagggagcttttttaacctctttcctattatgtatcgattctaagatcccggtgtttcaagtcagctctcagattcagttttgtctcttccaagatcgcgttttagatcacatttttctgccttccacttctcttcttacatctctacagttcccatgttttctaatataaacacaataaatatttactaacagtcagtttatgtcaaacatgttttatggactgaaatttcaatccctgctgttgtagaaacagcactaaccattgccttatgttagtgttgctgaccctgtctgtggttggcacatattagctccatgtcaggccaggttcataggtaataggaacaactatgcaactctttgtatgtgtctgtgaaataatttaaagaattatcttaacgctataactatatttgcatgaatcaagaaaacaatatctatacataaatcaataaatttgagtgaactcttggtagtttggggcaaatgacctatttcatgatggcatacaatggcctactctgggctgggtatgaagattttgagacatccctatttgcttttattcattattataaagtcagtgaaaaatctgaatgcaatcagcttccactgacacagagtaaataaaagcatatgtgctaataaagcatcctgtcactgctctcttgtagtatgaacactgaaaattaatttaaacacagtgggtacaactgatttaatgaacctaagatagaatttatgtttaaatcaagaaaccaatatttattttttaggtagaaaaatcaggcccagttttagatatcagcagaagcagaaatatagtttcctcagttttgataaagctgtgaacttgtattctgaggtaagcaggtcatacgtttctcctagtgaaattatgagtcgaatagacagagatgagcaggtgtccaggcttcctttgcataaaccttgattttctctagtgcttacttggattaaaattagagatggccttatgttaaatggttagagagataaggattatttgctgattcaccaggccctctagcttccatactgtgtagccaacactgtttccagagagcaagtattgtcatgctttatcttttctttatccttgcctttctgccatataccccattccccaaagcctgacatgaggaaagaattagataagattttattaatatattttactattctgagagggctttgaacattatcacttttgaatggtatggcattgaacagtaaatgccaccataagtaaaattatatgggttgggagtagggatgtttcagagctacaactatggagcaggtatcctcattgcttactgaaaaccaagccttgtatggagagcacggaagagtaaaacatttgactagcgagaaagacacagtattgtactacacagatagtatgtgtcttcccttttaatgcaaatttctagagactcaaaacttgtcccaaagacaagtttttatagagttttatggactcatttatgcatttattataaaatcaaatggtctttggaatattttaatactttggtatatatttttaatggtccaggagtaacattttattttgctgaaattttgctagtgcccttgtgaaaggatgccgttgtttggagattgactgctgggatggagcacaaaatgaacctgttgtatatcatggctacacactcacaagcaaacttctgtttaaaactgttatccaagctatacacaagtatgcattcatggtatgtacatatctttgttcaactgtagctatttaaacagaagcaattctaatttacttgcttcaaaatcctataatgcttagccttactttagatgatatttcaaattgtgggttatgatccattagtaggcagtgaaatccatgttgtatatagttaaaggtagatttatcaaagttagtttcaggtggtaaggtacatagtgtttcatggaactttttgtttactcgtgtgtgtgtgtattgtttcacaaggtaaaatatatttattattgtggatgatggccaggaaagtttgagaaatactggtctaggtaatagtagatattttaccaatattcaactcttttactttcaagacaaaataaaatgtatcaacaatgcatcatttcaattgctgacattttaatgactataatgacagctattgatatagtaagaaatgttcagaagtttactttggattcaaaaatgtttaatttattacagattcaacgatatagttattcctagaatttgagctcagtttatgaatcctactctataaattgagcaggtttttgcaatccctcaatgttaaggagttctaaataacactggtttcatttataaacgtggctaattttgtaccttcagacattgtgttgtttttgtaaacttaacacacttgatttcttaagtacttcaattatagtacaattttagtacaatcaaaatgactaaaagaattcttactacgtactaaaactgtgtaatgtgtacctaatacattaaatttacaaatgtaataaagttctcctatgtcaatacattacataatctgtcaacataaacttaaaatcacaaatttatataaatttatctactatatattaaaatggagtacaaaataaatatttcaaagatacaaatatcatatatgaacaatttctatcttaatataaaaacattgagagtatggcactgattctcctaaacatgtagtttctattatttctaaatttatttatttctactccagtctctttcttgaactcacaccaaagtacacaactgcctgtttgacattaccacttggatatgaataggcatatttaacttaacatgtttaaaattgagctccctgatatttctctagtcctgctctcgccacgatcttccccatctcatcaatgacaactttcatgtgctctagccaagaccttttttgccaactgtaacctacttctccttctctcagtcccctcagtcaattcttcagtaaatcatcttggctttacttttattattattattattattattattattatactttaagttttagggtacatgtgcacaatgtgcaggtttgttacatatggatacatgtgccatgttggtgtgctgcacccactaactcgtcatttagcattaggtatatctcctaatgctatccctcccccctccccccaccccacaacagtccccagagtgtgatgttccccttcctgtgtccatgtgttctcattgttcaattcccacctatgagtgagaacatgcggtgtttggttttttgtccttgcgatagtttgctgagaatgatggtttccagtttcatccatgtctctacaaaggacatgaactcttcattttttatggttgcatagtattccatggtgtatatgttccccattttcttaatccagtctatcgttgttggatatttaggttggttccaattctttgctattgtgaatagtgccgcaataaacatatatgtgcatatgtctttatagcagcatgatttatagtcctttgggtatatacctagtaatgggatggctgggtcaaatggtatttctagttctagatccctgaggaatcgccacactgacttccacaatggttgaactagtttacagtccaaccaacagtgtaaaagtgttcctatttctccacatcctctccagcacctgttgtttcctgactttttaatgatcgccattctaactggtgtgagattgcatctcattgtggttttgatttgcatttctctgacggccagtgatgatgagcattttttcatgtgttttttggctgcataaatgtcttcttttgagcagtggctttacttttaaaatgtatcctgaatttaactatctctgcccatttttactgtcactgtcgtagtcaaccaacatcacctctcatttaaatgatcccactgccctcttctctgatattcttgcttcttttcttattcccctgcaatctcatctcaacatatcaaccagagtgatttttggtaactcagactatgtcattccccttctcaaagccttcggcctcactcaaaataaaagctgaaatttgtacaatgactcacaaggccataagtggtcagtttttcattacctattttaactctcctgctactccatccctgttcacttggccattctggcctccttagtccttttcagacatatctcaaggcctttgtacttgctattccccctttatatgaaatactcttcccaaatatttgcatggctaactccctcacctaattcagagtggaaaaatgaattaaaaaaaatagtgacagtcttaaaattcaaaggccttgcaaggatgaaaagcctacagcttctaagattccaaaaagcaagaaatgggcaactagataagaaaaagagacaaaatgcaatgctttctattatttccaataggaagaaaagaagcaacattatgtttatttgcagatgacataatcctgtatgtaaaaaagcccaacgattccacacaaaaaaccctgttagaactcataaatgaattcagtaaagttgcagaacacaaaatcgacatatttaaatcagtagtatttttatacgcaaatagtgacctaattgaaagaaattaagaaaaaatctcatttacaatagtataaaaatgacatatctaggaataaatttaaccaaggaagtgaaagatctgtatactgaaaactataaaacatggatgaaagaaattggagacacaaatacgtgaaaagatatcctatactcctgaatcagaagatataaaataatattgttaaaatgttcatgctgtctaaagcaatacacagggttttttttcccttggggtgtggtattgttatgttgtcgaggctggtgtcaaagtcccagcctcagaagatcctctcatcttggccttccaaagtgctgggattacaggtgtgaacaactatactaggctacagtgtacagatttaatgcaattcttatcaaaattccaatggcattattcatagaaataaaaaaaaagtcctaaaatttgtaaagaaggataaaagacttcaaatagccaaaataattctgagaaatgaaaacaaagttggaggcatcacactttctgatttaaaattatgttacaaagctatagtaatcaatacagcatggtcctgtgcagaaaaacagacatatagaccagtggaacagaatagagagcctagagatcaacctaagcatatatggtcaacctaatttttgtcaaggagaccaagaagacaaaatggtaaaggataatgtcttcaataaatggtactgaaaaaactgaatttcgacatgctaaagaacgaaattagacccttatcttataccatacacaacaaatcatgttaaaatggataaaaaacttacatataatattagaaactatgaaaaccctaaaagggaacataggagaaaagctcctagacactgactttggcaattattattttgatattacatcaaaagctcagatcacaaaagcaaaaataaataactgggactacatcaaactaataagcttttgcacagcaaaggaaacaatcaaccaacaaaatcaaagggcagcctatgaattggggaaaaaatatttgcaaaccatgtatctgataagggagtaatatccaaaatttatgaagaattcatacaactcattagtggaaaaaaaacttgattaaaaaatgaacaaaaaacctgaataggcatttctccaaagaagacataaaaatggccaacaagtatatgaaaaggtactcaacattattagtcaccagggaaatgcaaatcaaaaccactatgagataccacctcacagtcttaccatgttagaaggtctcatcaaaaagtcaaatgataacaaatgttggcgagggcgtggcaaaaagggaaccctgtacactgatgatggaaatgtagattggtaccaccaatgggaatacagcatggaggtttctaaagaaataaaaaatagagccaccatatgacccagtaatccctcttctgggtacatacccaaagggaattaaataaccatctcataaagtttttgtgctgcagtgttcactgtagaattgttcacaatagacatgatatggaaacaacctagtgttcattgacagacaaatgaataaagaaaatggatatatgcaatggaatatgattcagtctttacaaagaatgagatctttccatttaccacagcatgagtgaggacattatgttaagtgaaataagccagacacagaaagaaataatgcctgatctcacttttatgtggaatttagaaaaaaaactctcaaatgtacagagatagataaccaaacagtggttgacaggaacgaggtgtggggagggagaagaaaatggagaaaggtaggtcagaggctacaaagtagcacatatgtaggatgaaaaagtctagacatctaatgtatcatatgaggattataggtaataaagttatactgtatatggtattcatgctgaatgaatagattttagctgctcttgctacaaaaattttaaaaagggtaactgtgaaatgatggatagatggatatgttaatttgattcactgtaataaccttcttactatctacgtgtgttccataacatcatgttgtataccttaagtatacacaataaaatgcatttaaaaacacccaaaagagcaagaagtgagattttaaacaaggctttgagcagtggagactcaatgagacttcccagctgaacaaggtgactcagttttgcagcatagataagattaaagtttagacttcctactcaaggtagtcactatttggaaaaagaggacatgaaattacatagacaataattatgactagggaagtcataacttggtctagttgcatgagtttactagaataaatacataagaaatctaagttttaagggacttatactgccaaaaaccctcataagtatgactcttaggtgagccttaaaacagcctttggtaaggaaatggggggcaaacattgcttggctttcaagagagcaaactcctcaacatccactttcaatgtggccagggaagataaaagaaagaggatcttcccacaagatggagccaagaagaaagagaaatgatgtcagtgacatcagggcctcatggaagaatccaccttttaggccatcactttgcccagtctcagaattacttattatatttggaaaaaactttacctattcttttgggatcagagtgagtcagtggactcactctaattcagaagatcattgtgtaggtcaaataagggcttccaaaaatattaagttttaattcctggaacttgtaaatgttgttttatttggaaaaagtgtctttgtagatgtaattaagttaaagacctctagatggggagattattctggattatctgagtaggcgctgaacaccatcataaggacttttataagaaggaagtagagagagatttgatacaccagaggaggaggcagtgggaagacagggacagagattagagagatgtggccacaagccaaggaatgtgggcagccacccaaacctggaagaggcaaggaggattcttcttcagtgccttccaagggagtgcagccttaccaacaccttgatttgagaccagtgaaactgatttcaaacttctggtgactagacagtgagagaataaatgttgttgttgtaagccaccaaggtttgtagtaatttttgtcacagcagccacagagcaatacactcatacattaaaaagacatagtaataatcgaccctgttctgagtgctgtgaaaatgcagtaagacttgtgattccctggcttgtttacaaattggtaaatttgtgccctgataagtatatatgaaatcaaaacaaagaaaaaaattgtaaataagatccagtgatgttttgttccctatttaatggcaagttttgaagttacagcaatgagaaagggcagaaaatacctttgtagagccaccttcacttaataaaactcctttgctattagaaactggaaatatctttatctttgtttctaattctaaaacaatgagttttgatttcagaacttaaaactgaaaaagcagaatattgacatttcccccaactcatcagtgttaataatgtttttgtttcactttttaaaatctctaaatatttgtatattaacaataaaaatatagcatgctactttttggtaacttgcttttcttcataaacccgtagataactttctatagcagtatagatagctctgtcttcttctttttttttttttatttttatttttgagacagagtctcattccgtcacccaggctggagtgcaatggtgcaatctcggctcactgcaacctccacctcccggttcaagcaattctcctgcctcagcctcccaggtaactgggattacaggcacctgccaccacgcctagctaattttcttttttgcatttttagtagagatggggtttcgccatgttggccagcctggtctcgaactcctgaccccaggtgatccacccgcctcggcctcccaaagtgctgggattacaggtgtgagccaccatgctcgtcctgccttcttcttaattggtctatatcattcctttatatggatatggtataatttatttattattattattgttatttttgagatggagtcttgctctgtcacccaggctggaatgcaatggcgcaacctcggctcgttgtaatctctgcctcccgggttcaagtgattctcctgccttagtgtcctgagtagctgggattacaggcacacactaccacacctggctaatttttgtgattttagtagagatggggtttcactatgctggacaagctggcctcgaactcctgacctcaggtgatccgcccgcctcagcctcccaaagtgctgggattacagttgtgagccactgagcctggccagtataatttatttaaataagtactcactgatggatgcttcagttgttcctattcttttggtgcaaatagtaatacatttctttttatgcagatttaatggtctctgttttgccaaactcaaaagtactttcagtttaaagaatagttattttgcaaaggtactaaacgttagaagtaagttttaaaatacattaagcacttatattaattgccttacaattatttagaagttttgatgaataaccatagtaatggttacttttttagacatctgactacccagtggtgctctctttagaaaatcactgctccactgcccaacaagaagtaatggcagacaatttgcaggctacttttggagagtccttgctttctgatatgcttgatgattttcctgatactctaccatcaccagaggtaacatttttttctgagaaactcaggttaagaaaaaagtccatgaaaacatgtcactgttatattggcctgtgaaactgggctagagaccaatgaaaatgcttagttttgatcacgtatagaggtttatttttgcaatgttgcctagggaatgttctcatgaatgcttaggtgaatatatttcgattaaaatttatatatatatacatacaacccacattttgattgtgtctcctaccccatgggtccacaatatcaaagcaattagtattaaggaccagaaatttagtatgttttacaggcaaaagtcctagaaagtggcaaaagttctagactataaatagtcagtacccaatatctcaacagctgggtagcaagttcccctttaaaaaatctactcttttcaatttccctgtctctatgaccctttccgtcttaatttgagcatactgaagtatttgctttgaaaaatcacgtccacatctaccatcaggacttcacttctctctctggctgtctctttattactccctctctatggcccggtgcagtgactcatgcctgtaatcccagcaccttgggaggctgaggagggcggatcccctgaggttaggagttcacaaccagccttgagcaacatggtgaaaccccgtctctactaaaaatacaaaaattagctgggtgtcgtggcatccacctgtaatcccagctactagggagactgaggcaggagaatcgcttgaacccgggaggcgggggttacagtgagccaagattgagctactgcactccagcctgggcaaaaagaacaaaactccttcatattgaaaaaaagaaaggaattactccctctcacggcccaaattttcattttcttgtctccttgcaacctgttcagtccctctttctcttctaattgcttcacaggaaagttcccatcacattcatcaaagattttcttactgataaattctaatgaacctcttttagtcttcatctggttgtcctctcattaacattcaatactgtcgacctccacttcctttccctgaattactttctgttgtaacaccacattctttagccttccctcactcctctttgaccactcctgcttagtttcctttgctgggcctttctccctatcccaaattttatcagattacaaataaactttctttttgatgaatagtattgtctaacaacaaatagtttggttttgacatgtcttcatttttgctagacataacaatatttttgtaatatttgggtattgccctctgtattttccttattttttttgccaacttaaaataatcaaaaggcttgggattcagttagaagaatttattcaagtgcatagtgtaagggtagctttctgggacacacaagacagcaaagaatagtagtcattgctcctggtgtgggaaaaagtgaaaattgttttatacaggcaaaaacagaggtacagaacagaattacagtattttccacacaagggttaacatacagatttaagatttgattggctacggttgattacactctaaggggtttgcttaacattctattgtaaagaggtaatcacaaggttctctatctctaaggtcatttagtcagggtttgaataaagaataaggagtctggtcaatgtataacatctcaacacaaaggtcagaaagcaatggtcatgcaccatcgaagaaaaacagctgtattacatgactaagtttccagggctgaacttttctccctgacataataaatttggaagatcttcaaattttacttcttttaacattttatttaaatcagtgaaaaattttcaagtgaaagtgttgtgacactagtgacaagacatatagggctgatgatagaactgagacagaaaaaaatgaactgtgtgataaatggaaagaccacggttcttttgtggcataagaatgcccacagactcaatgtgttcaattgtggtggaaagaaatagtaaagaatttcgaaacatatcatcaaagattaaacccaaatcatagtccaattctggaacttataattttcagctttcttggaagagaatcccgcttcctattatatatgaatctatttttctagcattcccgtacatagctttcattcaaattttagctccatattaaagcagggaggtgcttttcaatgagtaaataaagaattaaagttaccctgtaatcccagctacttgggaggctgaggcaggagaatctcttgaacccaggaggcggaggttgcagtgagctgagatcatgtcactgcactccatcctgggtgacagagtgagactccgtctcaaaaaaaaaaaaaaaaaaaagttactttatcctacaatattcagtccttgtgtgtaaaagaattgcctagagacttgttaaaggaggcccaattccagccccacaattcaagattctgattcccttattttgaagtagatcctaggaatttgtccctttcccaagcacttctgataatattcttgatacatgggattgcagagtgcatttggtaaactctgcagtggagagtatcataagggtcattgtgaaagagggaagacccaagatgatggaataatttgaatggatgcctgaggatgacaaaagagaaaggacaatcaaagctccctggagaaaagaactttactttataacccagatttcagcattgtatataacagagccggtacttaaatgtacttgttaaattaaagaaattatcctaagggcaggaataaccaagtgaaagaatggaaccagaagccttcaaatttagaacaagtgacactgatggtaaattttgctatgcttctaagtttgaaggacagaaaatattaagttaatgatgtttatgtgtaatacagaagaaatttgaagagcctttattacgaatctttaatttagtctatactagatgccagacacttatgatagacattttaatatacctgatttcatttaatactttttaatgttggataagaaaatgatgagctgaagcgtttactaccagaagttgtaacattttcattgcaatatcatggtaagtatttatatatatatacttttcacatatttcaaattgttggaatagtaccaacttgggaaatataaaaaaaatggcatatggtaagtctcaatcataacaggcttattttttggtgaattacaatcaatagcattatatcactgtattcattcctctactgagatgtgaataggggtatgggaaaaaatggagttcttacatatcttattactgtaggctaattggaaatatagtgaaacacttttcagtgactgttacaatgcaaatttacttgtaaatgtgtaattgtatctctcaaattgtttccttaggcactaaaattcaaaatattagttaaaaataagaaaataggaaccttaaaggaaacccatgaaagaaaaggttctgataagcgtggtaaggtggaggaatgggaagaagaagtggcagatggagaggaggaggaggaggaggaggaggaggaggaggaggaggaggaggataaattcaaagaatcagaagtattggaatctgttttaggagacaatcaagacaaggaaacaggggtaaaaaagttacctggagtaatgcttttcaagaaaaagaaggtgaggtggtgttttgtgaaaatcttacaagtgattggaaagttttctaattttattcttggagatttttttaaaattctggagaaaaatcattttccttcttataaaaactctagtctatcatttacaatttactttgaaaacatcgatggtggaagatgaattttttaaattgcctcttttcttatgttagctgcttaaacatttttttctctaggctgagcacggtggctcatgcctgtaatcccagcactttgggaggctgaggtgggcggatcacatgaagtcaggagtttgagatcagcctggtcaacatggtgaaaccccgtctctactaaaaatacaaaaattagccgggcatggtgacgcatgcctgtagttccaactacttgtgacgctgaagcaggagaattgcttgaacctgggacgcggatgttgcagtgagccgagatcgagccattgcactccaacctgggcaacagaatgagagatcctgtttcaaaaaaaaaaaaaaaatctctataattgataaatattatgcattcttatgaaacaggctttgtgcgaagtgcaaaagatgcagagatacacaacgtaatttccctggtcccaagtaaagacaaagacaagattcaatattaataatacataatgttatatgtatatacattagcatgatgaaagaaagtatattaggttgcatgtgacacaaaaccaatccagctggtttaaataaaatgataattaattaattggcctacatagatgaaaagttcagtgaaagggattttagtttaaaaaatgacttgatatagtgtctcacataaagtcagcagaacttcaattctttctccagctttgctcccactttctctgtgttggtgcatggctattgcaaggagtcagctttatatcatttcagcttcaaatccagtggaatgcctatctcttggcagagcaactattttttttttttttttttttttttgtacgttggctctgatctggttatgcgcacatcccagaaccaattactgttgctaggggaatgcaaagctctgtttagctggcccaatctgcctgactcatacttggattgagcatgagcaagaaatgttttcccaaaacaaaacttgggaaatggctaaaaagaagtgtaaaagaaatagatgccaggttgtgaaatggcaaatgttcgctatgtaatagaagtcatttcaatataaatttattaatgacaaaaattcctaaaattataaaattcatgggaatacactgagatctttaggaaaaaaataaatagtaataattgtggtcctcaatacttattacattaatcatgatttttaaatttaagctagcttatcttaacattaaatatttttttgttcccaaaaataatcatattgagttaatcaaatggtgtttgaggagataatcttatgaaaagatgaaaatcatttgtttgaaagtgtattttctttactagaaaaaattttttttcccaatgattagcataaaaatgtaaaattactgcattttatttttagaccaggaagctaaaaattgctctggccttatctgatcttgtcatttatacgaaagctgagaaattcaaaagctttcaacattcaagattatatcagcaatttaatgaaaataattctattggggagacacaagcccgaaaactttcaaaattgcgaggtaaatttttgtgactcaaatagatgaaatgtttaaatgagttagattcactgctagggtgttaagattgctcaatgatatttataaaatgtatattctcataaaatttcaacacatttaacataatttagaatggggttacatacctcaggtctcattaagttttatttcatggaacttagccattaattaactttcctaagccatgacattttgattgagaatgtccgatgtggccacatttgttgagggctggggggctgtggtgagcagcttgtataggagagcagtgacagggctgcagagggaggcagagccgaattagaaggcttgaactttgtcctggaagcgaaggtgcgcaggagaagattgaactctcaggagtggcatgatccactctatttctaaacgatacctctgatagcagccaaagggtgagattgcaggcaggaaggcggtaataaagatttctggcagtgagagtggagacaggatgaactttgtggatttaataggcattgaagagggtagggttaatcagacttggaggctctatgcctatggtgaaggaaggggaagaaatggcgcccaggctggactaccagatggctgtgcagagtgtgcatgccccactgcacacctgtagaggtgccatctgtctctgcatcttcctttcactgcctctaattctaaaactgaggtggttattctgtttggcagtgcccaaggtaaaacggggcctgagaaagagaatagaaagaagactcattatgtggggaatgtcccaaacttaaaagggaatgagcaactaacttaagagccaggtgactctgctaatcctcaaaaaatggcagttttttttagtagcaggggtatgggggaagtaaggacaataatggatacaaaactatagttagaatgaataagacatagtatttgatagtgcaacaggtgactacagtcaacaatagtttattgtacatttaaaaataactaaaagagtataattggattgtttgttacacaaaggataaatgcttggggtgatggatacaccacttatcctgatgtgttactagacattgtatatctttgtcaaaatatctcgtgtactccataaatatatttatctatgtacccacaaaaattaaaagttaaaaaaatgcaatctaccatcttgtgtagaaataccacagaaggaaaatcagcacctgcaattgacttgagaaaagctgctggctgtttgggaatgcggattctgaaagctttaatgattaaccttattgggctggtcatagatacccaaagattttgaagtatactttagttcatattctctaactatctattagagagatcctggattttttaaaggctcttttccttttttaacctgtgtgttgtaaccaaaaatcaattcagtaggtctggactacagttaaataatagaatagaatagagtagtatagagtagaatggaatgggatggaatggaatggaatggagtagaatagaatagaatagaatagaatagaatagaatagaatagaagaaaagtgtattgcaagcagtaataataaatatggttttatgaagcaattgtgcatcgtgcatgtgagttggattgtaaaatgtatttcttgctgtaaggtgtggttaagagagtttgaatgacatgctttactggtctctgttccttcatgttgttcatgaggacaggtcctcatgttgttcatgaggacaggacctgtaggcacagcataaattaattataattgtattactctcatcatattaaatacttgcaaaaattttggaaaggaattagatagttctgagtagagtcaaagtataacattaccatttctttgaaggggcatagagcatttttcttgcaccaaaagttatagtaaataatcaatgatgtctgcaaaggtttaacttcaaggatgccaattattattataaacataatgaaaatcattaaaaaataatgttgtagatgaatattattgaaatgaaatgatgttcacattattatagtaaataaagataacggtttgtgaaagggaacaaacattatcattcaactaaaaattatacacatacaaaagaatgggaagatatatgtgaaggagttatcagtggttatcagttgaatgatgacatatggtttgatttgttctttgatgtcctcctattttacagtaaacatgaactgtatttgtaataacaaacatgtttattttctaaaggttaatctcagaaataacaaaatcatattatgttatgagaccttagtcatcattcacatttattactttgtaaatgagaaacattaagactcagaagagtatgtgttttgcctaaggacagacatctgttaggactagataagggagcatgatacttggacacctatgctgtatttatacacacatggtttcaaaataaactttctctcaaggaatgtgtaacttttgaaaataaatattgataaaattaactgtaatttttaatttgacaatgcttcctaaataatagtatttaggatgaagggagaggtgattctattctagttggtttagcaaatgaagtgagccataagcagtaaccattctcccatgatgagtcactatatcagcaggaatggttgcagaaacaggatctgtttaatgaaaaaagaaaatccttggagaagcatgaaatttgtgttcaaaaatttgaagaaggtgccaaatggtaaagggtttaagttagtttgaatctcaagtgacttaaatattatatagacaagaagaaacacaaagaatatgtacagaaactaaaatagactgtgtgtgtatgtttgttcctgtttgtgtgtatactacaaatacgtagagattatcccagtaagaacgacatttgaaataattaaaagcattgaaagtttttcaatggagacatgtaaacacagattgaataaactttgggggaagatgctggagtgaagggattggaagtcgaactggacaactttggggtgcctttcaaccctgagaacctgtgaaatgttcagtaggattaatttagctggaatcgtatagctttgtgtgacttccatatgattctgccctactgtgaaaatcaaagtggaaaaataataagggaaaatgctgcttttgttttgaaaaatgaatggattatattttggagttttatgtattcttacaacaaagtgaaataatttgggtgtaaaaaatatataaattatctaatcaattttttccttgaatgatcagtgtacatacattttatgataaaattgtcactaacatctaaataatagtgaattatactataaacataaaggcatggatttattttgatattcatgaattgcaaatttttgccaagacaatacatatcaaaattgttgaaactattatagaattatatgatatatatatatatatatatatatatatagtggctttttaaatttatttgaattctttcacaatgttttaattattctttttcagtccatgagtttatttttcacaccaggaagttcattaccagaatatatcccaaagcaacaagagcagactcttctaattttaatccccaagaattttggaatataggttgtcaaatgggtatgttatatacgatattgagttgtttgcagaagtaacataaaatgaattcattttatgaatgtatgaaaaactcgtgaaaagggctttctgtaaaagattttttagcccgggggctttggggtcaggcactaatggtgggtcatgtgttgtaagagttgaagtcattcctatctgggttgaagcggggtaaatctcagtgatggtttggggaatggtggttaaattcacgaggagttaatatgagacatgtgtagtggaggaagggaacaaggaaacccaaatggacattgaagatcaaattcctttgcttgaggtatgctcaaggcctcttcaaatcaagtgacctctatcatttatactttacatgagcttctacattcatagttttgaaaagtgaataagattgcctaacttggttatttgccctcaccagactcttattccaaattgaacagctagtacagcactgcactaacccatcagaaagtaccaggtgttacccttctactggattgtggcaaggcctgtaggtgtgaggaggggggatattggggctgggtggagggtggagtgtggtactctctacagtggctatttaccaggctatactgaggtacttccatattgtaacgacaattattgctttgcctgtttctcactttctcctcaagtgacaacagcatctcatggacttgaaaatttatgacatagttgatgtctttacctcttgcattcaatgcactgatactctttattctgacatttcttaagtgttacctgacatgaacattgttattctgtaatctgtactggataccattttgatttctttactcaaagctgtgtagtaatttacttacagattaaactttgcaactcatcaatatacattaatatagacatggcaggagaaagagttttaaaaatcatgaattattaggctaatgatacttgctcatagaacatttggggacatagaatccattattagatttcagtaagtggtttgtgttcctttatttgtattctctattacctgacaatgtcaaaatacttctttcttacagtggctttaaatttccagacccctggtctgcccatggatctgcaaaatgggaaatttttggataatggtggttctggatatattttgaaaccacatttcttaagagagagtaaatcatactttaacccaagtaacataaaagagggtatgccaattacacttacaataagggtaagattaataaattttcttttacattttttggttattatataaactagatagtgtacattagtattttgaattccactgatttgcttcaatttcttttaaatttctgttaatcttttcaggtactatatgtgggtagtattccagcatccttctatatctgaaaaatgtcttcctgttgtaattttacatgaatgattatctgcctgtgaattgacatattgaggctaaaaccttctcctctcaaagttctactatatgatttcattgtatttaggcatttaatattgtgagatacaggtctcagttcagcccactaattactttgtgggcatgttactttttctcgcctttgatgaattttacctggaaattttaggagcccttttcttttcctcagtctccacaattaggcttttgtaggtcaggattcttccccccatatgtctgtgaatatcatttgattacttaaaaagaaaaattatccatatgtctttctccagtatctgtcttcagtgtctgttaatttgtgtcaactttaacatattcccttttcctctgcatgttgggagagcttttttgtttgtttgtttgtgaaagagcgcgctttattgggaagcagactgctgcacagtgaccaacagacaggccacccagtgggcacttacacatcgtactccaaaagacacaggatgttttgctaataaaaatcaatgggaacagagattcctctgggcaactcccccagcctcatccctttcagggactgagaaatcacccaaccattttcctgatggcagccgtagttcactagagatacagcccctcaggggtgtcttcctgtttcttataaagaacattttctttagattttttgaagtcttcatttgttactttcattctacgttctcttaaggccatcagaccagcttctgtacagactgccttgatgtcagcaccagagaggtcatctttagccatgatcaagtcgtgcagggttacatcatcagccagcgtcatcctgcttgtgtgaatctgaaagatgggcttcttcgtcttttcatcaggcagggggaactcaatcttcctgccaatgcggcctggtctgataagcgctggatccaaagtttctatttggtttgtggccatgatagctttcacatctaccctagaatcaaatccatccaactggttcagcagttccaacgttgttcgctgaatttctctctcaccaccagaattggagtcatatctttttgtcccaatggcgtcaatttcatcaataaacacaatggacggtgcacgttcttcagcaactcgaaacaattcccgtccgagtttgggcccatcacctaggtacttctgaataagttcagagccaaccactctcaagaaagtggctgaggtttggtttgctactgctttggctaacaaggttttacctgtgccaggtggaccacagagaatgacccccttggaggctttatacccatctcttcataatattcaggatgggtgagaggaagctccacagattccttaatttcccgaatttggttgtccaaccccccagtatctgcataggtctcttggggggccttttccaccttcatcactgtgaccaggggatccatgtcatccatcagcacccctatcatggtatgcaccttgtggttgagcctgaccgagcagccaggttccagaagatccttgtctgcaaatgaaagaatgctgatgtagtgttctgagcccacagatgtagacacgatggcatgattgtcatcaatgatctcttccaagattcctactgacattggggtccccctcagatcatccacttttgatcttttcccttcttgcttttcttctaatggtttcatttgttcctgatttctaatgaattcttcctccatgagaagatagtctttaattctctctaacttcagtaattttaactggcactgagtgtgaggtgtcaccagtggcagtttgctggcagcatctggtccctttgttttcttcttctttttccccactgtagttggtacaggaggttcatatttctttttcttgtccttgagttgttagagcttgtcatccttcttgccacctccaggaccatgaccaccactctgactttgacccatcttgccttggcctgggagagcttttaacattttttctttatgttgatgattcaaagtctgtatttgattttgttctttactgatttcaatgtagaaatgatttttttctcctgcataattagtcctcctgccccattgcggttgacctcatattgcttcctttttatttctgtctgtatcccacctagcacctttcctccagactctcgtcttattattttagcttttattttatcacatcctgtaaaaccttatggagcataaaagcagttgtctaagatttgtttccattagtaaagacttttcaaaacgtttttctttttcctctataacctaagtgctatgcttattttctttttaaaatgtcattaaatcttttgaaaaacctctagttgctttttctctccacttacttatgagcagttctattttaggctataactgtacctgttgtttgcaaatcaatagagtggctatggtttcattggtccctctttctatttaactagttactcctagaactgtataaaccatctcagatcctacctggaattttgtagtgtttatgtttctgtccctggccagcaatgtcattacttagtgaagctctgccagctgctgagcgctcctctgctccccattacctggctgttagagtgcaagaaatgctggggcctccagaatgtgcttctcctgcgacttttcctggctcagctcctttttccaccatcgtaataccacaggatttgggaagctacactccacgtctacttcaggacctagccactttatctcagctgagaatgggaggattgagagctgttttccagaaattaatgtggaaagtatagcaaagatgaccaggactagaatgatcctgaccattgcaggaaacagtgcctgtgaagtatgtagctggcttttgtattgtctgttaaggagtttgtgactctgatgtagaagcatttaatggataggcagcaattgcctacaacactggattgttggtactccttcaaggtctggcaaagaattaactactgacttcactttacaatgctattataatgttgacatctttttgtagttgatctggtaaaaagaagtggcaaatcagccactttgaagagcccttccatttctacacacattgctcttctatgctctgggactggactctccttttaccccctaccttccaagtgattgtcatttttacttgtggcttcctctttctctgccttcccttaagatatttatgttaactaaagtctttccttaaaccttgtctcaaactattctccttggattctgttacataaacattcatagtttcaccaccaacaatgctcaagtctttaattggacatgattttgggaatctaaaggcatattttagctcactgagcatccttacctccttaatcaccattctgtcaaatttaaaatagtaaaacttgaacatcccttcctaatcaaatctacttctgctcttacttaaatgtcaacaaattgccccattcttccactctgctcggactagaaaattgggaaccattctaatctttcacatctccttcacatcccacatccagaccaacgttaaattctgctgattctattcctaaatattttccttctccattctcttgatctgacctattttgctgctctcctgtatcaggaatttactacctgtcatcaggtctatttctttggcttcctgatggtttcaggtagcctgtctcagtcctccatatctattctccacaagttgaccggagagattttgctacagtgctaatattatcatgcatacgtaatatttatttgtgtctcttgactactatcttagtcaggccttgccctacttgcctagccctatctctcaccacttctagcctttcatcctgttctacaaccatgtggaactaggatccttctctaaccatgactcacctccacgaattgcgtaggctcttcctgtgactagagcattctttcagccttacctgcctatttcattttgactcagttttcaagacttaggaatcatgtctttttgaaagcattttcctaggctaggttagctgtgcttcttttcatagctttgctgttttccgtaacaccctctgcatgcatatattatggcatttatcacaaggttttataattgtttatttacttgtaacttgtcttctccatttgtctgaggattctttaaggataagagatgtgggctgggtatggaggctcacatctgtaatcccatcactttgggaggctgaggtgggcagattacctgaggtcaagagttcaagaccagcctggctaacatggtgaaaccctgtttctactaaacatacaaaaacttagctgggcatggtggcatccaactgtaatcccagctacttgggaggctgaggcagaagaatcgcttgaatccaggaggcagaggttgcagtgagccgaggtcgcaccgttgcactccagcttgggtagcaagagccaaagttcgtctcaaagaaacaaacaaacaaacaaacaaacaaaaaacagatgtgttttgttccaccttatttgtgccttacacaaagtatatgcccaatatatctaggttcattgaacaaatacattatttttcctgttatgaatagtaaagagaacatatgtgctcttttattgagaaagtgaaggtggaaggcagctagtgtgcacaaatgctcacaagtgccacgtttgtattctgaggagtctcttgttgaggtgtaactggcatggagagttaatgattctccaggaagctgctgccatggccatgtgggtctttctctgttgcctctatcactctagggagctttgtgattactttatgacttgctcagatagtagaaggcacgatttgggaatcagagagccaagttttactataagctttcttaagttcttgatgaaggcatttgacattgctgctttactcttcgtcacctgcaatctgagagttttggtctaggccagttattttcaaatttataaaagctacaggactgctttctaaatccaaaatcttatgggtaaggccaatgggtaacaacagagttgaccactgagggcttattgtttgatatcccttcctctgcattggctcctgtacaaacaaatttgttaatttatttacaaattatttgatcaatgctccctaaaccaggggtgtccaatattttggcttccctgggccacgttggaagaagaggaattatcttgggccacacataaaatacactaacactaacgatagctgatgagctttaaaaaatgcaaaaagaatctcataatgttttaagaaagtttatgaatttgcgttgggccgcattcaaagccaccatgggccacatgtggcccgcaggttggacaagcttgccctaaattctcattcagttttcatattcaattatgtttttcaaaattagataattttttttttctttctggaatgaggtacaccgagctgaacctactccattttgggaagggtctattacctgtaaagtgatatttagcgggtctatagtggtattgggaccagtgtactatatgtttatggccattgttctttctagttactttgatgtctaattatgctgatgcccattccatgctgattgctaaacagttgcatagtcatactggcttctagctaatgccgtaatctgtggaattaggaaaaatcacacattagtgttttttcttttcctttcttttctactccttctctccctccttccttccctcttttcctttctttattcctttataatcaaacttaattatatatttgtttctccttatgtaaccttcagaaattggaattatgcctcaatttttataactgcgtttttaggcttatatcttctatctcttagcctaagtcagtacatttcaaatatagttttgttgtgtgctcattttgttccttaaattataacacatttttgcttcaacaattagcttggcaaatacaagtttaaatacaattattattaattactttgttaagatttttttgatacccagtccctaatatacatatgaaataactgattttgtgaaactcagaaaatgctatcacagggagttaaatggtacattttttaaaaagtaatatttctattgctttaaattttttccagcatatatatatatatatatgaattcaaaaacagtacgttatcagagtaactcgacctgaattccctgaaatgtgatcataacaaatgattttaaaacaaaaatatgttaataaatcaaaaattgtggacattgtggatttcactataattttgtacatattcttggtgtttatctactgataactgaggataaaagacttaaattttaaaatttgtattgtattccactttcaatgtttgtgggagctgacttagagtccatcaactttttgtaatacataacttaattttgaaataaatggtgatgtaacttaatatcttgctaaattcttatattcatatatatttgtgcagctcatcagtggtatccagttgcctcttactcattcatcatctaacaaaggtgattcattagtaattatagaagtttttggtgttccaaatgatcaaatgaagcagcagactcgtgtaattaaaaaaaatggtgagctcctgatataccttattgaatttccattagacttcttgttggaaagcttacaaattatatgttgatagagtttttgtacatatttattattcataagacaagggttttccattatgtccaaaattagcaaaatgttatatgcaacaaaaacatttttataatgattaggttgtttagctgtattttcagattatgaatacagaaatgtacctgaccttcaaaattattgcttaaaaaaaatttacctcttttttatgttttctctcatatcaccgaattaagaaggcattttaacagcctcaaatctacttagcttctagcctttgtattaaatcaaaaatttgtgatttttgacacagcatattatatatttttataatgaattatttgaattattttagattaaaagtctatggcttctgaatcaggctaaggatgccatagaagcctactgatagaatttttggataattcagtcatttttgccataagggaagtgaagaattaagggaaataactttggtaagattttcatcattctggcatgctatgacatcttacacagtatagtactggcattgccatttcttctctgaggttgaaatgactaaggaaattagaaaaggataggttcctgggattgatccctggtcaggatcaccttgaaggagacattggaactgattcttgagtctggaatcttcttcaagggatattctcaaagcaaagtggacttcattccagagtctagaaatatgctccagatcaaatggcaatgacagagtagcaggcacagttttctttttcttcttggataataatttctaacaatgtccatagtctgcctcctttgcactcccctgaatacttccagtgtggcttctagagcgaaagtcatggaaaaagatttggaaagattttattgccttatcctatgttatcaatgggaagggatattgatgatgacttcctgcctcatttgacaccctttagagttgaaggcacattgctacggctgtgtccagagatagtaactgctgatgtcatgaagcttataataatctatctcttgttccctccatcctctacttgaatcttcatcacaaaatgcttagaaacttaatttattcaatgcaccccttataatactgtgattctagaatttgtattacctccttggattttatgggaatatccttgcagaaattcaatttggttcatcaaacattactgagcctctgctatgctaaaagccttgtgctgagtagtaaaagacttaaaatctgtttattaaatgaattcttatatatggaccaacgaactcttctatagatagtttatagttcagtgtgaaagatgatgctataagtaaaataattatgatttagagtaattcgtgcttcaagaagagtacaaagatttgtactccaagggggcacttttggagatggttcttggagaatgagtagaattttttagagattggggacaaggacatttaaggcagaagccataatataagtcttaaaatatgaagaaaatacaatttaaacataccagagacagaacacaagtcctaaaatatgaagaaaacacaatttaaacatgctagagaaaagccaagaaactcaagatgggtggaatatagggtgcttaagaaagattagtgagagataaaatgagaaaattatttagggagggtcatggaaaatctcaaaagccatgctaaggtgtcaggaactttcttttttctagaaaatggataaaattcagacttttaagtagggctataactttaacagagttgagtgttaggtttttttctgcagatttgagaagaagtatacgagagggaaatgagaaatacaaagtagagtcaggataaaatttcagtggttagaggatataaaagtcatggtataaaggaggccgtggcagtaggaaaggaatgggggatgtaagtgagaaacactgcgcagaagtcaacgtccagatggctggacaagaagaattttaagatgatttagctagacatgagagtctgggaggaaaaggataacatttggataaaatgtggaaataattcttcagttttggtcatgtctaggataactattttcatcactatcaaatttggtatcctggtttacttttttttatgttgacaactgaaagtgagggctttctcttataattaatccatattattgtatgtgtgtgtgtgtgtgtgtgtgtgcgcgtgtgtgtgtgtgacagagagagatacaggaggaggatggaagggaggcagaggcacatgtgtaatgaagtaggattggaggaagaagaaatcagtataaacatttctgcagatgttttgcagtatctataaagaattgactctaaacctgcctctgtaccccatgaaattatttctcttcttaggtcaaggtaatatggtcattattccagcatgagccaattagtttactatttctgtgggcatagactgcaccctagattgctatgtggtaaatgtgctcttgtgaccacaggtgaaccatagaaaacatagatatagtataattagaaattcatcagtgcttctggaaatgtaagtcaaagaacaaaaactattgacatagcaagtgtagcattgcctttgtaaatgaaaaataatacacatgattcttctccaaacctttgagtctttattaagcagaatttatatttaatctggatgtgaatttcttgattctgttaaattacgctttactttttggatgatttgggtcatactgtgacacgatgtggatttcttgcttggcagaaattggttgcttgggatgatttattttcttagagattgaaattcatcaactttggactttgaaaggagcacttagtctaaagaaggatcaagagttggctttagtttgttatctagctttcagtctaacaactaagtatggaactcttcccataataagactgactgtattagtccattttcatattgctctaaagattctacctgagactggataacttacaaaggaaagaggtttaattgactcacagttcctcatggctggggaggcctcaggaaacttagaatcatggtggaaggtgaaggggaaacaaatttggaccttttcatgtggcagcaggagattgctagtaagagtggggaaaactgccttataaaaccatcagatctcatgagtactcactcactatcatgagaacagccccctataatccagtcactttctaccaggtgtcttcctaaacacctggggattacaattcaagatgagatttgggtgggggcacaaagcttaaccatatcaaggacttagtatagaaaaatgatgttacttaattttcttcatttctcaatttatttgctaaagaattgcctaagtacatcagtcatattgcataatgattaaaagcttttgctctgaagtcagactccccgtttttgaattcctgatctgccacttaatgaccacatatgtgaaaccttaggaaattatgtaacatctttgtggctcagttttcccatcccaccctgatggggtggttatcagaattaattgagttgatccattcttagaacattgcccagcaatagtaaacactcattattgtctggttattattcctctcacactgagtatattaaaaacctatgtgctctaaacacaagatattattgttaaagggttgaaaagaaaaagtttggagaacaaatgtaatctattttttcctagatatggtatctattattctttgtatcttctttttttatatttcagcttttagtccaagatggaatgaaacattcacatttattattcatgtcccagaattggcattgatacgttttgttgttgaaggtcaaggtttaatagcaggaaatgaatttcttgggcaatatactttgccacttctatgcatgaacaaaggtaatgtccctaaaagttagatgattgtaccagcatttaaatataacttgtgtatatcaaagacacattttgacataccaaatagctctatcataaagtaggatgtaaaggaaattttatgtattgacacatattttttctctgtggaattataaaaatgtgttctcatgtggaaggtggggtgggggtgtgggactgacaggaaggctaattagacaaacttggcatgtataagcatttctttacatgcatcctagttcttctgtttcagtaaagagtagtcatgactaccataaagaaatgatgatgggtggcaaccagaagggagaagcagtgactcattcttcctgcctgaggagaagagattgggagcctgagactatcctttcctgaccccttttcagggctgactacctttatgttgcagagtcacctttccagggtgatttacactgtgctcccaattaccttgtctcaatatgcttacttttctaacagcatctgagatgtgcctaggaaacaggtcttcctgaagcagaagggtggtggctaattttggatcatgcagcgctttgcggaaggagaagtatgagctgtgtattcagttttgggcagttaggaagtcagaatagaaaatgcaaatatttaatttttgtggaagattaatataccagatgggaatataactctatagtcatggtttttaatgtaggcttagtaaagagctcttgtttctcagcaaggctattggagacaccactgattaattggttattggtctaattagatataattccttttgcaggttatcgtcgtattcctctgttttccagaatgggtgagagccttgagcctgcttcactgtttgtttatgtttggtacgtcagataacagctaatgataaatgacatatcattagctatgcatcgcaataaaacagccaaaatgaatgtctttatgttttcttttttaaacataaagaaaaataattactcataaaactagaaatattgagcccattcacttaaaaatatacaaaaataaatcagtggaagaaaagaaaatagaaacttcagagggtcctaacccagcatggcgttcttgtttgctgatttctcctgcccttctgctgctgagttgttttcaactggcttgtatcatttttaattactagaatttataagcttttgaaatacatctaattataaaatatacattggcaaatatttagcagtataaaagaaatgtgaaatctaagagtgttttaacttctagacacccactactgcgtatttttgtgggaaggaattagattgccaggccctctgagccttttcatatcctggagagtaattagcccctgcattcttatgctagttcttagatgctgtgcactggagttggtaccctgtaattagacagccatttttacgagtgtgtataaaattgatttgcctgcaaactgtattcagactccgtatctataaaagagatctactgtgtggacttacatgcttggatcttaaattaatttgcaatgtttctgaatctatactaaatatactttcaagatggtttcttggtcagagatgaagttcctgtgctatctcacttgctggacttcttaccaacagcaaaactttgctttattaaatgtcatgtagaacaatatggaaccactgatattaatactaattctaccacattgttgcatagtagtgatgtgaaagcacccagcacaaagtttgacaaagtcagggacttttaatagggacttttgcaatggaatcctaactaataactaaaataataaaatgtttgggatgtgtactaacacgtgatatctttatgaccagaaaatataacccaactagcatgttttactattatcatggtttactctcagtactaaatgtttaaaataaacgtatcactgagaattcaaattcccaagccataggtagtaagaaatggatgtggttactaagtgcacaatcttccagtttccacctcaagggctgttggatttaagatcagtgcacacccttcccagtagggatgcacagccaattcttagaaagatgcctctgttttgccagataatgaatggatcttatttaaatcatctactgttcagcatgacagcaggagggagtttcagcccattgacccaacgctttacccttccctaatctcctaaggccttttgaagatctggaattccatgaaatttaaaggctttaatcaagcgagttttacaagagagttcattaattctgcagtggaataaacttctcatttataccatcaagctttgaaatgagagagaaaaaggatatattttattttctctccttttctttaggtaccaaacttatctcactaattttgaagaccaaattgttcattttgaaatattccactctatattaggaatacggactttgcgagaaatattaaattattttatttcttgttcaagaatcttatgatgtcttgaaacatttttggttccattttaaaatttgcattatttatcatttaatgtccctatgtattgaactagaattttgattagaattttctcacaagaactattaacagattttattcatgtaaaactccagagtcagggaatgttctcacatttagaataggttgggaatgttgtgagaagatagatttgattaatgctttttaggtacaattcatttacaagaaaaaattgtgttggtaaatgtaagaaaacatcggaaaaggctaaatgaacccttgagactgtggcaacagaagattttttaaactttaaagtcttagtttaaaagtcagttcctcagggaagccatccgtgttctgctagattaggttatattccctgacttacgcttctttacaactgataatgacagtcaggaaccaactttgtactatcagccagactttagtgttgctaggagctgccgtggagctcacagctaaactgtcgtgtttccttgttgaacaataaacagtttcacagagcatcaacccggacacagccactctgtaccatgacggaacacgacaaagacaagaacattccggaatcatgactgaatgcacggcaaaaacatgaatatcgtccaaacgcaacaatgctacacactcccctatcctggctgacataaatgactattaatttattaccaagtatcgctttagccttgatttactcctctcatcatatagataagatttactccaatcatagaattgacccctgttcttgacgacatccaaatacagaggagaactctacttttttgaaatctcccccagatcatttaatccaagcccaaatccaatagtgagtcctttctaataccctcttactgagatgccctatggcttcccatgttgtgtctccttttgtagtgagcaatagatgcaactgtgtgttcctggttgtctttggctggacaaattctgacttcttccattatcttgtacttacatgtgttacagaaaagtttaattatgttgttaattttgagggtttattctttttctggttgtggttggttagggtctcaaatagaagatgagtacagtctctctacccagacttatctggacttttgtctgggaaatgatggtcactggaggtaaatgacaggctggttgctaaagagtaaagttgccctgtctctgaaagaggtgtgaggaagcttccctgtagctgtaaaaagaaggtctccattttaaatgttggatataagggagtgtcttgagggatgtaaaacatgtcccttatacagagcctctaggagttctagtcaaaatctttgtgtaaatctcaggaaatttgggagtcacactaggaagaagcttgtgctgttggttagtgcagagagaatggaatcccttttgagtgaaatgcttatgggattgaacaatggacattttactgggggactatatggactggatttcatttttcaagagttcttaatatccctttcttctcagtactgcaaaaacatctgtttaattacattactttccaagtaataacacactggaaatatgtgtaccaacaaagggttcttatgatgcattctaaattcttaggccataaaatttgagcattctataggattcatagttaagctacttctaccagccactggaaaccctcattccaaacactggagggttgaattgaagtggatttgaactgatgaagagatagattttcttttatgtatcttctacgcttacacaacagctcagcacacctgggagctggtgttaaatgcctttataatgtacctgttttcagggataagtgccctttttctactttccatgtgtacataatttaactttcacactttcagtcatcttttccattcttctcgcagggcagtcttttttctaatgtattaatcacaatatctgcaacgttagccagggcctaatgtgtgcctaatattaataaaaattaatcttaatcctttcagcaatcttacattgtattgttaatgacacaggctcggaaacattgaggcaatgtttacaggcattataaacattgcctatggtttacagtaaatgacagaaccagggttattaatctagggccatctggaaaaaatgaatgttgtcacttaatgcacaatacacaaaaattaactcaaaatgggtcataaacctaaatgaaaaagctaaagttatgaaacttctagaagaaagcagatagaatatctttgtagtcttgggataagcaaaggtttcttgaaacattaaatgcatgaggcataaaataaatgatagagttgatttcatcaaaatttttttaaaaagaacttctgccttttgaatacatcataatgaaaatgataaggtaagctatatatatatcaaaggacttatatccagactatatgaagaatacttacaccttaataatgacaacccagtaagaaaaatgggcaaaatatttgaacaggcacttgccaaaaggaaatatgtgaatgattaataagcacatgaaaagaagctcaatgccattcatcatcagagaaaggcaacttaacactataatgagttatcgttagtattgctaaaataaaacacaaatgaccacaccaaatgttgaggtggatgtggagaactgaactcaatcactgctagtgggaatgtaaagtgggacaatcactgtgaaaacagtttgaccatttcttacaaagtcaagcacatccctaccatataactcaagctttttggtcctagatatttactcaagggaaatgaaaacacatgtccacacaaaggcttccataactgtttatagaaggattttttataataaccccaaactggaaacagcccaaatgttcatgaacaggtgaatagacaacaaatgatgttatatccaatactatttaatgtaataaaggaatagactattcatacatgcattaataacaatgaatcaaaatgattaaaatgaatgaaagaatgtaggcaaaaggtagttatgtactgtgtggttccatttattcaaaagaacaaaaaatgcaaattaaatttctatagtaacagaaagaaaatcagtgaatggcgttagggatggaaagagggatggattaaaaggagccacaagaaatttttggcatggatggaagtgtttatctcaattatcatgatggttgaatagggatatgcttatgtcaaaacgaatcaaattgtatacttcaaacgtgaagctttattaacttcaactatatctcaaaaaagttgaaaaaattcaaatcctgaaaagaaaaatagcataattctggctttcttttgagcacgctgaccagtaacttgtgtaaatgatgcatgaaaggtttatttggctcagatgtgacaatgtgtgttctaacagcagtattagccagacctctaattggatcaggtgatagaagccttcctaagtggggacacagaattgaatgaataggaggtgtaaagcactgttctagactctgtggacagctgggcttgctagaaacttgtatagagttgtttgcataatatttatagcaaatccacatatccacaatgtcattcatttaaccaatgagagttatatttctcatattctttatgctaattgacatactctcttgattgaaatacatttatgtgcatccacacacacaaacacaccacatacacaagcacacatgaatatggatacacatgctcacacataaatatcaggtgttttatgacaaattattaaagtacaattttaaaaccaaaatggaaggatagatttgtgcttatattttttagatctatctacatgtttagaaaacacaaataattatttttgttttaaatgtagaccagttgttcttaaccttatctgaacactggaatcatatagaacattttaaaaatactgatgtcttttctcccttttaagagattctgatgaaattggtgtggcgttctgcttcagctttgtgatttttgaaaattctttaggttattctaaagcagtgctcttaaagcactgcattaggtcctcagccagtgaaaacagcataggggacattttaagagacgaaaattcacaggcttcaccctagacctcctgaactggaaactcagaaggtctggccaagcagtctgccttctaaccagccctctatgtgattcagatgcatgctcagatttgagaaccactgttctaatcagtggtcaggactgaaaacaactagccttgcctctattcattaccggtttgattgcacggtgctgattcagcctatgtcgtgtgcctggcttagctttctagaaactgtcttgctcgccatctttcctcaattcatatgctggtttagattttgctctctggatttaaagtgctcacatatttgtgcatcatattgtggcaagcagcctgaccaggatctgctgttggaatatgacagtatcttgtgttcagccaaagccctgatacagactccccttttctacatcaaactttctggagagacagagctttcttccctggtaccttttattttccttttgggaaagaatcactctcattcatctttatattgttcatggtgatttatgacaaatatctgttcagtaagcaacaaagttgtttgaaccagatgttctgggaaataagaaaaacagttttgcttttacagtctttgggaatctgaagttttaaaaaatgaggaatgcatagatcttcctgttattattattttacatggctgtgatcaatcttatatgtgtgtttccatttcagacctcttcctagcataatctttcccttctgaccttctagtttttctaacacctattaccttttaggactttgctgaagaaagaaaggtaagacaacaggaatagttaagtgggcaggcaagttagtaataattcattacatttatagtaatgcttatactatagtcctgcttattgttctactttcatcttgctagactgattattctttgtagtctacaacagagtcagacagtaagaaatacactcccttcttagacacctaactataaaatgaacataactaccatgtatgtaagtgataacaggagagaacagagtcctcaggtggttgagagtactcaatgggatactagcaaggcaaatgcaggcattttcactgaagaagcaaggggtcaatgtactgagactgatgctcagtttgctaaagggacatctgcaaaaaagctgactatgggacatggattatattagattctttcagttacaaagtacactgaacctggcttggtggtttaagcaaatatagacatttattagctcatattgctaaagagaacaggtaaatctggtctcaaaagaggcttgacctaaaggtcaaacaacatgattaggacctggtttctttctcttgttttttcagttccatgtattcagttttgggtccattttctagctgtctcttgcctcacagtcccaagatggcaatgtctaaggacacccatgcaaagcaggaagaatgagaaagacacaggtctattgactcgtgttgatggtataattttttttcctttctttcaaaaagtttttttttaaatagattcagaaggtatatgttcaggcttgttacctggctatataattgtgatgtttgagtttctaatgtgcttgtcattttaatagttaacattgtacccaaaaagtaaaatctcaaacctcacccccctcccacccttccctttttgagtccctagtgtctattatttacctatctgttcatttgtacttattgttagctccctcttataagtgagaacatgtggtatttgatacttctgagttatttcacttaaaataatggactccagctccatccatgttgctgcaaaagatataattttattctttttcctggctatgtagtattccatggtatagatatatatatcacattttatttacccaatcaaccattgatgagcacttacttggttctatgactttgctattgtgaatagtgcagtgacaaacatacaggtgcaggtatgtttttgatataatcatttcttttcctttgggtggatacctagtggtggaattgcagagttgaatggttgttctgcttttagttctgtgagaaatacccatacttttttccacagaggttgtactaatttacattcccaccagcagtgtatcaatattctcttttatctgcatccatgtgaagatctgttggtatagtctcaatgtacctagacttctataatggttataaaactttccccaaaacagagtggcttgaaacagccatcgatttgtttatgagactacaatttggctggactaagctgatttgctggttttaccaggtgggagagggaggaggagagtttactcatgtgactgtagccatctagaccagctctgtccaatttgactacttatatttaaataaattaaaatcaaatacaatttaaaattttgttctctagccacattattaatcacatttccagtgctcaatagctgtcagtggctagtagctaccatattgaataaggtagttacagactattgccgtctttggaagtgctgatctagagagttggctggggctagatattccaagatggcttcactcacgtgactggagcctcagttgaatgctaacatagctgagtcagctagtcttctctctctccccaggttacctttcatcccagggttcttcacaggctggtggaagtgttctaagcggacaagagcagagggtgcaatctgtgttgaggcctgagcatggaagtcataccataccactttcaactcattacagaagtcatacaacatcactttcactctatcgtgttagttagagcaaacaaaagaccagcctagcttcaagcagtggaacattatgctttgcctcttcatgggagtagttgcaaaaaatttgtgaccatgtttcatctactataatgcatgacagcaagaaaatgtaggtttactctctcaagaataatggttggcagactgaaaatgttagattaaatgttgattggagagaattaaaattctgagtttaggaggacattcatgtatttgctcaatttatttgtccaaaaaattcatagagtgagaaaatatcacgtgccaggcatagtagctgaagataaagtggtaaacaaaaccaacacgcttccactgtcataaatctcacattctattgcagacatgtaaaacaaacatacaaaattttagatagttaccagaggatagtgtgaaggtgttactttagagagtaaattcaggaaatgagagaaatcctttagcttctctaaatgtcattattatattaagctattgtttgaatttaatatatgtggcttatatttaaaaggtgcaatgaatggaaaagcatttaaaatgtagttccaaaagtatttgaatacatgtgtttctatatgcttttccctctaatattctttgtctttcgattttattcttcacagttgtggtagacagactgtaagatatctaccagtgatcttcacttcctgatactcacagctttgtgtaatccactgcctttaaacaatctgcttttatccaatagaatacagcaacatgaaggtgatgtcacttctgattgtgacttccatcttgctagtagacaattgttttcttggcttgcacactatgatgaagcaagctgccatgtgaaagaggtccatgtggcaaagagctcagggcagcttctgtggaacagccagtgagcaactgaggccctgagtccaacagtttgtgaggagctgaatgcttccaacagctactgaaagagggtggcagtggatccttcccctgatgagaagtcagatgagactgcagaccctttgtagccttgtgagagacagtgaatcagagggcccagtagctgtgcctggatttctgacatacagaaactatgagataattaatgcgtattcttttaagctgcaaagttttggagtaatttgttacataacaatagataactagtagaataggtcttttctttgtggggagataaaggattgcagatatccaaggcttctctagccttgttcgtttgttcatttttggctttttccttgccatcaaaccctaatagttttagaattccataatggatgtaaaaagtatatcttggtgaaatggctctgtttatgatattttcatataacaacaaatttttctattctagtattttctcagtggggacatatatatcacattttcatttcaataacttatatactatttcaaatgtgaaatttgaaattatgttgtagggattacagtggggatagctgaagaacagttttttaaaattttgtttttaaaaggatcttttcctgtaccctttatgaggggcagtatgtgaatcaatttaaccattaaaaacatgaataaattcccctgttccttaagcctgtcttcttcataccttttggaactaatttttagaacttttctgcttcagctaaattagtctgctttttaattctcttctatgtaccactttggcaaacacttctgtattttaatgtatgccatcttttgtgtcatgtaccaatctgtgcacaatttagccttcacatctcacttcttcctgaaagctgttcttggttgtcctcacctgagccagacattttctcttagctccttcagcagacctaccctccatcctgctcaccttgccctctgcctaggtagtagccctgaatggactacatcgaagcatttctgtgccctcttgctcctgttaggttaggccatggggagcagcctaccaggaggttgaagggagggaagagttcaaggcatctattcctcaattttcctcccagtgaggtcaccttgggatggtcatgttccttaatgtgacttgctacccttctgggttctggtcaataagaaactcagtgtcagtaaagaaaaggtcaaataatgaaactacatgttctgattttctcatattcattcaaatgtgatgagtagtgggagtagaaatcagcctccagcatatggaatgttgagtatattaaacaacacaaatttatttttatatagttgttttaacctagatttataccagttttttttcaagtcatttgactttaattccagattctatcttgaaacttacataatcagagatcacacattaaatgagcacataacataatgagtaaaagtaaacaattaaaaacctttcccttttcttaactgtcgggaaaggtttgttctagatgagcaatgacgactgagtaatagaggtgctgagaattaagttagaataagacagttgtattttctcattaaaagcagtaacaacagaacagttctctgaagtaatataagctaattctgccaaactgagaaatgtcagaaactataaagccataaaacatgatccactgcaaaataaaataatctctttaaattcacttgtctttgctatgatctgaatgtttgtgtccccataaaattcatatgctgaaatcgaatcctcaaagtaatggtattagtaggtggggcctttggtgggtgactaggtcatgatgtagccctcatgtatgggatttgtgtcctgataaaagagccctagggctcttatatgcccactctaccaagtcaagatgtcatgaaaaggtgctatatatgggagatgagccttcaccagacattgaatctgcaggcgccttgatcttaaacttctcaaactccaaaactgtgagaaatcaatttctattgtttgtagcccctccatggatgatatttttgttatagcagcttggatgaactcagacagtctttttgcattttggaaaaaaattcaaatttcccttttcttcatcatttttctggagcctttcctttccataaattgtctgcaataatgaaatttttttttatatccaatatagtagccactagccatatgtgcctcctcaccacttgtgatgtgcctagtacacctgagaaatcaaatttgtagttttgtttcatttttaattgagtagccacacatgggtggtgcctccatagtgaatgctgtagctctggagtgctgatctcatgtgtgatcttctttaggttcaggttttctgcattatgctgacgcagtcacacacagtcccttattacacaaaggggccaggctctcgtgttctttctcctacatgtgtctgtttcttcccagctgtacttactcgattgtggattcagtccaataaaaaaaaatcccaatatcttctctgtatggtgcatagcagtttatgaaatgtttttacatacactatttagtttgatcctcataataaatggaactagatagcactttttctttttctttctttctttttttttttttttagatggagtctcaccctgtcacccgggctggagggcaatggcctgatttcggctcactgctgaaatcactgtcacctccacttcccaggctcaagtaattctcctgcctcagcctcctgagtagctgggattacaggcgcacaccaccaagctgggctaatttttgtattttagtggagacagggtttcaccatgttgtccaggtgctctaactcctgacctcatgatctgcctgcctcagcctcccaaagtgttgggattacaggcatgagccactgtgcccggccgaaactgtgtttgttttcttaaataatttttccaattgaaagcttcctaactgatttgatcaagtaaaggagctcatttgaaagaatgtttcatgacaatgtaaacattggttattctggaattggtgagaaaagtgcacctaaaatagttcaggatgataaagtaaaaagaacactgaagagctgtgcctgccacttatcatgagattgataatagcaataataataatgataatagtaatagagacatgtattacccacttaccatattccaagcattatcctaagtgctttatatgcagaaacgaagttaaccctgcagaaaggaagttaaccctcatatcaatccctggagattttgcagatgaagacaataagattaaagaggttaagaactgtgttgaaggtaatgcatcttgggtagttgaagctgtcttgggtaggcccttcaactctcatggtttgtttgctcccctttaaaaaggaggttgctgaactagacaatatctatgttctagctctctgtggcacagacaattgaaatgtctaaatcaacaatgtgatttttggcagtgtcctttctgatgttgtgtgtgtgtgtgtgtgcgcatatgtgtgtaatttctgtaattgtggagaaatgtagcaatctgataaaacaactcttctgaaaaaagtgatttcctaaagcatttcatttttatattgatcttgtttcaaggcagcatacttcttctatctaatgatctgatatctgttgtgaatggaatgtttatgtcctctccaaacattcccaaattcatattttgaagccctaactcccaatggggtggtattaggaggtaggatctttgggaggtaattaggtttaaattaagacataagggctgagccactatgataggattaatgcccttataagaagaggaagagggccgggcgcggtggctcacacctgtagtcccagcactttgggaggccaggtgggcggatcacaaggtcaggagtttgagaccagcctgagcaacgtggtgaaaccctgtctctgctaaatgagcaaacaaaaaatacaaaaattagccaggcatggtggcacacgcctgtaatcccagctactcaggaggctgaggcaggagaatcacttgaacccaggaggcggaggttgcagtgagctgaaattacatctctggactctagcctgggtgacagagcgagaatctgtctcaaaaaaaaaagagaggaagagacaccagagcttcctctctctgccatgtgaggattcagctgcaaaggcaactgtctggaagccaggaataggggccctcaccaacaactgaatctgctggattggactttccagcctccagaactgtgagaaataaatttctgttgtttaagccaccgagtctatggtatttttattatagcagttcacattaagacagtatcttttagactctcactgataatatgaattagattatttaaagtgaggataattatccttaccacacaccaatttattataaaggttaaatgaaataatgtttactgtggtgcctgctacatagtaagaatacaagagaccacacatataatggaaagagaatatagtgcagtggttaagaggatggattctgatgcttgattgcctgacttcatgtcctttgctacctactagctgtgggaccttggaaaaaaattactcaacttcttttgtgtgtgtgctttagtttcccatcagaggaatcaagaaaataatcattgttacaaggcttaaatgaactgttgtttataaagaatttggaacagtaccatgaaaatgcagaacagagacaagagtgtcacataaatattagctattattattattactattttctgcactagcttttgctcagcgggggaaattaattacacacctggagcttctctcttaatctcttattcacgattttttcttgcacatctagtaatttatttcgtctttgctgacatttacaattgaaagtccaaaaagatccatcagaatttttgtccggtgtaagctccttctgcactcgtgtattctgatgtatgagtagatatgtatcagagctgggcaggcctgaggtgaatatcagcaggcagcattcccaagcaataaatatagctttggggtgtgagcacttctacccagagagtgataaatggtcttttcctttatgggctggaggtgagttggcctgaagtgagcagcactttgctctagggagatgagttgtgctatgatctgtgggcttccccagggtgttggtcctatcttcagtgtgccagaagatgatggtccagcatgcatgatctccttgaagaaggcaaagggcactagggttgcagtcctggagcttcagttgtagtagacggcaggcaggttagtggtccctgcagtccttgtctcaccttggtgctccatgtgtgtaggttgggttccatttgatttctgatggatgagcaaggttttccttttacaaattttcccttaatcacctcaaaagggaattagtaaactggtaaagtggcaaagatatgttcttagtttctctgactttccaaagaattattatccgtagggaaggttcatgtaaatacttaatgaaaatgtgatgtgtgtttcttcttaagaaataatgggcttactgtgatattctgtaggggatgttattgaaagtatgactggactttttttctttttaaatttcactacctgctagtccctatgagacagagagattaagataatacaagttggggctaagaaaaagacagtgactcttttagtataattacgctaagtggagacgaactttgactgtatcagaaatctgattatattaggtagtgtcctaaaggtagaccttaggtaaaaatcttttgccttttttttttgttgttgttgcttctcctcaggactcaaagttttcccctgctccccgtctcactctccaccttgttctgtttactgggaagagaatcttctagaaccatgggcagaatctctcctcttaagaaggcagagcaatgtggtggaaatggcatggagtttgaagtcaagccagagctgggattgactgctgggctcaaggacatttcttaactttatagagtttcattttcttttaaacatagaaatactattgcttatttcatagacttttatgataatgaaatcaaatgctgtgggtaaagcagtagcacaatgccttgtacaaactgggtcttcaataaacgctaactcctttcccctttcctactacagaaaattggtgacaagaaggatcatgaagaaaggatctcaagtaaaaatagaagaaaaaaagtcttaaatatgttttaaaaacaagccaaactctagcttatagagcagttattttactaaaattatattctcaaaacatagtacttagtgttgtcaaagactataatattgactctggagacctgaatgagagcagatagatacaggtaatcttgattttagccccaccaggtgcccatcagtttataacagttaaaagttgatgactgttaacttcttggtaggaggtttctcccaccaagggtttaattaagatattacacatatctctaagtggtagtcatatgctgtcatagctctaagaagtagtatattcacttacgtatttgaactattcctgccttcattcaaagcttacaagtttataatggtggcaaccctcatcatgagaccttatttgagacccctttcaatatactgaaatgcctttattttcattctccatttaagcctagtgtttctggcaacttccccccactgtgatgcattgaggatgcactctgtctggtgatatagcctacaccattattgagaaacggtatttttagttctaggccatgattgctactttctctgctttttgctaaggaattgtggttaaaaccctgaaacctgcctcctagagaatttgtttaaaaataaccttttacttaacagttttaggtttacaggaaaattgcaaaaataagaaatggagtttccatataccacataaccagtttagactatcatctgtaacctaatatgtggtctatcctggagaatgtttcatgtctacttgtgaagaacttgtattctgctattgttgagtgatgtgttctatatatgtctgtagttttagttggtttatagcattgttcaagtattctatttctctgtctttcgtctagtactttttcctattgaaagttgggtattaaaatctccaaatgttgttgaactatctgtttctttcttcaattctgtcagtttttgcttcacatattttgggggtttcccatttatatatttataattgttttatcttcttaatagatggatacttttatattatataatgtccttctttgtctcgtgcaacaatcaccttgaagtccattttaaaaattagtatagccaccccagctctttttgagactatttgcataaatgtatttttccattttcaacatatttgtgtctgtaaatctaaggagtgtcttgtagacagtatataattggatcgtgcttcttaatgcattttgccaaatatgccctttaattgaagagtttaatctacttatatttaatgaaattaaagatataaaaagacttacttttgccaattttctctttgttttctataggcaatatcttttaattattaatttctctataatttttttcttttgtgttagatattttctagtgtcacttgatttctttttcatttgttttagtatacacttttaagttattttcttaatggtttacctggagattaccattaatatcttaatttataataatctagtttaaattaacatttaatagtatacgaagactttggtcacatatagctccatacctcaggcatgcaccaccacgcccaactagtttttttttttttttgagatggagtctatctctgtcacccaggctggagtacaatggcgcgatcttggctcactgcaacctctgcctactgggttcaagtgattcccctgcctcagcctcccaagtacctgggactacaggtgcgcaccactacgcctggctaattttttgtattttactagagaaggagtttcaccatgtggtccaggatggtctcgatctcctgacctcgtgatccacctgcctcagcctcccaaagttctgggattataggcatgagccactgcgtccagaccgccaggctaatttttgtattttcagtacagacagggtttcactatgttggtcaggctagtctccaactcccgacctcaggtgatctgcctgccttggcctcccaaagtgctgggattacaggcaggagccaccacacctggccataattattgttttatataattatcttttaaataatacagacaaaatagagaaattacaaacctaaaatacattaccaatgactgtttctcaatttttttttcttgtggtgaaatacaaataatataaaacatactattttagccatttttagaggtgcagttcagtggtattaaatacattctcattctacaactaccactaatatccatctccagaactctttccatcttgcaaaactgaaagtctatataccctttaaacaataactcctcaattacccattccaccagtccctggcaaccaccattctttgttcttattttttttaatttttttttattttttattattattatgctttaagttttagggtacatgtgcacaatgtgcaggttagttacatatgtatgcatgtgccatgctgttgtgctgcacccatcaactcgtcatttagcattaggtatatttcctaatgctatccctcccccctccccccaccccacaacagtccccagagtgtgatgttccccttcctgtgtccatgtgtcctcattgttcaattcccacctatgagtgagaacatgcagtatttggttttttgtccttgtgatagtttactgagaatgatgatttccaatttcatccatgtccctacaaaggacatgaactcatcattttttgtggctgcatagtattccatggtgtatatgtgccacattttcttaatccagtctatcattgttggacatttggattggttccaagtctttgctattgtgaatagtgccgcaataaacatacgtgtgcatgtgtctttatagcagcatgatttatagtcctttgggtatatacccaataatgggatggctgggtcaaatggtctttctagttctagatccctgacctggcaaccactattctactcattgtctccatgattttgaacactttaagtatctcatataaatagaatcatactttatctttttgtgatttttcttatttcacttagcataatgccctctaagttcatccatgctgtagtatatgccataatttccttccctttcaatgctgaacaatattccacagtatgtataaactacagtttccttatccatttatgtatcaatggatatttgggttactccccaagctattgagaacaatgctgctataaacatggatgtacaaatatattttcagaagcctgctttcagtgttttttggtatatattcagaactggaattgtaggattatgtggtaaatctatgtttaagtttttgaggaaccaccaaactgtgtcccacagtggctataccattttacgttcctaccaacagtacataagcgttccaattcttccacatcctgaccctcgcttgttattttctggtgtgtctttgtttgtttgtctggtttggtttttgatagtagccatcctaatgagtgtgagtgttatatcattgtagttttgatttgcattttcaatgattagtgatgttgagcatgtttttatgtgcttactagccatttgtatatcttctttggagaaatgtctattcaagtccatagcctattacttaaaccaggttgtttggctattggttattgtgttttaggaattctctatgtattctggatattaattccttataagatgtatgatttgctaatattttcttccattttgtatattgcctttttctctgttgatagtgttttcagatgcacaacatttttcaattttcatgaagttcaatttctttcttttttcttctgttgtttgtgtctttggtgtcatgtctcacaaatcattgccaaatccaacatcataaagcttttgtcctatgtttttttttctaagagttttacagtttttgctgttatgtttaggtactggatatattttaagttaatttttacaaggtcatcctttggtatcaatgtgggattatttccaggacctcctatggatatcaaaatccacagaagttcaaatctctgatataaaatagcatagtatttgcatataacctatgcatatcctcctatgtagtttaaataatctctacattacctatgcttgacacaatgtaaatgttatgtaaatagttattatactgtattgtttaggaaaaagtgctaaattaattaattctaacagtttttctggactcatggttttctaaaaacaggatcgtattatctgtgaacaaagataattttgcctcttcttttcaaatttagatgtcttttatttccttttcttgcctaactgctctggatagagtatccagtactatgttgaataaaagtgatgaacctgttcacccttgccttgttcctgatcttagaagaaaagctttcagtctttcaacattgagtataatattcattgtggatttttcatatgtggcttttattatgctgaggtagttttccatctatgtcttttgactggagagagtttaatccacttatatttaaagtaatttctgatatggaggcacttctgtcagttttctatttggtttctacatgccttatagcttttatagtcctaattgttatctttgcattactgtctttttgtgtttagttgatgttttttgtagttaaatgttttaagtattttctcatttcctttggtttttattctatgtgcattttctgtttggttaccatggggattacatttaacatgctaaagttataactctctaatttgattttataacagcttaacttcagtaacatatgagattctgctcctttacagactagacctcatttttcagttattgatgcttcaaaattacatctttccacattgtgggtccagatatatgaaccaataattacttttaatgcattaatatcttaaataatgtagaaaacaaaatgtatagctgcagaccaaagttacaataatacaaatttttataattgttcatgtatttacctttactgtggatctttacttcttcacaaagccttttttttaaactgtgtaatgctcttttatttcaaagtgtgaggccacctttagtattccctgcagggtagatctagggtcataaatttcctcagcttttgtttatctgggataaacaaaatttatttctccctcatttattaatttcttaatttctccctcaattttgtgttttttaaaaattgtacttaaaaacctttatgtttagaggtacatgttcaggtttgctacataggtaagttgcatgttgcaggggtttgatgtacagattatttcatcagccaggtgatgagcatagtgcctatgctatttaggtagcatagcataactacttaactccagtgggtggtttttcaatcttcaccctccttgcactttccatcttcaagtagtcccagtgtctattgttctcatttttgtgtccatgtgtactcaagatttagttcctacttaatacgggagaacacgcagtattggttttctgttcctgcgttagttcacttaggataatgggataatggcccccagctccattcatgtttctgcaaatgatatgatcttgttctttttttatggatgtgtagtatttcatggtgtatgtgtacttcatttaaaaaaatccagtactactgttgatgggcacataggttgattcctattgtctttgctattgtgaatatttctacaacggtagaacaatttatattcctttgggtgtgtatccaataatgggattgctgggtcaatggtagttctaagttttctgagaaatcaccaaactgctttccacaatggctgacctaatttctttcccaccagcagtgtataagcatccccttttctccacagcctcaccagcatgttattttttgactttttaataatagccattctgactggtgtgagatggtctctcatcgtggttttggtttgcatttttctgattaataatgttgaacattgttttatattcttgtttatcccttatttatgaaggacagttttgctagatacaggattcatggttgacagttgtttttcttttagcactttaaatatataatcctacgaaaaggcctttttatgtgatgtgtcacttctctcttgctgctttcaagattctctctctctctttttttttatttttggcagtaggattataatgtcttggtacgggtctttctgagttatctcatttggagttcgttaaacttcttggatgtttataattcttgtatctcatcacacttggaaatatttggggtactatttcttcaaataatccctttgcctctttctcttcttgcagaactcttacaatggatatgttggtctgcttcataatatcctacaggttggttaggctctgttcacttttcttaaatctttattgctattccccaaactcagtaatttccattgttctgtcctcaagttcatcaattcttctaactgctcatatatatacccttcaattcttctagtgaatttttgtcttcagttgtactttccagttccagaatttcattttggcttcatttgggttttctatatttttattgatctttttattttgttcatgctttgttttcttgattttctttacatcttcctttacttctttgactatcaattgttttaaactctttgcctagtaaatatttcatcaggtctttctgaaggacagtttctgttggtttattttttcctttgaatgagacatactttcctgtttgttggatgccttgtggtttttttgttgaaagctatatatatgaatctaataatatcatgtctctggaaatcagattcttctcctttcccagaatttgctgtatctgttctgttttaattgatataggcttctctgtgccaaggaccagcctgaggtataaatctaaggtcttttctggtcatttctgagtctatacctttctccgggcatgcacagttactttctaatttcctctatatatgtggttgcttttaatttaatgtcctagtctttaatgtctggctctcaaaaggggaaaaggagaaaaactaaaggtgccgaggcgctggccctttaaacccccctggatctcacttcagctggagagggaagggcttgcaacaaaggaggagttgcaacaaaacttcccacctttgtctgtgtctctgcctttttgatcagagcatcaatcagatatcagaacacagatccctgatatttaatggacagtatccttatggctcctgctggtttcggcaagctgtgtgcaagctgatccagaaatacgcaggagaatggggatggatagccactgctgagttaagagctgaaattgacctaaatgtactgaaatttactatccaggtcctctcctggaaggtgcaagcaagccttcagtagactccaagattccaaaatatttacctcagacagattatgtcagtgtaattgttctgttggaggggagataaatttttggtgcttcatactgtgccatcttcccagaattctctccaacatttgttttttacatttacttatctttagcagtgttctttatttctctatgtaaatttgagttagcctagagttcttttatttcagtccaaaggactccctttagcatttcttatagagtaagtcaactagcagttaactgtctcagtttttatctgggagagtcttaatttctcctttattttagcattaggtgatatacataatgctaaataacgagttaacgggtgcagcacaccaatatggcacgtgtatacatatttaacaaacctgcacgttgtgcacatgtgccctaaaacttaaagtataataatagtaaaaaaaaaaaaaaaaagaatggagaactattccatagtaaaggagacttaagaggcctgacacgtaaatgaaatgtgtgattctaatgtggatatcctttcactataaaatacattattgagacaattgataaaacttgaaggaagtctatgcattaaatgatagttatgtaatttcctgattttgatcatggtattttggagaagagagagaatattcttgtttatgaaacatcatctctaagtatgcagggatgatagagtatcaggtcagccgcttaatcccaagtgatttagggaacaaagagttctttatcctccagttacaagcgtatggctgtgggcagcttattttgtctgactacttttgttttctcatctattgtacgggactagtgatagtatttatctctttgcattgttatgagattaaataagatggtaaaggtaaagtggttatttagtgcctaaagttggctagtttttgagtacctttatatattagctccaactataatatgagaattatggttactgtttattttttaccttcctcctatcttggcccacttttagtgtgtcttcccttctgccctactgtttcctatccatgttggtttcctttccatagcaactcttgcctctccaatacaaagcttcatgctccaaaaagcactgagtcatagagcatgagttattccttgcatgattataatatcttcaccaatagaaagagataatttgtgtgaaaggtaaatgtacaaaaaaaatacaaaaatctcatttttacaggtttcataatgcaaattttttccattcaaatagaataattcactttagaacatttctgaaggtgaattagattctattgtagtaaatacctaagctaaagtatagcattctctccctttttactctctgtgaaatagaatatgtaaaaccttctaaaagaatttatatgcataactcaagccatctattccaaatacttaaagttacaggtcggttatgtatatatgtaaaactggtactttaatgctattatttattaaaatattgattttctattaaaaaattctcctttatttttcaaaaatagtttttatcaaatatagatctcttggttgatggtcttttcttttagctctttgaatatttcatatgtctggcctccatggtctgtggtaacaatcagccattaatcttattgaggatttcttgtgcataatgacttgcttctctcctgctgcttttacgattctttatcttttgcttttgacagtttgattatagcgtgtctcattgtgaatcttgttatgtttatcctacttagagtttgttgagcctcttggatgtaattcatcaagtgaattgatgttttggaccattatttctttaaatattctttctgtccttttatctttttatctctcttatcttctgggatgcctaatatgcaaatgttaatatacttggtggtatttcataggtctcttaggatctgttgatttttctttattccttttgttcctcagattaggaaatctcaatgaacttactttcaagtttgctaattcttccctctgtctgctcaagtgtactgctgaacttcttttgtgaatttttcatttcagttgttataattttttaatccagaatttttttttggttacttcataatatgtctctttattgaagttttctatttgaagtgatattattctagtggttctcttcagttctttgtatgtggtttccttaagagctttaagcatatttaaatagttaatttaaagtctgtctagtaagtccaatagatgagcttccttagggataatttctattactttccttttttttctgtgtatgggccatactttcttattatttgcacacttcacaattttttgttgaagactgaacattttgaatattatagtgtggcaactctagaaatcagattcactttcttccttgggggtttgttgttgctgcttattatagtagttgtttgtttagtgccttctctgaactgattttttaaagtatgtattcattgttgtatctagattctcttttcggttagcttagtggtgttcagctaatgattttacagagatttctttaaactactggagccgaaaacaacaacaaaaaattagaaatctttcagcctttgcatatgggctctatgtgaatgttgaggcatgccttcaacacttcagcttgtaagcttactactctgctatagtcttcatttgtgctttcatagagcctgagggtcagccagtgacaagagctctggatcttctcaggtattttctgaatatgatcccatccctgggcacatatatggtcatctaaatcccaggtatttgtggaaacttttcagagcccttattccccaaaacatctcatttcccagtctttcgcccccaggtttttcagttagtaaattgtttgttccaactctattattccttgtccccagcagcagtggcaaatacatctgcctataaatatttcaaacaaattctccctgggtagtcacctcagcactggtagagatttgagttcgttaaaataaagacaaaccctttgggcttgtttttttgggatcactagccaagtcaaaacaaccacaattctttgtggtcagaatgagatctattttactctctgtcatattaggaccctatacaaaaaatgtgagctgctgtcattagggctgccttaaaaagttgagctgggagcaggagatggggccaaagtaactttaacaccacatctctcttactgaaatttaactctcttttcttgattaagcattcattttgttgttgcaaaatttgattggtttcaattgttctaataaagttgattctgaccgtttctgcctgtataattgtgtttttgttgttgttgtcgttgttgttgctgttgtttgagacagggtcatgctctgtcacccaggctggagtgcagtggcatgatcatagctcactgctaacttgaactcctgcctcaagcaatccttccacctgagcttcccaagtagctgggacaccaggtgcatgtaaccatgcctggctattttattttattttacttttttcaggacagagtctcgctctgtcgcccaggctggagtccagtggtgtgatcttgtctcactgcaacctccttctcctgggttcaagcaattctctgcctcagccttccaagtagctgggattacaggcgcccgccaccatgcccagctaatttttgtatttttagtagagaccatcttggccaggctggtcttgaactactgagctcgtgatccacccgcctcagcctcctaaagtgctgggattacaggcgtgacccactgcgcccagccacctggctaatattttttaatgcttttttggtatagacagggtcttgctatgttgcccaggttggtctcaaactcctgagctcaaatgatgcttccgtctcaacttcacaaagtgctgggattacaggtgtgagccactgtgcccagcatatttgctgtttttgtggaagaatggaactttagacttccctacttcaccatttttgctggtgtcactctcctttactagtattaacaacttatattagaatttgtcacaattgatgaaccaatattgatatattgttattagctaaagtccactttaattaaaatttacttactttttacctaattcaaatttacttagtttttccgtttcaggatcccatccagggtaccacattacatagagtagtcatgtctcctgaagctcctcttggctgtgacagtttctcaggcattctttgctttttatgatgttgacagtttcaggagtactagtcaagtatttggtagaatgttgtcaattgggatttgtcagttctgattttttttttttttttcatgataaggttggggctgtgagtttttgggaggaaaacctcagaggtaaagtgccactttcatcacatcttgtcaagggtacatactgccaacacgacttccactgttgatattgaccttcactacctgcctgaggcagtatttgtcagggtttctctactataaagttaatcccccaatcctcttttccatattatattcttcaggatgacgtcactatgcatagctcatatgtaaggaatgggtagctatgttctaccttttatcaggtgcaacatctccataaataattaggaattctgcgtggattttgtttctttctccctacttatttatttattcatttatagcagtgtggattcgtggataactattttatacttcaggctataatttaatgttacttacccaacttgtcccagctttggccattgggaactctttcagttggctcctgtgtctttgggaatatttttttccttcagctggaggaccactggaagcaggttctttacctgaagctgcagttgatgtttctgatacattagagtctagtgatgattaatattttcaccgtatgatctccaaaaccctttctcttcttagcttttaaatttcacaagtctttaacagtattttcctgttatggtctttttctcaacaagaaacatcaaaagcctctggtatttttttttattattgtttctgtatacttttaagactgtttcggctgggtttataactttttattcagcttcttatatgggtctgtttacttctttatttcacatagggataacattgtttcccagaactaagtgtcttttttctttttcctttcccttcactctctgaccaaaacatttgtttttccaactttccactctcaaaattttatcttgagaatgtcccacattaagagagatgaagtcggtgagttcgatgtttgtcacttatcccttgttcaaacaagtcttgattatcttgatccttatgagtaggaaagtcccatgtaaaagataatcttatcagaccaagagctgatccagaccaagtactcaactggaatcatcttgtctgatttccctttaataagtcctctctttgctttacttttacctggaataacagttccacaaattttccaaatatttttcctcagggaacacccgtggcaataattttgctcatttgcagttgacacagatgcgttttcatcctttatactgattttcctgggatttcggtctgaaatcggaccacattttcttaaccacttgaaagatctattccagttttgaaggaaaaggtgatttgattgttcttacaataatgctgatactttaagaggagttttaaaaagcaagtgtgattcttagtctttccaggaaatcattatatctgctctccaaggcttttccttttcttatctgatagatttttttttttttttttaggtactagtgtttcttttggaaatggcaataactaaaatgtattgctcttttctattaccttcttcaagagaagttggacctgagtatattgactttttaactttatagttatctcttccagctactagcatttcatttccccttcatatctgcccagtctgtgttttgagatcccaatatttcttttaaggcagtatctttctcattactactcagtttgacacattctattttattttccttcttctgctaccattgctctgatagtaagaaactatcagaaaatgaggctcttttttaagctactcaagttatttcttgattcttggggtaaatcggaatcatggagccagaaggctgacaggtatagtcctttaaattgctttctgaattttggggcatgcaataatctcagtcacttatttctgaacctcagcctaggaagagggcattttctctttatacaaagagttcctatattttattttaaatgttaataaaatccacttccctcctataattgcagctgtagtttgaatctccaaactctaataatgagtgtctttcctttaattattaaactcagagtctacttaacaccatgtggttgaggtgacttaagtatataaacataccacttgaattcgtttggttttgtctcctccagtgctctgtcaccctaaaaccacttcaaaatagcatgcacacatacaaaggaacacaatttggtgaagtttaggtaacagtcaggtatacctgtgtctggagttaagaattttaagctacaaatttactagagcttgtaacacattttgaattcagtcactgttcaaatatcaggcctagcaggtgagacttggccaagaagcccattgcattgagagtattcaagattttgtgctaggaaataatatatacataaatttgtaacatttgtgttacatcatgagagttcaagttgctgaaaaattacttttatcactggagtttttcctatgtaatatcaaatcttcacttttggcatgggtaatatgtgactaatgatggcttctcaataatccatttcctctgggaatcaactcctgacccaaaccatgctgccaatgctgggagtgggtctctgctactgcaaccactttgttttatgatattagtagccaggcaatgatctataacctcatttatttttttccagcctgtgctttttgagatgtcttagtttttgcagaagtttcgaggagactttaaggatgagagtgataggtaggggtttgagggggtgactgtgtgtccaaagattccagctccctcatcctcacttagcctaaaatcagtctctctctttctctctctctctctgtgtgagacagaatatgtatattctgaacatatacatatatatgtatatgttcaatgtaagatttcatttgaatagaaagatatgttgctatgagacaactgaatgttactactctctggagacataataattctttctttcccacctcattaggtttctagtagggaacaaataaaatatacatgtaaaaagcctgaaggaactttgcaacattgtatgaatgtgagtgaagactgggaccttgcttttcttgtactggtgtgccattctatcatttgtttaggtaataatttacacattttaaaaaacattgtgccaagtatttgtggggctgggacaacacaacagatgatgacccaatatattagttagctaggaccgctgtcacaaagcatcacacaccaagtggcttaagcaacagtatttttcccccacagctttggaggctgtaagtccaagatcaatggttggttccttttgagagctgtggggaagaatctctgccatgcctcttttgcagttcgcagtggttttctggcaatctttagcattccttgacttgtagatgcatcactctaatattcaccttcatgtttatatgacattttccttctgtgcagatctgtgaccacatttctccctttcataagtatatcagtcatatacttatatgtgactggtatatgggactggcgaattaggggaccacctcactccatatgacctcatcttaaataattacatctttagtaaccttttttctttttcccaaataagttcacattctgaggtacctggggttaggacttcaacctatcaattttggggagtacatgatttagtccataatactcagattatcatctgcctaactttaaaagttatacgtaaaactaacaaactaacaaagaaaatatgttttattctcctccaataataaatatacttttttaaacacctggagagatgagctttttggaatccttagagatccctgctgagttatgatggaatggaaagagctggtccttatcctcaacctccttcatgcccttctatttattcctgcccctggctccatcctgccctgtggttgcctcatgcatatgtctgtgaacaatcaactggcacattccagcgacattcatataccctgcaaggagccttcccttggttatccttggagcccaggcattgctcccattggtggtgagtctgacttcagatgaatggatctagagaaaaggccttcaaaggctgttcaggccggaagttccaaggtccttaggtacctagactgtggtctagaatgagggctttgggtgtttctgagtcacaactagagaaggcagggttctttatggtgaggacaccagggcaagaacttctcttgcctggatctaagtctctactgtcagtgaactaaacttcctgatagtcttatggctaattgcctagtgaagggagacaaagcataaataataagcaaaatacataagtaaattatataaaatattcaaagatgataagtgcataagataaaagtggtgtagagtaggaaagatctggtgtgtttccagggacagggcagcttgcaacatctcacatagggtgttcaaggtaggcagggcagagacggagacatctgagcaggatttgagagaggtaagggagctaggcaaatggatacagggcacaaaggcacattttgggaagaaggagttggctgatcaaagatcccagggatgaagcgtgcctggagtgtccaggagatacaaaggaggccagtgttgattgaatgttataagcataggaggatataataagagttaaaatcagagagatgaggatgggaggtcagatcacatagggccttttaggttattttaaaggcttgggcttttactctgagattagaagcccctgcagagttttgaacagaagaatgatataaccattcccattgctgtgttgagaatagactataaggagcagagtaagcatagaaaggaggagactgttcagaaggcaattatataatccaggccaaggatgatagcagtaagttggaccagagtattttcaggtggagagtgataagtggttggtgattggatttgggaaatattctgaaggtggagccaacaggacttcctgatggactggaatatatatatatatatatatatatatatatatatatatatatatatatatatagatatatacacacacacacacacacacacacacacacacacacacacatttatattccagttatgtaaataataggtatttcgtgtatttcaagtgagcccgtatcagctctcatatcaagcactcaaaattttcagtaaataaatgtatagactttcatgtgtttatatggtaatgtaaatgagcatacaaaatagcttaattttttttcatacacaggaaaacatttaattagcaagtgtttacattttttcagtaatttgaatggcaaagattaaaaaaattcctatgtaattctcttaaaaaaaaaatgtgtgtgtatacacagacacacagacacacacacacacacacacacacacacatatatatatatatatagagagagagagagagagagagagagagagagagagagaaatttgggttagcttcaagttttttgctcttaacaactgaatgatgggtttgacatcaactaggaggggaaaggatgtggataaaacaggtctgggggaaaagaaccctaatattttccctgatccctgtgtacttttggggatactgagtttgggatatttatcagcaattcaagggaatattgagttggcagtttgttactcatctctggaatctgggaggtattctgggctggagttataaaactgggaatcatcagtattcagatgatatataaagccttgagagatgagatcattaaaggagttaagcttgatgggaaaggggagcaaggggtgagccctgggacactccagcactggaggtggtggagaggagcatgctcccacacagaagactaagaaggagaaacaaaaaggcaacgaagctaaactaaactataactaaaaggaagcacaagaggatgtagggtattggaagccaaatgaagaaaatatatccaggaagatagagttactcattgtatccaatactgttgacaagtaaatcagaatagttctgaaaaataacctttggatttagctaattggaggtcaacagtgattttgactaaagtagtttcattgaaatggtgggagcaaatacctgcttgtaatggctctaagagaaaattggaggtgagaaaccagaggcagtaaagacaaccattttgaagagttttgctgcaaagaggagcagggtagtgggtcagcaattggcagggaagtggggtaacgagaaagttttaattttttgatgggagacataacatcatggttgcatggtgtccagaattatccattagacagtaaagaaatgatgatttgagtagaagaggatttcaatagcaatgttttggagtaggtcagaggagatgggatcaaatgtacaaattgggagactggtttgggataggagcatgggtagttcttctctggtaataagcagagaggtggaacatggaatttgcttacctggatagatgcagttgtggaaatctgtggcagtttctttttactgattctaatttttaagtgatgtaggaaacaatgccatcagccaagagtgaggattaggggaggagttgctgaggtttcagcagacagaagggtgtataatcgtctagcagaaagggagagtaatagactaagaacatacagaattaagggctcacttgacttgcatgatcacgtatttcaaatgagcccatatcagctcatatcacatactcaaataattttcaatgaatacatttacatgctcatatgatatagaggaggtgatgggaaaaagcttagattttttttcattcatacacagggaaacattgaataagcagggatttaaattttttcagtaatttgaatggcaagattaaaaaatttttttgattgttttaaagaatgtggcatagtgcattaaattttacccactgtgcaggtggaaatctgtgggattgtttgccctggtaatggtgactacgaaagtaggttcagaagcaggaaaataatgtgcacagataagaaatttgatcagaagggagagtttcagagtttgagatcttggagtccaggcataaccaagtttaaatcgtgcctctgggtggcagaaatccagtgacaatgaattgattggtggtgaagagggtgaaaaactacaaagaagtttcttccaacaattgaatgtaagaatttcaggatttatgttttggttttctgatagaaaataatatagcattctgctgaaatataccaattccctcaataagtaagattatgagtaggtataagtatatataatttaagttttaaaaattgattacagatatacctagatcttgaattaattgatgaggtttatttgattgtctttcttataaaatacattaaaaatactgcttttaactgtaggcacacaattaaaacaaatgtaaacctatgtttaatttaaaatatattaaaatgatttaataaaggtcttttattattttacacatcaaatttcatgcaatcagtactccactgaaggagaaaagattatgaaaaaacaatgaaagcacaggtagaaaataaacaacacaaaagactaattctgattttttttctgtgtccttaataccctgtgctgtctttgacaacaaagatgccttacttatgtgattcagaggcccagaagtgaaaaaaatacaagtagttaatgaataatgcatatgttcatagcaatggtcaaattatactgtttcctaatggataccatttttctttatcgagtgggacactacagagtcggatgttaattgctcccacaaatacagttttactcttcacaataagcattaagacatgtccttggagctctgtgacttcatcatatactacctaaaaacggagaaaataatgaaaatataaatcagaaatgcttaaatacatctcttttttgagtattgcttttaataaaaaaaattagctgctaatatcttataccctggaatagataggttaatgtcagactcttttatttctaacttttattctgaaaagctgaagtttctgctaacacaatagagtttaatgacaggctatttttgtaagaatcctagaatttactgattccactaagaattacccactctatatttagcaagatggtaaattactctctaggaagaaatttaaatatacttcaccttttataccccataaatatgtacagctattatgtattcataaaaataaaaagagaacatcattcttctgtgttgaaggttaatgaggaaaagcagactattttttttttttttcaattttagattcaggggaatagatgtgcaggtttgtaccagaggtatattgcatgatgctgtggtttgggcttctaatgatcatgttgcctaagtagtgaacgtagcacccaataggtagtttttctacccttggtctccttcttgtttcttctctcttttggaatctccagtctttatggttcccatctctgtggccatgaaacagaccaatttctatgattttcctgtgctacttaaatgcagcacaatgacattttcttgtgcatatgcaggcataatactgtggttacttttatttattcaaaattactaatttttaattatgaaaatacatgcttattaaataaaatctgcatgaaacaaaaaaaaataccaaaaaggaagaaaataattggaattttcaccattgggagacaattacagttaacattttgatgttctttttgttttctatatataatcacttattcagaatctgacttgtaattatgctgtatatacagtttcacgtcttgttctttttttgtgactttttttttcaaaaggaatctggtcagctgtccttttataatgttcaggaagtaagttacaggtccatcggcaacctgcagtggtaaagcaacgtaaaggcatagtaccgctaagaaattagttatttatcatgaaaggaggagagagctgagtggaaatctggcatggttaccagggaaatgtcttagaacacatttagaaaaggaatttcatatgctgctacaaacttgcctgctttttacagccaagtcacaagatagaaactttctcaatatatgccaaaaagaagcagaagagacaacttgagagggcagccctctgagttcactgggtggcctcccctgtgagcatggatttagcttccagtactttgtacagcataggcttacctttcattacgttatcaatgaaattcagttccaggtcaatctgttagtgactctgaacaatgattcacttaccaagtaaataggttcaatcaaagggcatgagatacaatatgatatgcgaatgcggtctaccctgatccatgtgagtgttcttggctacctcttcttccagaattttactctcattccatacaggagattatggtttagttttctggtgttgctcattcacaatgatattttcttgtacatatgcaggagtaatactgtggttacttttatttattcaaaattactgatgttttaattatgaaaatacatgttcattaaataaaatctgcatgaaacaatttcatttcatctattgagttttcctgggataataaaggattttaagagttgccttaaaaaatctcagaaccctaccactgtaattcatgctttttaacaactggatgcccaatgctgcctggaaatctttctaggacttcagagtaaactccttttccttttctctaagtgggtattttgagctgtctgaactattctccatttttcttcctacatcatgttcagctgatgaactcctctcttattttacagagaaaacagaaaggaaccctcaaagtgtgactgtatatgatgcagaaaaatggggaagtctggctaaggactctgtgaattgcatgaataagtcataaattgtaagtttttaaaaaacatatcaataatttatattttcatgaatctgttgtcaactgtgtgttttctcatttgtataatgatgataataatccttaccttttagcattatagggaggaagaaatgagataatgaatataagccttgctacaaagcctggaacatattagacaccagtaaattatagctgaaaaagatccatcaaatacacaaaaaggaacagttgtttcttagtattttgcatcaattgactggagaaaacccttccagacagaattgagtcttccaggtatttagca

SEQ ID NO: 357 - DNA, 32752 bp, Homo sapiens
  source 1..32752: mol_type = genomic DNA; note = NC_000001.11:c28233029-28200278 DNAJC8 [organism=Homo sapiens] [GeneID=22826] [chromosome=1]
agaagggtcacgtggtggctgggccggggaaatggcggcttcaggagagagcgggacttcaggcggcggaggcagcaccgaggaagcatttatgaccttctacagtgaggtgaacacagagtgaggagtagtggcaccggggcgaccgctcccggatctgctttcccagtggacaaaggcagtggccgcctggcctggaccgttgggcgattccttcagtccagtcttcggggtggcgggggtctgggggtgtgtgagcgtctcccactgatagctgctgggagatcccccggggcaacgaaagagggaatggtgttcgatctatcgagggaggtggcgagtgtgtccaacatagtgcgggcgcgcgggcagagtgccccaagtccgcggagtcgggggctggcagaggctgggcccttcctgggagtgacttagccttcttggcccccgagacgtttcttagtcctttgtaatgagttgttttagtggttgtttctgccattcacgaacgccaggcactgtgtatcatgccagttaggcattatattacccccattttacagatgacgaacctgagctttagggaggtgaaatagtttggggccttacagtaggttacagcttgcttggtggtatgttaggacagcagtgggcttgttctgagcctcctttactatcgcatctccagcgcatagtatgtagtggatgctcagtaaatatttgttgagtgaatgaatgaataaatgaaataaaagcatgccgtttggagtcagaatctcagattaaattattgcaaggggctgggcacagtggctcacatctgtaatcccagcactttgggaggcccaggcgggaggaacccaaaagctcgaggctgcagtgacctatgatcggaccactgcactccatttttggcgagagtgagaccctgtctctttaaaaagaaggaaaaaaaggatagaaaaaaaaattcttggttgggcgcggtggctcacgcctgtaatcccagcactttgggaggccgagacgggcggatcacgaggtcaggagatcgagaccacggtgaaaccccgtctctactagaaatacaaaaaattagctgggcctggtagtgggcgcctgtagtcccagccactcgggaggctgaggcaggagaatggcgtgaacccgggaggcagagcttgcagtgagcagagatcgcgccactgcactccagcttgggtgacagagcgagagactgtctaaaaaagaaaaaaattcttggaagacagttaacctgactggactgggattgaattctttttttttttcctaaggcggagttttgctcttgttgcccaggcctggagtgcagtggcacgatcttggcccactgcaacctctgcctccctggttcaagtgattctctcgcctcagcctcccgagtagctgggattacaggcgcctgccaccacgcctggctaatttttgtatttttggtagagacgggggtttcaccatgttggccagactggtcttgatctcctgacttaaggtcctcccgcctcggcctcccaaagttgctgggattacaggcttgagccaccacgcctggccgggattgaatttgttcaagacattaattttgcagatcttcatattccacatctgtaaaaacaagagagttaatttaatttaatttatttattttgagacagagcctcactcttgcccaagctggaatgcacaacctctgccttctgggctcaagtgattctcccacatcagtagctgggactacaagctcaggccaccatgcctggctgatttttgtattttttttgttgtgacagggtcttgttgtgttgcccaggctggtcttaaactcctgggctcaagcaatcctcccgtcttggcctcccaaagtgttgggattacaggcatgagccactgtgcttggcaagagagttaattttaaaataaacattttcatgaggactaaagttattgtataagaaagcgtttcataaaaaaataaagcagaagcatctttctcagggttaaacaaggcagaagatgggacctctgtagggtggcatgggtttgaggaatggagttgccccccagcaggctgtgagctattcagggttaaggaccatatcacatccatcttttatttcttgcaattgtaacagtacttgttacatagtagtttctccaaagtattacatttaggtctagacacctggcaggcactgcctgtagtctcagctgcccggaaggctgaggcaagaggactggaggatgacttgagcccaggaggtggaggttgcagtgagccatgatctgtcttctgtcactgcagtacaccctgggtgacagagcaagaccccttctcaaaaaacaaaaacaaacaaaaaaccaaatggcaacctttgtttgaattggatgggaaaaaatatctaaggaagggtaattcagtcatttttttaaaaaatagagacaaggtcttgccatgttgctcaggttggtcttgaattcctgcacccaagtgatcctcctgcctcagactcccaaagtgctgggattacaggcataagccaccacactggcctcattcatttaacagatgtttattgaacattggaaatgtactagtttgctatttaggtgttgaggatacggtagtgaacaagagagaaaaaaaatcctgttttcatagagtgaagagggaagatgtctagaaggaatgactttttatgttaatgaaattctttccaaccttgttttggctataggaataaagatggcatatagcataccagagattcattccaactagcattccaactctgacagtgacaccaagaatgttttcctgggactgcctggtgcttgttctccctggcattgtcttcaggtcagggatttttcttttttctttctttcttttttttaaattaaaaatagagatggggtttcgccatgttgcccaggcttgtctcaaactcctgagctcaagcaatccacccacctcagcctcccaaaatgttgggattacaggtgacagctactccgcctggccaagtcagggattttttctaacactattagaattaggtggtggagttgtttgttccttcccatcaacagttttaaatgctgctcatagtttatgtcttactgtgattgtatttttcctttttttgctctttaaatttttttctttattttttttcctcacagagaaatctcttactttttttttttcttttttgagacggagtctcgctgtgtctcccaggctggagtccagtggcgcgatcttggctcactgcaacctctgtccctggggttcaagcgattctcctgcctcagcctcccaagtagctgggactacacgccatgccaccatgcccagctaattttttgtatttttagtagagacggggtttcaccatgttggccaggatggactccatctcctgacctcatgatctgcccaccccccagcctcccaaagtgttgggattacaggcgtgagccactgtgcccagcctattttttttttcttaaaattaaaagctataaatgaagtataatcacacacaagcacatcttccatcattaaagtggaagttctttaaaggctgtgacttatttatctttgaatcctcttgatgcctgctgtggggtcaaactgttggggttaaaattctggcttacaagttgggtaattgggaacaagtcagttaccttctctaagcctcagtattcttatctgtgaattgggtataacagcagtatctaccacatagggttgttgagattaataaatacatgtaaggtttttatattaaaattcaacaaatggtagttttaatttctcaaagcatttagcaaaatgtcttgcacatggtaaacacacaaataaatgtttgttgaacatatcagtgaacattttgttaagataattcagtttgttattgaattctattaatgaagtttttaatcctcataattttaggtgaaacaaatagagaagagagactcggttctaacttcgaaaaatcagattgaaagactgacccgtcctggttcctcttacttcaatttgaacccatttgaggtgagccgattgatgttgctagggcctctgtaatgggggagatttgcatagctgcaggcatacctacatcagaatacatacctaatttatatcatagttaggattgagaaaaatggtggagtaaagtgatggaatctgtatagtacaaaattgagtattccttatccaaaatgcttgggaccagaagttttttggattttggatttttttgggattttggaatatatacatacattctgcttacttactggttgaagcatcccaaattagaaaattcagaatgttaatgagcattttctttgagcatcagttgactctcagaaagtttcagattttggagcattttggattttgcatttttggattagggatatgtaacctgtatatagattgtctttaaacttgggtgattgtaccgagcagaactggagagacagcatgttaaggaaagtgagatggtcacatatctttcatcatcttttagcaacccaaatatataaggatttaatttcagatgtgaaggggtggctagctctaataagtttaggattctttttttttttttttttttttgagacggagtcttgctctgtcccccaggctggagtgcagtggcgcgatcttgacccactgcaacctccttctcccaggttcaagcaattctcctgcctcagcctcccgagtaggtgggattacaggtgcccaccactgtgcctggctaatatttgtattcttagtagagatggggtttcaccatgttggccaggctggtctcgaactcctgaccttgtgatccacccgcctcagcctcccaaagtgctgggattacaggcgtgagccactgcgcccagcctaggattcttgatttaaactacttgttaaaacttctgtttcactataataaatgccaaaaacccaacaacaacaaaacaaagatcacaagattttagataaatgaatatactttttgattttcttaattttatagctttaaacttttcctggttataaaagtaaatcatatttgttgcaaatgtacagaaagcaagaataatcatatataatcccacctaagagaaatagccactcctgtttacactcaaactgttttgcttaaaaacagggagcatcatacacttaatccttcttcttcttcttcttctttttcttttttaaagagatggggcctcattatgttgcccaggctggcttagaactcgtgggcttaagtgatctccttgacctgctcagcctctggagtagatgggattacaggcatatgacaccacacctggctcagctcaatacgattttattttattttatttttttgagacagggtctcactgtcacccaggctagagtgcagtggtgcaatcatggcttactgcacccttgaactcctgggttcaaacgatttgcccaccttgggctcccatagtgctaggattacagccattcgccaccatgtccagcctcagtgctgttttaaatgcttttttttttttttttttgagatgaagtctcactctgtcacctaagctggagtgtaatggtgcaatcttggctcactgcacctccgcctcccagattcaagtgtttctcttgcctcagcctcccgagtagctgagattacaggtgcctgcctccatgcttggctaatttttgtatttttagtagagacggggttttgccatattgttcaggttggtctcgaactcctgagctcaggcgatccacctgtcgcggcctcccaaagtgctaggattataggtgtgagccaccgcgcctgtccaaaaaaaaaaaaaaaaaaaaaagagagagagagaaattctttttttttttttgcaatgcttgacaagatgttaaatctgttaacatctttaatcataaatgaactcttcagaactcagtacagactaacattacacggaaagtgaaaataaaaggaacagaggaaaatggaatagtacaaatgagttataaggctatatgaagatgatatatagttaatactaatagttgagaaagcaattttattataaattacattatttgtgcttacaaatattgatatctgatgttggtacagctttagaaaatgaagaattctcaaatactgaggaaacttactctagtcatgaggagtttactcaaaaatgtagatttgtgcataaatttggccccagcagttccaaaccacagcaatcactccaacaaagtagttgggtacacacacatatacatacatgtttactacacaatagatgtgtaagtaatatgtcaccccccaagaaactttttatgaactggttataaaataatagactggggggtaaaaaaaattccatataatttatttaatcatttctttattgtggaatagtttagctagtttatttctttctaaaatttttttttttgagatggagtctctgtcgcccaggctggagtgcagtggcgcaatctcggctcaccgcaacctctgcctcccgggttcaagcgattcttctgcctcagcctcccgagtagctgggactacaggcatgtgccaccacgcctggctaatttttgtattttttgtagagatgggtttcaccatattggccaggcttttctcaaactcctgaccttgtgatctgcctgcctcggcctctcaaagtgccgtgattacagacgtgagccaccacacccagatctttaaaaagtttttttaacaggcggccctctgaaccagaataggttcagagagactccctaaactactttctaattgttcacatttacaaataattttgaagtgaatatttttgtatctgttaaataatagaaacaacacttattgggcacttagaaaaaaactcccctcacttttttttattgtggaaaaatatatataacataaaatttgccattttggccaggtgtggtggctcacgcctgtaatctcagcactttgggaggccaaggtgggaggatcactttaggccaggagtttgagaccagcctggccaacatggcgaaaccccatctccacaaaaataatacaaacattgctgggcatggtggtgcatgcctgtaatctcagctacttgggaggctaaggcccaagaatcacttaaacccaggaggcggaggttgcagtgagccgagattgtgctactgtactccagcctgggcgacagaacgagactgtctcaaaaaaaaaaaaaaaaattaccatttaaatttttttttagttttacaattcagtggcattaagtacattcacagtgttgtgtaaccatcaccactgttcatattcagaaatttttcgtcaccccaaccagaaactctgtatccactaaacagtaactcctcattttctccctgacccctggtaacctctactctactttgtctatgaatttgcctcttctaggaaacccgtgtaagtggaatggtaccgtatttgttactttgtgtctggcttatttcacttagcatgatattttcaaggttcatctgttttctgttttttgaagagtaatttttcaagaattttttcatttataaataatctcagattaacaaatatttcaaatacaatatgaagacttttccttgaactctttaagagtaaattgttagtatgatggtccatcaccctgatatactttaatgtgatttttctacaaatatcctcttactgaaccacaatataaactatcaaaatcaggaaatgaaccctgatacattgttactatgtaaatcatcagaccccattcaaattttactaattgtcccaaaaaagtctttctcagggcctctctggatacattgttactatataatcatcagaccccattcaggttttactaattgtcccaaaaaggtgtttttcagggcctctctatcactccgctcactgtatagctcactgcaacctcgaactcctgggctctgggctcaattgatcctcctacctcagattttcaaaatactgggattcaaggtgtgagccactgtgtttggctctttggtttgtttgtttgtttcgtgacagagtctcactccactgcccagactggagtgcagtggcgcaatatcggttcactgcaacctccgcctcacgggttcaagtgattctcctgactcagcctccctggttgctgggattacaggagcgtgccaccatgccctgctaattttttgtatttttagtagagatggggtttcaccaagctggccaggcttgtctcgaactcctgacctcatgatccgccctcctcagcctcccaaaaagtgctgggatttcaggcgtgagccaccacacctggcgtgtttgttttgttttgtaagatggggtctccctggccaggcgcggtggctcacacctgtaattccaacactttgggaggctgaggcgggcagatcacttgaggtcaggagttcaagaccagcttggctaacatggtgaaaccctgtctctactaaaaataaaaaaattaaccgggtgtgatggagtgcccctgtaatcccagctacttgggaggctgaggcaggagaattgcttgaacctgggaggcagaggttgcagtgagccgagattgcaccattgcactccagcctgggcgacagagtgagactccatctcaaaaataaaaagaagtgtcatgaggttactatttttcccctttgtaatgaataagtattttatgtggaggtgctttgaaacttggtaaatatcctgtccatatcaaaattttagttcatttatttgccagtatggacttaggtttttctattttattcagtacgttgtaattttatgtttattttgatgctcagattgtctcaagtttggccagtgggttacctttcaatctagctcctgtgtctttcatatgtcttcatcattctttgattagtaggcacttttgtgtttttcctgacccagcctggaattaaccatttcaccaaggagcgctggttccttttggcagagaatgatatatagaaatcaagatttgaatgctaggtagattcattgctgttgggatatcacagcttacagaccctggagtctgtgtgtttgtgtgtgtacatatatgtttacacccaacatccattttcagtccaaccccacaggatttattctaatagttagaaacctggttcccactatcttttctttattattattctttttttcttttttttttttttgtaaagacaaggtctcactatgttgcccaggttgatcacaaactcttggcctcaaatgatcctcccttggcctcccaaagtactgggattgattatagcattacagccagtgcacctggcgctggctcctacagaatttaatatctacatttacttaattgatctctctgtatgcaactaacttcccactgccactccttccctctgaatgctctcctcaccccgctgtactctgataccagcaccaggatatgtctatgcaaaaacctttctcaccacacctgggctctgaactcccatgtcaggccacccttccatgtggctctctggctttctgagcctgctctcttcctgctgggggcccttttcactgatcatgggctccagcatcccacactgatcctccccgctgagtaggcatcttccctaccctgctctggctttgacatcctccgtcaagccaccttcttccatgaacacctttctcctcttactcggggtctggctccacataccatgtctcttttcatattttttgggctctgaaccttgtgttgggctgccttttcacactggatgccctactacttggacacccttctcaccataccaggcttccataccccatgcttggctgccctttgtgggaatgtccttgcttgggttcttgtaccctgtgccaggctaccttcccctgtggacaccctccgtaccttgcttggtctcagacaccctgtgttggattctacttccacacggatgctttcctcatccctcttgggccctgatatcctgcgctggctgccctcccatgctgacattttccccctgcttaggttctgatgttcctgtgctggcctccctgtctatggggatgcctttctgaacttctttgtacaccatgttaggctgtccttctctgtggatgcccttctcaccccatttgggcttcagcaccctgtgactagccactactttctgtgtggtcactgccttccttgttccaggtgggctctgacactgtgctctgggccatgtgactcccacccagagtagacgtctgttttgcctgaccccacttaatggatttggatttattgcttaggaagggaagggggagataaaaagcttgaagattactttttttttcaatttttaaaattgtaaaatacacataacataaaatttaccatcttaaccagttcattttttttttttttttttttttgagatggagtcttgctttatcacccaggctggagtgtagtggcgtgatctcggcttactgcaacctccgccacctggattcaagcaattctcctgtctcagcctcctgagtagctgggactacaggtgcatgccaccacatccggctaatttttgtatttttggtagagatggggtttcaccatgttagtcaggctggtctcgaacgcctgacctcaggtgatccacccgcctcagcctcccaaagtgctgggattacaggtgtgagccactgtgcccagccagttcattgtttttaaatacactcatagtgttgtccaaccattactattatccatcctcataactcttttcatcttgtaaaactgaaattgtatacccattaaacaataattccgcattcctccctccccagcccctggtaaccaccattctactttttgtctctatgactttgaccaagtacctcatataaaaggaatcatagtgtttgccttttcgtgactggcttatttcatctagtacaatgtcttgggttcttcaatgttgtagcatattgtagaatttccttctttttaaggctgaatggtaatctgttgtatggatataccacattttgcctattcattcatccgctgatggacatgggttgttctacatcttagctattgagaaaagtgttgctataaacatggatgtataaatattgaagagtacttttgatatgattttggggagggcctaggggaagatgatttgctggagagatgataaagaatttatggtatgttctttctatctagccatactttaaaatcgagcatagtaccatgaaagggaacatatgaccatataatttattttttgttaaggtaattagtatctcctgtggggacctgatggatgagaagggacagattgttgggcatcagtgtgaaacgctaggattttagtgccctattagttattgtagttctgaaagtggaactcattgccctgtagcctttgttctcactataggaagtatgtttagatgtgtgacgatatggtgagtttgcacgctctgaaagctgcaagattgtgtttgagtgggcaggactccctgactgttctttctttctttgtttctttctctttttccctttttgagacagagtttccttcttgttgcccaggctggagtgcaggggcacgatctcggcttactgcaacctccgcctcccgggttcaagcaattctcctgtctcagtctcccgagtagctgggactacaggcgcccgccaccacgcccggctaattttttgtatttttcatagagacggggtttcactatgttagccaggatggtctcgatctcctgacctcgtgatccacccgcctcagcctcccaaagtgctgggattacaggcgtgagccaccgcgcccagcctggattcctttttcaagcagaagatcctaaaggagatggctgttacattttgagttcaggaacttatctgaatgcaacagttaagcatttttgtttctgtgtgatgattaattagctccctgaggttcaaaactgtgggtctctccctccatatcctaaaagcctgagacgcaacaggagttcagaaaaaccttccaagaatctgaacagacctgtgtgcttggagccatgttggtaataaggcatttatcatttttgtcagaattacttgttacttgtctctcccttatctactgtgagaacagtaattcttaaattctgtgaggacagtagagctgtggttagaatgtgtcccccaaattcatgtgttagaaatttaatcccaatgcaacagcttttcagggtagggcctaataagaggtgattaggtctctgccctcacaattggattaatgtcctcatcttgggagtggattagttatctcaagaatagacttgttacatatgtgagtttagccccctcttgcccttacctgatgacggccactcaaccttgaacttcccagcctacagaagtataagaaatacatttcttttctttataaagtgcccactgtatgggattctgttctggcaacacaaaacagactaagaaaagtagtgagcacagtatctagctatcttagaaaatttttgtgctctacaagttggtactgaatgtataaagctggcttcaaagaggaccggccgcaggtaaaagtccattgtcttcaccatgccacgtgtggcacctccagctcttaaagacaaaagaggagttggattggctttgaaggcactcagtgaatatttgttctgatataactcttggaaaaataacttttggagtgtgtgtttgtatgtgtatgtaggtatatatactctcctcctttttgcccaatcatgtggtgaaagtaagctccaggtgttgttaacacttaatgcctaaatactttagcatgcatctcctcgaaacaagaacaattccgtgtaaccacaacactatcacccattggaaaataacactaagaaagaatagaaaggccgggcacagtggctcacgcctgtaatcctagcactttgggaggctgaggtgagcagattgcctgagttcaggagtttgagaccagcctggccaacatggtgaaaccccatctctactgaaatacaaaaaattagctgggcatggtggcaaacacctgaagtcccagctattcaggaggctgaggcaggagaattgcttgaaccaggaggcggaggttgaagtgagctgagattgctccactgcacttgacagaacaagactctgtctcaagaaagaaagaaaaaaagaatagaaatcgtccgaacttcacaaaaaaagcctctaataaaactagagcttaagaaactttagccataggaaaaccacatcaagttactttatccagcatacagtccacatgcaaatgggcccagctgtccccaaaatctcctttatagctattttagtttaatttatttatttattgagacagagtctcactctgttgcccaggctggagtgcagtggcacgatctcggctcactgcaagcaccgcctcccgggttcatgccattctcttgcctcagcttcctgagtagctgggaccacaggcgcccgccaccacacctggctaatttttttgtatttttagtagagatgatgtttcaccgtgttagccaggattgtctcgatctcctgacctagtgatctgtctgcctccgcctcccaaagtgctgggattacaggcgtgagccgccacacctggccaattttagggtttttttttttaactcaagaaccactataaccattttactgtctgtatatatcccataacatcatgttgtaatccccaaatacacacagcagaatttattttttaaaaagaaatcaaccagggtttatgaattacatttggcatgattagttgtaagctataatcttatcagaggctttttttgtgagggtgggacaatttctgttctttctcatttatttgggcgccttctgggatttgttggactttggtttgcccctagagattccttttcctcagaactagtggttttcctatgaatatttttgtttgaacagttacagtccctcgtctgtaaatcttatgtgactttgctcttcctattgagtgactttcccaattcctttctccttgggaagttatgagagtggggcacactgacatgaaaattctcattttcatgcaccaccatgcctggctaatattgtatttttagtagagacggggtttctccatgttggccaggcctgtctcaaactcctagcctcaagtgatctccctgccttggcctcccaaatcactgggattacaggcgtgagccactgtgcctggccagggagaccccatctctaaaaacattttaaaaagtcaccaggcatggttgtgtgctccacgcacttacagtcctagttgctcaagaggctgagaccagaggaccacttgagccccagagctcgaggctgcagtgacctatgattatgccactgcactccagcctgggcaacaaagtgagacactgtctcaaaaaaaaaaaaattatttgtttaaagaagtgttgcttaaggctgggtgcggtggctcacgcctgtaatcccagcactttgggaggctgaggtgggcagatcacctgaagtcgggagttcgagaccagcctgaccaacatggagaaaccccgtctctactaaaaatacaaaatgagccgggcgtggtggcacatgcctgtaattccagctactcaggaggctgaggcaggagaatcgcttgaatcccagaggcggaggttgcagtgagccaagatcacaccattgcactctagcctgggcaacaagagcgaaactccatctcaaaaaaaaaaaaaaaaaagaatagaaaccatccgaccttcatgaaaaaagcctctaataaaattagagcttaggaaactttagccataggaaaacaacgtcaagtaacttcatccagcatacagtccacatgcaaatgggcccaactgtccccaaaatcccctttatagctattttagtttttttttaactaaagaaccactatactataaccattttactgtctgtatatatcccataacatcatgttgtaatccccaaatacacacagcaaaatttatttttaaaaaagaaatcaatcagggtttatgaattacatttggcatgattagttgtaagctataacctcatcagaggctttttttgtgagggtgggacaatttctgttctttctcatttatttggacgtcctctgggttttgttggactttggtttacccctagagattccttttcctcagaactagtggttttcctatgaatatttttgtatgaacagttacagcccctcgtctgtaaatcttacgtgacttcgctcttcctattgagtgactttcccaattcctttctccttgggaagttatgagagtggggcgcactgacttgaaaattctcattttcatgcgccaccatgcccggctaattttgtatttttagtagagacggggtttctccatgttggccaggcctgtctcaaactcctagcctcaagtgatctccctgccttggcctcccaaagtactgggattgcaagcgtgagccactgtgcctggccagggagaccccatctctaaaaacatttaaaaaagtcaccaggcatggttgtgtgctccacgcacttacagtcctagttgctcaagaggctgagaccagaggaccacttgagccccagagctcgaggctgcagtgacctatgattatgccactgcactccagcctgggtaataaagtaagacactgtctcaaaaaaaaaaaaaaattatttgtttaaagaagtgttgcttaaggccaggcgcggtggctcacacctgtaattccagcactttgggaggccgaggcaggcggatcacctgaagttgggagttcaagaccagcctgactaacatggaggaaccccatctctactaaaaatacaaaatgagccgggcgtggtggcgcatgcctgtaatcccagctactcgagagtctgaggcaggagaatcgcttgaacctgggaggcggaggtggcagtgagccgagatcacaccattgcactccagcctgggcaacaagagcaaaactccgtctcaaaaaaaaaaaaaaaaagaaatcgccccaccttcacaaaaaaagcctgtaataaaattagagcttaggaaactttagccataggaaaacaacatcaagtaactttatccagcatacagtccacatgcaaatgggcccagctgtccccaaaatctcctttatagctattttaggttttttttttaactcaagaaccactataaccattttactgtctgtatatatcccataacatcatgttgtaatccccaaatacacacagcaaaatttatttttaaaaaatcaatcagggtttatgaattacatttggcatgattagttgtaagctataatcttatcagaggctttttttgtgagggtgggacagtttctgttctttcttttatttgggcatcctctgggatttgttggactttggtttgcccctagagattccttttcctcagaactagtggttttcctatgaatatttttgtatgtacagttacagtccctcgtctgtaaatcttacgtgacttcgctcttcctattgagtgactttcccagttcctttctccttgggaagttatgagagtggggcgcactgacttgaaaattctcattttcatgcgccactacgcctggctaatattgtatttttagtagagacggggtttctccatgttggccaggctcgtctcaatctcctagcctcaagtgatctccctgccttggcctcccaaagtactgggattacaggcgtgagccactgcgcccggccagggagaccccatctctaaaaacattttaaaaagtcaccaggcatggttgtgcgctccacatacttacagtcctagttgctcaagaggctgagaccagaggaccacttgagccccagagcttgaggctgcagtgacctatgattatgccactgcactccagcctgggcaacaaagtgagacactgtctcgaaaaaaaaaaaaattatttgtttaaagaagtgttgcttaaggctgggcgcggtggctcacacctgtaatcccagcactttgggaggctgaggcaggcggatcacctgaagtctggagtttgagaccagcctgaccaacatggagaaaccctgtgtctactaaaattacaaaattagccaggtgtggtggcacgtgcctgtaatcccagctactcaggaggcttaggcaggaaaatcgcttgaaccgcggaggtggaggttgcagtgagccgagatctcgccattgcactccagcctgggcaataagagcgagactccatctcaaaaaaaaaaaaaatagagttgttcctcctattggccctacccctgctctatggggttggaatcagactttcgtagagtgggccagccattgctcacaggtttccacaggtgattctaatattcactctgattgagaaccactgggccttgtaaattataaagtgtccattgggctatttttttcttttttgagttattacggtttctcgacatttgcaaaaataaagggagggggagttaaactcttttaatgaatgaaggagaaatgcaaaattttctcatgtaaaaatgtctctgggtgtaaaataaattattatttttatgatgaaaataagcattatgttatttgagtaccataagacaatataattgttattctgttgatttgatcattcatatttctttagcaatttctagaactgtgtgccagcctgtgttctagaacatggggtactattctagatgctgattataatatatataattactgagcaactcttaaatatacatgtaatttattttcaccttttttatggttttgattttgatacttccaggttcttcagatagatcctgaagttacagatgaagaaataaaaaagaggtttcggcaggtacagtactatttccctgtttgaactttttgaaaatgtatgaagcacatgattcttttatcacttgctattattgacttgatatgtttgggccaaaatttaacttttttttaaggctgtgtaactgttttgtaaaaaaaagctcataataatatataaaatcttaaataatttaatgaccatagcttacctatgaatagaatgaattttatatccaaatagaatctctgcaactccttaattaagagggataagtataaagtagaataatagagcttgcatggagttgtaactaccaaaccccctgtcttctaggagggaacatatcaaatgattcatagcacatttttatctttaagactccatttgtctgtaattttatcttttatttttattcttatttttcgagacagagtcttgctttgtcgcccacgctggagtgtagtggcatgatctcaggtcactgcaacctccacctcctgggttcaagcagttctcctgcctcagcctcccaggtagctggtattacaagtgcatgccaccacacccggctaatttttgtattttggtagagacagagtttccctatgttggccaggctggtgacgaactcctgacctcaagtgatctacctgcttcagcctccccaaaatgcaggaattaccggtgtgagccactgcacccggccgtaattttatcttttgccaacttaaatgaatacctaagagataactggtataaagagtgctttttgaaagttctccaggaaaggagatctatagcttctgaatcttgcccattcgtaggtttaataactggaactacaaagttttaaagtaaacttaaaaaaaaaatccttccagttttgacagctgagtaaccctccccccagcctttttttcttaaaaattattattattttttgagacagggtctcactctgtcacctaggctggagtacagtggtgtgatcttggctcactgcaacctgtgcctcctgagtttaagcaatcctccctcctcaacctccccagtagctgggactacaggtgtgcatcaccatgctcagataatttttgtattttttgtagagacagagtttcgccatgttgcccaggctggtctcaattctgggctcaagcgatctgctggcctcagcctctcaaagtgccatgattacaggcatgagccaccgtgcctggctacctttttttctgagttgaataatcgtagtccctataatttgcctttgcaaattggattttctatatattccatgtcttttaaaaaaactttccttagcttctttatagtcttatgtacttcatattttaatagggtctgaccagagctgaatgtaattttcagcttctgatgagatacttgttaatatccagtggtgtgcttgtttcttcagtacagtaattttccccatattgctgactcatagtcattttctgatctacagttaagccaagatgttttttaacttggtctacgtaatcatatcccattatataactttatagcttttttttttccttcctaagctctactctatacttatatttagctttttcctttttctaaaatttcaaattttctaatatgcattactaatcattcccatattaataagcatttaagttcatagtcaaaacaattttttatgtagctacataaataataagagttaagaattcttaataaatcattaatatggactgatagttaagagtgtgcatattggagctatacaactagtttaaatcttgactgtaccacttaacaagcagtgtaaacttgagcaagttacatttaacctttccgtgtctgttaccccgtttgtaaaatgtaataatggtgtctatcccatgagtttgttgtaagaatttaaatgatgtattacacagaaggcatttagagtaactcttggcacataatgtatcctcactatatgctaactattgtcagcgtgtgttagtctgctaatttctttacttgcattgtttgtttcattcttatatcagcccaattagatataggtacatagtattatctcatttacagagcaggaagcggaggcagagataggttaagtgatttgctcgaggtctcatagctagtaggtgattgaagttggaattagaacccagcataatggttccagtaatgctgaacggagcgttagattcccatttgttctcattccccgacatagttccctgggttccaactagttggtttctgtcaattgacaatatgtcatggtttttaactgtgagtatctgaattacctatgaaagttcttttttttttagctggtttattataaaaattttatatagaaaaaagaatggacaagcatagtggctcatgcctgtaatcctagtattttgggacattgagtcgggcagattgcttgagctcaggagttcgtgaccagcctgggcaacatggtgaaaccccgtctctacaaaaaacgaaaaacaacaacagcaaaagccaaaaattagccgtgcctgtagtcccagctactcagaaggctgaggtgggaggatcacttgagtccaggagattgaggctgcagtgagctgggatagcaccattgcactccagcctggatgatagagcaacactctgtctcaaaaaaaaaaaaaaaaaaaagaatagaacaacgaatattcatgtatccaccatctatattgaatagttaatttcatttatatatatatatatatatatatatatatatatatatatatatatatttatttatttattgagacggagtccggctctgtcacccaggttgcagtacagtgttgcgatcttggctcacggcagcctccacctcctgagttcaagtgattctcttgcctcagcgtcctgagtagctggtattatagatgtgtgccactgtgcctgccaaatttttgtatttttagtagagacggggtttcaccatgtaggccaggctggtctcgaactcctgacctcaagtgatctgccagcctcagccttccaaagtgctgggattacaggcgggagccactgctcctggcagacactgactatatatttaactatatatttttggctgaatcattgtaaattgcaataaaccatgatgctttacccctaaatacttcagcttgtacccttcccaaaaaaaggacattttcttgcataatcacttatcccacctaacaaaataagggctaattccctacgatcatctgaaacccagtctagtagaggtttacaaagtgcagatgccaaagactaactcagaaggtctgagggtggaaattagaatgttgtctttttcagaagcttcacagggttggagcacaggcagaatgagaaactgctttagattaggagttcttttaggagagagttgatgtctcatacctgctttagccaccttagtgcttagtacaggttgagtatcccttatctgaaatgcttgagactagaagtatttcagatttcagattttttcagattttggaatatttgcagaatgcataatggtcgagcatccctaatccgaaaattcaaaatgttccaatgagcgtttcctttgagcatcatgttagcactcagaaagtttcagattttggagccttttggattttgggtgctcaacctgcataaggaacataataggaacttgatacctttcagtctccctcctcccccaaattattacaacatcttcatagtgctaggcttccatttgtttttgtttttgtttttgtttttgttttttcctggagacagggtctcactttgttgcccaggctggagtgcagtggcacaatctcaacctcccaggctcaagtgattctcccacgttagcttcctaaatagcttggactacaggcgaccaccaccatgtctgggtaattaaaaaattttttttttgtagagacagggtcttgctatgttgctcaggctggtctcgaagtcctgggcttaagtaatcctctcacctcagcctcccaaagtggtgggatgacaggcgtgagcctctgtgcctggcatgtttggtctcaactttgtgattaaaacctgaaatgtttcctagttgtacctttaccttttggtgcttgaattttgttaaagatcagtatttctgggcatttaaagagatttgttaattttttaaatgcttttgctaagagtctctttttgccgtaggaccttagagcttttggttgtaacgagacagggcaggctggaagttagtaaatgtttcccttattgacaaccccaacttttctcttattgtagttatccatcttggtgcatcctgacaaaaatcaagatgatgctgacagagcacaaaaggcttttgaaggtatttgtaaatttacctgcttctgagtattagattgtgaatggcagggcctaactgttccttgtcctagatcaagcaaagactgttatagttttgtcttctggtcaccaagaagctgtggttttcagtagagcagttgccatttcaaagcagaatgttgttgtttaagaagtagaccttaactttgctttgttaaaacttttatatgccaacaaagactgttattgcataggatcattttttttctttgaacataaagaattttatcactgaattaaatccagatgtagtgtatttagccttgagtatatatttaattttttccaaggctcttaaggaaagtcattgctatagttgaatgttttttttaacttagtttaacgacagtaaataattaaagtagggaatgctttagagagcacaagtccatttacactgcctgagtatagttcagactttcagagggtgtttgcagaaacagttaatttcaatgttttgcattagctgtggacaaagcttacaagttgctactggatcaggagcaaaagaagagggccctggatgtaattcaggcaggaaaagaatacgtggaacacactgtaagtatttatagtgctgctgtgtttacaggaagtatcagcaagccttgggcaccttgtagaagggtacatatgaacatagtaatgcctactggcacaacctgtggctacttctgtgctctctaccactttgctgtggtggtcatgaatagtgtgtgcctgaagctgtaattcacccctaagagaagaactcagatgaggagtagctggtacactgctcctacctctttccctaccagtcctgtgttggggagaaagggttgttctctccctctcatcacatattgccacttaccccattcttagagtggaaacgtggagcagcctgtgactcttgactcttgatttttattcttgtccctgtgaagggtttgcaacaaggcttggcaaaggctagcaagaggataggcgtaaactttttttaaaataggaggaggtttatgtccatcttaataacagagttgggaagaactcagttgaaggaaactgagttgtagctggtgttatttttgtttgctcttgagggcatacataagtctccaatgtggtgggaaatgtcagtatggctttcccaaggtaagaaaggtcttttaactttttacttgctggggcaagaatcttgaggtcatttgtaagagctgcttcaattgtgattggatgacttttcacatgaagagctttgaaatctgagacaactttataaccataataatgaatccagtttcggtgaggaaaatggataagaagaggagacaaagggcccataactatatcctgcgggtcatgtgttggaaatggcacttgtaggccctatcctggtagaaatagggaaagtgcctgacagtttctccttaaatcattgtggcttcgtatgtctttcacctgtaagaaagtcatccttaggcttcctgaccacagggtggcagtagggcctttctgagcttagagggtacttggcctttgctggtataatagactggttagttcatggagtagtgtcattcttgtatgaattcgtatatttatttatttattttttatctcagtagtggccaatgtgataaaagtatcagttaatatgatatgtggtttaaggaggttccatggtgaaagtgatcaagaatgcagttatagaaatgccagaaaaactacttggacataatgccacagattctgtagcttcttctaaaacttgacagatatatttgctttgctctaaacacataaccacaagccaagaaaggtaaataagtagtctgtttcaaagactttttggatctgatgagttggggacaacctcccgttggtcccctttcatctttcattcttcctggtagattggattttagatgagattagaaaaaggacttgtggttcctaattttccttgattctgttgttcttttgaggagggaggggaggggctctttttttttttaatgaaaactttttgctatacccgtgcctatagaaagttaaatatattgtatgtgtacagcccagtggatattctcaaagcacagatgctcgtcttttgatgaaaaaaaattctttttaggtgaaagagcgaaaaaaacaattaaagaaggaaggaaaacctacaattgtagaggaggatgatcctgagctggtgagttaaatataggaaaagccactgtatcttgtgtgattgtgtctacgaattggtgggttacagagacagaagccaaaagaatgatgaatatatgctatttcacatttatttatttatttatttattatttttgagactgagtttcactcttgttgcccaggctggagggcaatggcgcgatctcggctcactgcaacctctgcctcctgggttcaaacgattcttctgcctcagcctcccaagtagctgggattaccagcatgtaccaccatgcccggttaattttgtatttttagtagagatggggtttctccatgtttgtcagtctggtctcgaactcctgacctcagatgatccgcctgccttggcctcccaaagtcctgggattgcaggctacaggcatgagccaccctgcccggcctctggctaatttttttgtatttttagtagagacggggtttcatcatgttggctaggctggtcttgaacttctgacctcaggtgatccacccgcctcggcctcccaaagtgttgggattacaggcatgagccaccgtgcgcggcctaatttttattttttaaaaaaacattttatttggctgggcgcagtggctcacgcctgtaatcccagaaatttgggaggccgtggcgggtggatcatgagatcaggagttcgagaccatccgggccaacatggtgaaaccccgtctctactaaaaatacagaaattatctgggcgtggtggcacgtgcctgtaatcccaactacccgagaggctgaggcaggagaattgcttgaacctgggaggcagagattgcagtgagccaagatcgcgccactgcacctccgcctggtgacatagcaagactctgtcttaaaacaacaacaacaacaacaacaacaacaaacattttatttgaacttaaaacatataaatatacatttatttatgtatttgtttgagacggggtcttactctgttgcccaggctagagagcagtggtgcgatctcagctcactgcaacctctgcctcccaggttcaagtgattctcctgccttagcctcctgagtagctgggattacagatgcccgccatcaagcctggctaatttttgtatttttaatagagacgggatgtcatcatgttggtcaggctgatctcaaactcctgacctcaagtgatctgccctcctcggcctcccaaagtgctgggattacaggcgtggaccaccgcacctggcccaatttttttcagttgtttttttttttcctgattataaaagaacacatgctaatgatagaaaatttggaaaaagagaaatataaaaaatataaaatcgcagtgtctgtctatcccgtgtatggagcttttaaatatactgagctattcattacagactcctttatccctttgatgtttgtctttattagggactggggttgaagcattgcttttagtgagcagtgtctagcaggtaacaggataaaagagaagtcacagagatttagggacttctttattttcctttctctccatatatcactctttgctccagtgtctgattttagaatttaggcactattaaatatgcatgacagattacttttgtacttccatgtctatttaaaatactttatatctggagaaaaatatttaaaggtagaataacataagctgtgttcttaagaactcttgaaaataaagaattaaaaactggtagggagggcattgtgatttcattaacttagtgtgacaggggctgggtcacttacgttcacttatttttttgtaattctttttagagatagggtctccctttgtcaccccggctggaatatagtggcatgatcttaactcactgcagccttgacctcctaggctcaagtgatcctcccaccttagtggatattatacattctaataataacctctggtggctcatacctataatccaagtgctttgggggctgaagtaggaggatcttttcagcttaggagttgaggctgcagtgagctatgatcacaccactgcactctagcctgggtgacagattgagaccctgtttcaaaaacaataataataaataataatagcttctgttcctatcattgtaagactatcatataatatacttttttaaaaaagagatagagtcttgctctgttgtccaggctggagtgcagtggcatagtcatggctcactgcagccttgacctcctgagctcaagcgatcctcccacctcagccttctgagtagctgggactacaagtgtgcgccaccacacctggttaatgttttatttttaatattttttgtagagatgggatctcactatgttgctcagggtggtctcaaactccagggcttaagtgatcctgctgtcttagcctcttgaaacgctggatctacaggtgtgcaccaccatgccccgctaatttttgtttttgagacggagtttccctcttgttgcccaggctggggtgcaatggcatgatctcagctccctgcaacctctgtctcctgggttcaagtgattctcctgcctcagcctcccgagtagctgggattacagtcacgcaccaacatgcttggctaatttttgtatttttgatagagacagagtttcaccatgttggccaggctggtcttgaactcctggcctcaggtgatctgcccaccttggccttccaaagtgctgggattacaggtgtgagctactgcgcctggcctgcacgctagttttaaaaaaaatttttttgtagcaatagagtttcactatgttgccagggcagtcaagctcttagcctcaaacgattctcctgcctttggccttccaaagtgttggaattacagatgtgagccacggtgcacagcctgtgccaggttttaatctgctttatcttggactccaggtgaaagtacatggttcaagttgctggtaaaaatatttactctgattttcttttgttcttgattttcctgtagttcaaacaagctgtatataaacagacaatgaaactctttgcagagctggaaattaaaaggaaagagagagaagccaaagagatgcatgaaaggtacatatcagtatattcatttaaaccatatttaaatacctagattaactaacattggtctttggtgattttcctaatgagggaattatatagtataccatttaagagactataaaaatagttacctaaaaacagtcaagcttttgaatcaccagggtaagtagtttttttctttgacttttgagaattattgaataggtctgtccttagggagtgtattttttatttatttttttgagacacagtcttgctctgtagccaggctggaatgcagtggtgcgatcttggctcactgcaacctccacctcccaggttctagcagttcccctgcctcagcctcctgagtagctgggactacaggtgtacaccaccatgcccggctaattttttgtattttagtagagacagggtttcaccatgttggccaggatggtctcgatctcctgacctcgtgatctgcctgccttgccctcccaaagtgttaggattacaggcatgagccactgcatgctgccagggagtttatttataatcaagagccttgtgtgtgttcttcctgatgtcctggagtgaaataagcagttattaaggccattgttactgaagccagaaccttttgtggggctagtggctacagctttggtgagtgtatagtactgtagtgtcatcagtaacaaaatgtttaatgttctaaaatatgatttctcttgaacatcagaaatgttagaatttcgcttttgttgcccaggctggagtgcaatggcatgatcttggctcactgcaacctccacctccccaggttcaggtgattctcctgcctggctaatttttgcatttttagtagagacggggtttcaccatgttggtcaggctggtctcgaactcctgacctcacatgatccacctgccccagcctcccaaagtgctggcgttacaggcatgagccgctacatccggccgagttttgtttctgtatgtattttatattgttgcttggtaggtaccagtaactaaaatttgctagttgaggttgtgtgaaatatctttgttttcggatagggttttgtccagagatcttaagaactttggctttataatggtcattctgctgaaataaggtggcctgtgttctcgacatagctttgtcactgaaagagcccaaaacctcagattgctcttggctgggctttagttactttatctgtgtaacaaggatatttatgtctttccccacagccatgcccaagtctgatctgcgtgttttagaatgagacattcatgaaaatgctatgagccctttccagacagccatctttgtagacttctagggaattgatttactatatatgcttgcttctgtggggagatgccaccttgtatggttaattcagtctgtaagtatcatataaatactatgatctggttttcctcctaggaaacgacaaagggaagaagagattgaagctcaagaaaaagccaaacgggaaagagagtggcagaaaaactttgaggtaaatttccaaggtggccagggattctaattccagaataaggcagcttggttcctgtggcgctcccaggactgagtggggcagtcagaggggagtgggatatgtggggaagagtgggagaggtgaagaatgaggctgggcctgcctcagcctcctgtaagctctgtagccttggcaaggacgatgaggatccctgaatggcttttttaaaatttatttttaaaaattattgtttaatttctttttacagcacactaacagtttcaccctgaatggttttttagattgtagtaggcacagctgcccagtgggctcaagaaaaatggattgcacttttaatttagggggtaagcatagagtattgtgctgcttagagatctgttagtagatgctgaagttcttgtgcccacagtgtcctacctgcagagagagttagaacctttgaacttgactcttctttgacaccctggttatatgcttcaggtggttggacagaaggattgtggcaacattcggtcttttcttctatagggtttaggactcatggttaggggctggctaatcagagttgatgactttgtttctgttgcacttcatgtatggaaagagaaaaaatgataatgaggtagaggtcctagtggccacccctacacaactcgctaggcattgtactggctttggagcagccatccaagttttggggggcagcagaaaggtgcagtggaaagagtagctgtactgctagctagctgtatggcttttagaaaatcatttaacctttttgagcctcagtgttatttgtgaagcactggtagcagtacacaccatagtcggcttttggtgacaattagaaataccatatgctggccgggcgtggtggctcaagcctgtaatcccagcactttgggaggccaaggcgggcagatcatgaggtcaggagattgagaccatcctggctaacatggtgaaaccctgtctctactaaaaaaatacaaaaaattagccaggtgtggtggctggcacctgtagtctcagctactcaggaggctgaggcaggagaacggtgtgaacccaggaggtggagcttgcagtgagccaagattgtgccactgcactccagcctgggtgacagagccgtctcaaaaaaaaaaaaaaaaagaaaaaaaaaggccgggtgaggtggctcatgcctgtaatcccagcactttgggaggccacggcaggcggatcatgaggtcaggagatcgaaaccatcctggctaacacggtgaaaccccgtctctactaaaaatacaaaaaattagccgggcgtggtggcgggcccctttagtcccagctattcaggaggctgaggcaggagaatgatgtgaacccgggaggcagaggttgtagtgagccgagatcgcaccactgcactccagcctgggcaacagagcgagactgcatctcacaaaagacaacaacaatgacaacaaaaaaaaccatgttaaacgtctagcctcgaggtccccaacaaatggggcctcagtgttgtgatgattattactgatttcgtcctcctcttgcaacctgcagctcatcctgcgttctaggggtgctatgacactttcttgggcccttgggagtgggaagaaagctctattctactttttttttgagacggagttttgcccttgttgctcaggctggagtgcgatggcgtgatcttggctcactgcgacctccgcctcccaggttcaagtgattctcctgcctcagcctcccgagtagctgggattaacaggcatgcgccaccatgcccggctaactttttatatttttagtagagatggggtttctccatattggtcaggctggtctcgaactcccaacctcaggtgatccacctgatgtgtgagccaccatgcctggcctattctactcttttttctttttttcttttcttttttttttttttgatacaaagtctcgctcttgttgttcaggctggagtgcagtggcatggtctgggctcactgcaacctctgcctgccaggctcaagcgattctcctgcctcagcctcccgagtagctgggattacaggcacctgccaccacgcccggctaatttttgtatttttattagacacagggtttcaccatgttggccaggctggtcttgaactcctgacctcaggtgatctgcccgcctcggcctcccgaagtgctgggattataggtatgagccactgtgcctggccagctctattctactcttgggttattccagaggactgaagtgggctgggctacaggagggtgagtggatggcagaccaggtttaggcctttccactcattgactggtctcctcacctcaaacttcttttgtacttaggaaagtcgagatggtcgtgtggacagctggcgaaacttccaagccaatacgaaggggaagaaagagaagaaaaatcggaccttcctgagaccaccgaaagtaaaaatggagcaacgtgagtgaccgcccaaggtcacaggcacagaacctttcccctgctatctcccttcctgcttcgaaggactcattctttcctcccacttccaccccaacatagagtagtatttgctttttagtccattttgttttcaatacgatttaatatcgatcagagtaattcttttgtacattgaaatgaggggcttggtttaaaaaaagacctttccctctccctgcccctagaacaaccagtattagaaggtgccaccattggtgctgccttctcttcccacagcctgtaactcagtgttttgtacttcactgaattgtgatggttagaaacttcgtggatagtttgtggaaatcatccaattaaacatactgcttaaaacagtgttgctgtgacttcagagacaagcctggaaggggcaccttaggaagccccttcgcttcagttgctcgcttctgggtgtgctcccttcgaaggcccagataagacagggaacacttgtgagcacacagagcagcatctgatgccctgtggtgtttggcatgtgccccctgtctactgaccaatcagtgtggcatgaggcccacgccacccaaacctttcactttccaaagagctagccgtcctccacccagtaccatgtcctagcctgtctgcatttgttagtggtaatattctttatgtataataaatttttatacccaagccattgatgtacttttccttgtactctcccttgtgggtcccttgtctggcttggctgaaccccaaaatgctttggggttggacagacctggctgaaccttagtttcttcatctatgaaatgggaatatgaattactgcagcagcttttagggcagatttgccatggcatatacaaggtaactaccatagtgctccttgggtattgccaatatcctattatttctgtgtaaaatgaagatactgattgttttgaggattaaatgaagtaatatatgaaa

SEQ ID NO: 358 - DNA, 24688 bp, Homo sapiens
  source 1..24688: mol_type = genomic DNA; note = NW_018654706.1:c26673-1986 DNAJC8 [organism=Homo sapiens] [GeneID=22826] [chromosome=1]
agaagggtcacgtggtggctgggccggggaaatggcggcttcaggagagagcgggacttcaggcggcggaggcagcaccgaggaagcatttatgaccttctacagtgaggtgaacacagagtgaggagtagtggcaccggggcgaccgctcccggatctgctttcccagtggacaaaggcagtggccgcctggcctggaccgttgggcgattccttcagtccagtcttcggggtggcgggggtctgggggtgtgtgagcgtctcccactgatagctgctgggagatcccccggggcaacgaaagagggaatggtgttcgatctatcgagggaggtggcgagtgtgtccaacatagtgcgggcgcgcgggcagagtgccccaagtccgcggagtcgggggctggcagaggctgggcccttcctgggagtgacttagccttcttggcccccgagacgtttcttagtcctttgtaatgagttgttttagtggttgtttctgccattcacgaacgccaggcactgtgtatcatgccagttaggcattatattacccccattttacagatgacgaacctgagctttagggaggtgaaatagtttggggccttacagtaggttacagcttgcttggtggtatgttaggacagcagtgggcttgttctgagcctcctttactatcgcatctccagcgcatagtatgtagtggatgctcagtaaatatttgttgagtgaatgaatgaataaatgaaataaaagcatgccgtttggagtcagaatctcagattaaattattgcaaggggctgggcacagtggctcacatctgtaatcccagcactttgggaggcccaggcgggaggaacccaaaagctcgaggctgcagtgacctatgatcggaccactgcactccatttttggcgagagtgagaccctgtctctttaaaaagaaggaaaaaaaggatagaaaaaaaaattcttggttgggcgcggtggctcacgcctgtaatcccagcactttgggaggccgagacgggcggatcacgaggtcaggagatcgagaccacggtgaaaccccgtctctactagaaatacaaaaaattagctgggcctggtagtgggcgcctgtagtcccagccactcgggaggctgaggcaggagaatggcgtgaacccgggaggcagagcttgcagtgagcagagatcgcgccactgcactccagcttgggtgacagagcgagagactgtctaaaaaagaaaaaaattcttggaagacagttaacctgactggactgggattgaattctttttttttttcctaaggcggagttttgctcttgttgcccaggcctggagtgcagtggcacgatcttggcccactgcaacctctgcctccctggttcaagtgattctctcgcctcagcctcccgagtagctgggattacaggcgcctgccaccacgcctggctaatttttgtatttttggtagagacgggggtttcaccatgttggccagactggtcttgatctcctgacttaaggtcctcccgcctcggcctcccaaagttgctgggattacaggcttgagccaccacgcctggccgggattgaatttgttcaagacattaattttgcagatcttcatattccacatctgtaaaaacaagagagttaatttaatttaatttatttattttgagacagagcctcactcttgcccaagctggaatgcacaacctctgccttctgggctcaagtgattctcccacatcagtagctgggactacaagctcaggccaccatgcctggctgatttttgtattttttttgttgtgacagggtcttgttgtgttgcccaggctggtcttaaactcctgggctcaagcaatcctcccgtcttggcctcccaaagtgttgggattacaggcatgagccactgtgcttggcaagagagttaattttaaaataaacattttcatgaggactaaagttattgtataagaaagcgtttcataaaaaaataaagcagaagcatctttctcagggttaaacaaggcagaagatgggacctctgtagggtggcatgggtttgaggaatggagttgccccccagcaggctgtgagctattcagggttaaggaccatatcacatccatcttttatttcttgcaattgtaacagtacttgttacatagtagtttctccaaagtattacatttaggtctagacacctggcaggcactgcctgtagtctcagctgcccggaaggctgaggcaagaggactggaggatgacttgagcccaggaggtggaggttgcagtgagccatgatctgtcttctgtcactgcagtacaccctgggtgacagagcaagaccccttctcaaaaaacaaaaacaaacaaaaaaccaaatggcaacctttgtttgaattggatgggaaaaaatatctaaggaagggtaattcagtcatttttttaaaaaatagagacaaggtcttgccatgttgctcaggttggtcttgaattcctgcacccaagtgatcctcctgcctcagactcccaaagtgctgggattacaggcataagccaccacactggcctcattcatttaacagatgtttattgaacattggaaatgtactagtttgctatttaggtgttgaggatacggtagtgaacaagagagaaaaaaaatcctgttttcatagagtgaagagggaagatgtctagaaggaatgactttttatgttaatgaaattctttccaaccttgttttggctataggaataaagatggcatatagcataccagagattcattccaactagcattccaactctgacagtgacaccaagaatgttttcctgggactgcctggtgcttgttctccctggcattgtcttcaggtcagggatttttcttttttctttctttcttttttttaaattaaaaatagagatggggtttcgccatgttgcccaggcttgtctcaaactcctgagctcaagcaatccacccacctcagcctcccaaaatgttgggattacaggtgacagctactccgcctggccaagtcagggattttttctaacactattagaattaggtggtggagttgtttgttccttcccatcaacagttttaaatgctgctcatagtttatgtcttactgtgattgtatttttcctttttttgctctttaaatttttttctttattttttttcctcacagagaaatctcttactttttttttttcttttttgagacggagtctcgctgtgtctcccaggctggagtccagtggcgcgatcttggctcactgcaacctctgtccctggggttcaagcgattctcctgcctcagcctcccaagtagctgggactacacgccatgccaccatgcccagctaattttttgtatttttagtagagacggggtttcaccatgttggccaggatggactccatctcctgacctcatgatctgcccaccccccagcctcccaaagtgttgggattacaggcgtgagccactgtgcccagcctattttttttttcttaaaattaaaagctataaatgaagtataatcacacacaagcacatcttccatcattaaagtggaagttctttaaaggctgtgacttatttatctttgaatcctcttgatgcctgctgtggggtcaaactgttggggttaaaattctggcttacaagttgggtaattgggaacaagtcagttaccttctctaagcctcagtattcttatctgtgaattgggtataacagcagtatctaccacatagggttgttgagattaataaatacatgtaaggtttttatattaaaattcaacaaatggtagttttaatttctcaaagcatttagcaaaatgtcttgcacatggtaaacacacaaataaatgtttgttgaacatatcagtgaacattttgttaagataattcagtttgttattgaattctattaatgaagtttttaatcctcataattttaggtgaaacaaatagagaagagagactcggttctaacttcgaaaaatcagattgaaagactgacccgtcctggttcctcttacttcaatttgaacccatttgaggtgagccgattgatgttgctagggcctctgtaatgggggagatttgcatagctgcaggcatacctacatcagaatacatacctaatttatatcatagttaggattgagaaaaatggtggagtaaagtgatggaatctgtatagtacaaaattgagtattccttatccaaaatgcttgggaccagaagttttttggattttggatttttttgggattttggaatatatacatacattctgcttacttactggttgaagcatcccaaattagaaaattcagaatgttaatgagcattttctttgagcatcagttgactctcagaaagtttcagattttggagcattttggattttgcatttttggattagggatatgtaacctgtatatagattgtctttaaacttgggtgattgtaccgagcagaactggagagacagcatgttaaggaaagtgagatggtcacatatctttcatcatcttttagcaacccaaatatataaggatttaatttcagatgtgaaggggtggctagctctaataagtttaggattctttttttttttttttttttttgagacggagtcttgctctgtcccccaggctggagtgcagtggcgcgatcttgacccactgcaacctccttctcccaggttcaagcaattctcctgcctcagcctcccgagtaggtgggattacaggtgcccaccactgtgcctggctaatatttgtattcttagtagagatggggtttcaccatgttggccaggctggtctcgaactcctgaccttgtgatccacccgcctcagcctcccaaagtgctgggattacaggcgtgagccactgcgcccagcctaggattcttgatttaaactacttgttaaaacttctgtttcactataataaatgccaaaaacccaacaacaacaaaacaaagatcacaagattttagataaatgaatatactttttgattttcttaattttatagctttaaacttttcctggttataaaagtaaatcatatttgttgcaaatgtacagaaagcaagaataatcatatataatcccacctaagagaaatagccactcctgtttacactcaaactgttttgcttaaaaacagggagcatcatacacttaatccttcttcttcttcttcttctttttcttttttaaagagatggggcctcattatgttgcccaggctggcttagaactcgtgggcttaagtgatctccttgacctgctcagcctctggagtagatgggattacaggcatatgacaccacacctggctcagctcaatacgattttattttattttatttttttgagacagggtctcactgtcacccaggctagagtgcagtggtgcaatcatggcttactgcacccttgaactcctgggttcaaacgatttgcccaccttgggctcccatagtgctaggattacagccattcgccaccatgtccagcctcagtgctgttttaaatgcttttttttttttttttttgagatgaagtctcactctgtcacctaagctggagtgtaatggtgcaatcttggctcactgcacctccgcctcccagattcaagtgtttctcttgcctcagcctcccgagtagctgagattacaggtgcctgcctccatgcttggctaatttttgtatttttagtagagacggggttttgccatattgttcaggttggtctcgaactcctgagctcaggcgatccacctgtcgcggcctcccaaagtgctaggattataggtgtgagccaccgcgcctgtccaaaaaaaaaaaaaaaaaaaaaagagagagagagaaattctttttttttttttgcaatgcttgacaagatgttaaatctgttaacatctttaatcataaatgaactcttcagaactcagtacagactaacattacacggaaagtgaaaataaaaggaacagaggaaaatggaatagtacaaatgagttataaggctatatgaagatgatatatagttaatactaatagttgagaaagcaattttattataaattacattatttgtgcttacaaatattgatatctgatgttggtacagctttagaaaatgaagaattctcaaatactgaggaaacttactctagtcatgaggagtttactcaaaaatgtagatttgtgcataaatttggccccagcagttccaaaccacagcaatcactccaacaaagtagttgggtacacacacatatacatacatgtttactacacaatagatgtgtaagtaatatgtcaccccccaagaaactttttatgaactggttataaaataatagactggggggtaaaaaaaattccatataatttatttaatcatttctttattgtggaatagtttagctagtttatttctttctaaaatttttttttttgagatggagtctctgtcgcccaggctggagtgcagtggcgcaatctcggctcaccgcaacctctgcctcccgggttcaagcgattcttctgcctcagcctcccgagtagctgggactacaggcatgtgccaccacgcctggctaatttttgtattttttgtagagatgggtttcaccatattggccaggcttttctcaaactcctgaccttgtgatctgcctgcctcggcctctcaaagtgccgtgattacagacgtgagccaccacacccagatctttaaaaagtttttttaacaggcggccctctgaaccagaataggttcagagagactccctaaactactttctaattgttcacatttacaaataattttgaagtgaatatttttgtatctgttaaataatagaaacaacacttattgggcacttagaaaaaaactcccctcacttttttttattgtggaaaaatatatataacataaaatttgccattttggccaggtgtggtggctcacgcctgtaatctcagcactttgggaggccaaggtgggaggatcactttaggccaggagtttgagaccagcctggccaacatggcgaaaccccatctccacaaaaataatacaaacattgctgggcatggtggtgcatgcctgtaatctcagctacttgggaggctaaggcccaagaatcacttaaacccaggaggcggaggttgcagtgagccgagattgtgctactgtactccagcctgggcgacagaacgagactgtctcaaaaaaaaaaaaaaaaattaccatttaaatttttttttagttttacaattcagtggcattaagtacattcacagtgttgtgtaaccatcaccactgttcatattcagaaatttttcgtcaccccaaccagaaactctgtatccactaaacagtaactcctcattttctccctgacccctggtaacctctactctactttgtctatgaatttgcctcttctaggaaacccgtgtaagtggaatggtaccgtatttgttactttgtgtctggcttatttcacttagcatgatattttcaaggttcatctgttttctgttttttgaagagtaatttttcaagaattttttcatttataaataatctcagattaacaaatatttcaaatacaatatgaagacttttccttgaactctttaagagtaaattgttagtatgatggtccatcaccctgatatactttaatgtgatttttctacaaatatcctcttactgaaccacaatataaactatcaaaatcaggaaatgaaccctgatacattgttactatgtaaatcatcagaccccattcaaattttactaattgtcccaaaaaagtctttctcagggcctctctggatacattgttactatataatcatcagaccccattcaggttttactaattgtcccaaaaaggtgtttttcagggcctctctatcactccgctcactgtatagctcactgcaacctcgaactcctgggctctgggctcaattgatcctcctacctcagattttcaaaatactgggattcaaggtgtgagccactgtgtttggctctttggtttgtttgtttgtttcgtgacagagtctcactccactgcccagactggagtgcagtggcgcaatatcggttcactgcaacctccgcctcacgggttcaagtgattctcctgactcagcctccctggttgctgggattacaggagcgtgccaccatgccctgctaattttttgtatttttagtagagatggggtttcaccaagctggccaggcttgtctcgaactcctgacctcatgatccgccctcctcagcctcccaaaaagtgctgggatttcaggcgtgagccaccacacctggcgtgtttgttttgttttgtaagatggggtctccctggccaggcgcggtggctcacacctgtaattccaacactttgggaggctgaggcgggcagatcacttgaggtcaggagttcaagaccagcttggctaacatggtgaaaccctgtctctactaaaaataaaaaaattaaccgggtgtgatggagtgcccctgtaatcccagctacttgggaggctgaggcaggagaattgcttgaacctgggaggcagaggttgcagtgagccgagattgcaccattgcactccagcctgggcgacagagtgagactccatctcaaaaataaaaagaagtgtcatgaggttactatttttcccctttgtaatgaataagtattttatgtggaggtgctttgaaacttggtaaatatcctgtccatatcaaaattttagttcatttatttgccagtatggacttaggtttttctattttattcagtacgttgtaattttatgtttattttgatgctcagattgtctcaagtttggccagtgggttacctttcaatctagctcctgtgtctttcatatgtcttcatcattctttgattagtaggcacttttgtgtttttcctgacccagcctggaattaaccatttcaccaaggagcgctggttccttttggcagagaatgatatatagaaatcaagatttgaatgctaggtagattcattgctgttgggatatcacagcttacagaccctggagtctgtgtgtttgtgtgtgtacatatatgtttacacccaacatccattttcagtccaaccccacaggatttattctaatagttagaaacctggttcccactatcttttctttattattattctttttttcttttttttttttttgtaaagacaaggtctcactatgttgcccaggttgatcacaaactcttggcctcaaatgatcctcccttggcctcccaaagtactgggattgattatagcattacagccagtgcacctggcgctggctcctacagaatttaatatctacatttacttaattgatctctctgtatgcaactaacttcccactgccactccttccctctgaatgctctcctcaccccgctgtactctgataccagcaccaggatatgtctatgcaaaaacctttctcaccacacctgggctctgaactcccatgtcaggccacccttccatgtggctctctggctttctgagcctgctctcttcctgctgggggcccttttcactgatcatgggctccagcatcccacactgatcctccccgctgagtaggcatcttccctaccctgctctggctttgacatcctccgtcaagccaccttcttccatgaacacctttctcctcttactcggggtctggctccacataccatgtctcttttcatattttttgggctctgaaccttgtgttgggctgccttttcacactggatgccctactacttggacacccttctcaccataccaggcttccataccccatgcttggctgccctttgtgggaatgtccttgcttgggttcttgtaccctgtgccaggctaccttcccctgtggacaccctccgtaccttgcttggtctcagacaccctgtgttggattctacttccacacggatgctttcctcatccctcttgggccctgatatcctgcgctggctgccctcccatgctgacattttccccctgcttaggttctgatgttcctgtgctggcctccctgtctatggggatgcctttctgaacttctttgtacaccatgttaggctgtccttctctgtggatgcccttctcaccccatttgggcttcagcaccctgtgactagccactactttctgtgtggtcactgccttccttgttccaggtgggctctgacactgtgctctgggccatgtgactcccacccagagtagacgtctgttttgcctgaccccacttaatggatttggatttattgcttaggaagggaagggggagataaaaagcttgaagattactttttttttcaatttttaaaattgtaaaatacacataacataaaatttaccatcttaaccagttcattttttttttttttttttttttgagatggagtcttgctttatcacccaggctggagtgtagtggcgtgatctcggcttactgcaacctccgccacctggattcaagcaattctcctgtctcagcctcctgagtagctgggactacaggtgcatgccaccacatccggctaatttttgtatttttggtagagatggggtttcaccatgttagtcaggctggtctcgaacgcctgacctcaggtgatccacccgcctcagcctcccaaagtgctgggattacaggtgtgagccactgtgcccagccagttcattgtttttaaatacactcatagtgttgtccaaccattactattatccatcctcataactcttttcatcttgtaaaactgaaattgtatacccattaaacaataattccgcattcctccctccccagcccctggtaaccaccattctactttttgtctctatgactttgaccaagtacctcatataaaaggaatcatagtgtttgccttttcgtgactggcttatttcatctagtacaatgtcttgggttcttcaatgttgtagcatattgtagaatttccttctttttaaggctgaatggtaatctgttgtatggatataccacattttgcctattcattcatccgctgatggacatgggttgttctacatcttagctattgagaaaagtgttgctataaacatggatgtataaatattgaagagtacttttgatatgattttggggagggcctaggggaagatgatttgctggagagatgataaagaatttatggtatgttctttctatctagccatactttaaaatcgagcatagtaccatgaaagggaacatatgaccatataatttattttttgttaaggtaattagtatctcctgtggggacctgatggatgagaagggacagattgttgggcatcagtgtgaaacgctaggattttagtgccctattagttattgtagttctgaaagtggaactcattgccctgtagcctttgttctcactataggaagtatgtttagatgtgtgacgatatggtgagtttgcacgctctgaaagctgcaagattgtgtttgagtgggcaggactccctgactgttctttctttctttgtttctttctctttttccctttttgagacagagtttccttcttgttgcccaggctggagtgcaggggcacgatctcggcttactgcaacctccgcctcccgggttcaagcaattctcctgtctcagtctcccgagtagctgggactacaggcgcccgccaccacgcccggctaattttttgtatttttcatagagacggggtttcactatgttagccaggatggtctcgatctcctgacctcgtgatccacccgcctcagcctcccaaagtgctgggattacaggcgtgagccaccgcgcccagcctggattcctttttcaagcagaagatcctaaaggagatggctgttacattttgagttcaggaacttatctgaatgcaacagttaagcatttttgtttctgtgtgatgattaattagctccctgaggttcaaaactgtgggtctctccctccatatcctaaaagcctgagacgcaacaggagttcagaaaaaccttccaagaatctgaacagacctgtgtgcttggagccatgttggtaataaggcatttatcatttttgtcagaattacttgttacttgtctctcccttatctactgtgagaacagtaattcttaaattctgtgaggacagtagagctgtggttagaatgtgtcccccaaattcatgtgttagaaatttaatcccaatgcaacagcttttcagggtagggcctaataagaggtgattaggtctctgccctcacaattggattaatgtcctcatcttgggagtggattagttatctcaagaatagacttgttacatatgtgagtttagccccctcttgcccttacctgatgacggccactcaaccttgaacttcccagcctacagaagtataagaaatacatttcttttctttataaagtgcccactgtatgggattctgttctggcaacacaaaacagactaagaaaagtagtgagcacagtatctagctatcttagaaaatttttgtgctctacaagttggtactgaatgtataaagctggcttcaaagaggaccggccgcaggtaaaagtccattgtcttcaccatgccacgtgtggcacctccagctcttaaagacaaaagaggagttggattggctttgaaggcactcagtgaatatttgttctgatataactcttggaaaaataacttttggagtgtgtgtttgtatgtgtatgtaggtatatatactctcctcctttttgcccaatcatgtggtgaaagtaagctccaggtgttgttaacacttaatgcctaaatactttagcatgcatctcctcgaaacaagaacaattccgtgtaaccacaacactatcacccattggaaaataacactaagaaagaatagaaaggccgggcacagtggctcacgcctgtaatcctagcactttgggaggctgaggtgagcagattgcctgagttcaggagtttgagaccagcctggccaacatggtgaaaccccatctctactgaaatacaaaaaattagctgggcatggtggcaaacacctgaagtcccagctattcaggaggctgaggcaggagaattgcttgaaccaggaggcggaggttgaagtgagctgagattgctccactgcacttgacagaacaagactctgtctcaagaaagaaagaaaaaaagaatagaaatcgtccgaacttcacaaaaaaagcctctaataaaactagagcttaagaaactttagccataggaaaaccacatcaagttactttatccagcatacagtccacatgcaaatgggcccagctgtccccaaaatctcctttatagctattttagtttaatttatttatttattgagacagagtctcactctgttgcccaggctggagtgcagtggcacgatctcggctcactgcaagcaccgcctcccgggttcatgccattctcttgcctcagcttcctgagtagctgggaccacaggcgcccgccaccacacctggctaatttttttgtatttttagtagagatgatgtttcaccgtgttagccaggattgtctcgatctcctgacctagtgatctgtctgcctccgcctcccaaagtgctgggattacaggcgtgagccgccacacctggccaattttagggtttttttttttaactcaagaaccactataaccattttactgtctgtatatatcccataacatcatgttgtaatccccaaatacacacagcagaatttattttttaaaaagaaatcaaccagggtttatgaattacatttggcatgattagttgtaagctataatcttatcagaggctttttttgtgagggtgggacaatttctgttctttctcatttatttgggcgccttctgggatttgttggactttggtttgcccctagagattccttttcctcagaactagtggttttcctatgaatatttttgtttgaacagttacagtccctcgtctgtaaatcttatgtgactttgctcttcctattgagtgactttcccaattcctttctccttgggaagttatgagagtggggcacactgacatgaaaattctcattttcatgcaccaccatgcctggctaatattgtatttttagtagagacggggtttctccatgttggccaggcctgtctcaaactcctagcctcaagtgatctccctgccttggcctcccaaatcactgggattacaggcgtgagccactgtgcctggccagggagaccccatctctaaaaacattttaaaaagtcaccaggcatggttgtgtgctccacgcacttacagtcctagttgctcaagaggctgagaccagaggaccacttgagccccagagctcgaggctgcagtgacctatgattatgccactgcactccagcctgggcaacaaagtgagacactgtctcaaaaaaaaaaaaattatttgtttaaagaagtgttgcttaaggctgggtgcggtggctcacgcctgtaatcccagcactttgggaggctgaggtgggcagatcacctgaagtcgggagttcgagaccagcctgaccaacatggagaaaccccgtctctactaaaaatacaaaatgagccgggcgtggtggcacatgcctgtaattccagctactcaggaggctgaggcaggagaatcgcttgaatcccagaggcggaggttgcagtgagccaagatcacaccattgcactctagcctgggcaacaagagcgaaactccatctcaaaaaaaaaaaaaaaaaagaatagaaaccatccgaccttcatgaaaaaagcctctaataaaattagagcttaggaaactttagccataggaaaacaacgtcaagtaacttcatccagcatacagtccacatgcaaatgggcccaactgtccccaaaatcccctttatagctattttagtttttttttaactaaagaaccactatactataaccattttactgtctgtatatatcccataacatcatgttgtaatccccaaatacacacagcaaaatttatttttaaaaaagaaatcaatcagggtttatgaattacatttggcatgattagttgtaagctataacctcatcagaggctttttttgtgagggtgggacaatttctgttctttctcatttatttggacgtcctctgggttttgttggactttggtttacccctagagattccttttcctcagaactagtggttttcctatgaatatttttgtatgaacagttacagcccctcgtctgtaaatcttacgtgacttcgctcttcctattgagtgactttcccaattcctttctccttgggaagttatgagagtggggcgcactgacttgaaaattctcattttcatgcgccaccatgcccggctaattttgtatttttagtagagacggggtttctccatgttggccaggcctgtctcaaactcctagcctcaagtgatctccctgccttggcctcccaaagtactgggattgcaagcgtgagccactgtgcctggccagggagaccccatctctaaaaacatttaaaaaagtcaccaggcatggttgtgtgctccacgcacttacagtcctagttgctcaagaggctgagaccagaggaccacttgagccccagagctcgaggctgcagtgacctatgattatgccactgcactccagcctgggtaataaagtaagacactgtctcaaaaaaaaaaaaaaattatttgtttaaagaagtgttgcttaaggccaggcgcggtggctcacacctgtaattccagcactttgggaggccgaggcaggcggatcacctgaagttgggagttcaagaccagcctgactaacatggaggaaccccatctctactaaaaatacaaaatgagccgggcgtggtggcgcatgcctgtaatcccagctactcgagagtctgaggcaggagaatcgcttgaacctgggaggcggaggtggcagtgagccgagatcacaccattgcactccagcctgggcaacaagagcaaaactccgtctcaaaaaaaaaaaaaaaaagaaatcgccccaccttcacaaaaaaagcctgtaataaaattagagcttaggaaactttagccataggaaaacaacatcaagtaactttatccagcatacagtccacatgcaaatgggcccagctgtccccaaaatctcctttatagctattttaggttttttttttaactcaagaaccactataaccattttactgtctgtatatatcccataacatcatgttgtaatccccaaatacacacagcaaaatttatttttaaaaaatcaatcagggtttatgaattacatttggcatgattagttgtaagctataatcttatcagaggctttttttgtgagggtgggacagtttctgttctttcttttatttgggcatcctctgggatttgttggactttggtttgcccctagagattccttttcctcagaactagtggttttcctatgaatatttttgtatgtacagttacagtccctcgtctgtaaatcttacgtgacttcgctcttcctattgagtgactttcccagttcctttctccttgggaagttatgagagtggggcgcactgacttgaaaattctcattttcatgcgccactacgcctggctaatattgtatttttagtagagacggggtttctccatgttggccaggctcgtctcaatctcctagcctcaagtgatctccctgccttggcctcccaaagtactgggattacaggcgtgagccactgcgcccggccagggagaccccatctctaaaaacattttaaaaagtcaccaggcatggttgtgcgctccacatacttacagtcctagttgctcaagaggctgagaccagaggaccacttgagccccagagcttgaggctgcagtgacctatgattatgccactgcactccagcctgggcaacaaagtgagacactgtctcgaaaaaaaaaaaaattatttgtttaaagaagtgttgcttaaggctgggcgcggtggctcacacctgtaatcccagcactttgggaggctgaggcaggcggatcacctgaagtctggagtttgagaccagcctgaccaacatggagaaaccctgtgtctactaaaattacaaaattagccaggtgtggtggcacgtgcctgtaatcccagctactcaggaggcttaggcaggaaaatcgcttgaaccgcggaggtggaggttgcagtgagccgagatctcgccattgcactccagcctgggcaataagagcgagactccatctcaaaaaaaaaaaaaatagagttgttcctcctattggccctacccctgctctatggggttggaatcagactttcgtagagtgggccagccattgctcacaggtttccacaggtgattctaatattcactctgattgagaaccactgggccttgtaaattataaagtgtccattgggctatttttttcttttttgagttattacggtttctcgacatttgcaaaaataaagggagggggagttaaactcttttaatgaatgaaggagaaatgcaaaattttctcatgtaaaaatgtctctgggtgtaaaataaattattatttttatgatgaaaataagcattatgttatttgagtaccataagacaatataattgttattctgttgatttgatcattcatatttctttagcaatttctagaactgtgtgccagcctgtgttctagaacatggggtactattctagatgctgattataatatatataattactgagcaactcttaaatatacatgtaatttattttcaccttttttatggttttgattttgatacttccaggttcttcagatagatcctgaagttacagatgaagaaataaaaaagaggtttcggcaggtacagtactatttccctgtttgaactttttgaaaatgtatgaagcacatgattcttttatcacttgctattattgacttgatatgtttgggccaaaatttaacttttttttaaggctgtgtaactgttttgtaaaaaaaagctcataataatatataaaatcttaaataatttaatgaccatagcttacctatgaatagaatgaattttatatccaaatagaatctctgcaactccttaattaagagggataagtataaagtagaataatagagcttgcatggagttgtaactaccaaaccccctgtcttctaggagggaacatatcaaatgattcatagcacatttttatctttaagactccatttgtctgtaattttatcttttatttttattcttatttttcgagacagagtcttgctttgtcgcccacgctggagtgtagtggcatgatctcaggtcactgcaacctccacctcctgggttcaagcagttctcctgcctcagcctcccaggtagctggtattacaagtgcatgccaccacacccggctaatttttgtattttggtagagacagagtttccctatgttggccaggctggtgacgaactcctgacctcaagtgatctacctgcttcagcctccccaaaatgcaggaattaccggtgtgagccactgcacccggccgtaattttatcttttgccaacttaaatgaatacctaagagataactggtataaagagtgctttttgaaagttctccaggaaaggagatctatagcttctgaatcttgcccattcgtaggtttaataactggaactacaaagttttaaagtaaacttaaaaaaaaaatccttccagttttgacagctgagtaaccctccccccagcctttttttcttaaaaattattattattttttgagacagggtctcactctgtcacctaggctggagtacagtggtgtgatcttggctcactgcaacctgtgcctcctgagtttaagcaatcctccctcctcaacctccccagtagctgggactacaggtgtgcatcaccatgctcagataatttttgtattttttgtagagacagagtttcgccatgttgcccaggctggtctcaattctgggctcaagcgatctgctggcctcagcctctcaaagtgccatgattacaggcatgagccaccgtgcctggctacctttttttctgagttgaataatcgtagtccctataatttgcctttgcaaattggattttctatatattccatgtcttttaaaaaaactttccttagcttctttatagtcttatgtacttcatattttaatagggtctgaccagagctgaatgtaattttcagcttctgatgagatacttgttaatatccagtggtgtgcttgtttcttcagtacagtaattttccccatattgctgactcatagtcattttctgatctacagttaagccaagatgttttttaacttggtctacgtaatcatatcccattatataactttatagcttttttttttccttcctaagctctactctatacttatatttagctttttcctttttctaaaatttcaaattttctaatatgcattactaatcattcccatattaataagcatttaagttcatagtcaaaacaattttttatgtagctacataaataataagagttaagaattcttaataaatcattaatatggactgatagttaagagtgtgcatattggagctatacaactagtttaaatcttgactgtaccacttaacaagcagtgtaaacttgagcaagttacatttaacctttccgtgtctgttaccccgtttgtaaaatgtaataatggtgtctatcccatgagtttgttgtaagaatttaaatgatgtattacacagaaggcatttagagtaactcttggcacataatgtatcctcactatatgctaactattgtcagcgtgtgttagtctgctaatttctttacttgcattgtttgtttcattcttatatcagcccaattagatataggtacatagtattatctcatttacagagcaggaagcggaggcagagataggttaagtgatttgctcgaggtctcatagctagtaggtgattgaagttggaattagaacccagcataatggttccagtaatgctgaacggagcgttagattcccatttgttctcattccccgacatagttccctgggttccaactagttggtttctgtcaattgacaatatgtcatggtttttaactgtgagtatctgaattacctatgaaagttcttttttttttagctggtttattataaaaattttatatagaaaaaagaatggacaagcatagtggctcatgcctgtaatcctagtattttgggacattgagtcgggcagattgcttgagctcaggagttcgtgaccagcctgggcaacatggtgaaaccccgtctctacaaaaaacgaaaaacaacaacagcaaaagccaaaaattagccgtgcctgtagtcccagctactcagaaggctgaggtgggaggatcacttgagtccaggagattgaggctgcagtgagctgggatagcaccattgcactccagcctggatgatagagcaacactctgtctcaaaaaaaaaaaaaaaaaaaagaatagaacaacgaatattcatgtatccaccatctatattgaatagttaatttcatttatatatatatatatatatatatatatatatatatatatatatatatttatttatttattgagacggagtccggctctgtcacccaggttgcagtacagtgttgcgatcttggctcacggcagcctccacctcctgagttcaagtgattctcttgcctcagcgtcctgagtagctggtattatagatgtgtgccactgtgcctgccaaatttttgtatttttagtagagacggggtttcaccatgtaggccaggctggtctcgaactcctgacctcaagtgatctgccagcctcagccttccaaagtgctgggattacaggcgggagccactgctcctggcagacactgactatatatttaactatatatttttggctgaatcattgtaaattgcaataaaccatgatgctttacccctaaatacttcagcttgtacccttcccaaaaaaaggacattttcttgcataatcacttatcccacctaacaaaataagggctaattccctacgatcatctgaaacccagtctagtagaggtttacaaagtgcagatgccaaagactaactcagaaggtctgagggtggaaattagaatgttgtctttttcagaagcttcacagggttggagcacaggcagaatgagaaactgctttagattaggagttcttttaggagagagttgatgtctcatacctgctttagccaccttagtgcttagtacaggttgagtatcccttatctgaaatgcttgagactagaagtatttcagatttcagattttttcagattttggaatatttgcagaatgcataatggtcgagcatccctaatccgaaaattcaaaatgttccaatgagcgtttcctttgagcatcatgttagcactcagaaagtttcagattttggagccttttggattttgggtgctcaacctgcataaggaacataataggaacttgatacctttcagtctccctcctcccccaaattattacaacatcttcatagtgctaggcttccatttgtttttgtttttgtttttgtttttgttttttcctggagacagggtctcactttgttgcccaggctggagtgcagtggcacaatctcaacctcccaggctcaagtgattctcccacgttagcttcctaaatagcttggactacaggcgaccaccaccatgtctgggtaattaaaaaattttttttttgtagagacagggtcttgctatgttgctcaggctggtctcgaagtcctgggcttaagtaatcctctcacctcagcctcccaaagtggtgggatgacaggcgtgagcctctgtgcctggcatgtttggtctcaactttgtgattaaaacctgaaatgtttcctagttgtacctttaccttttggtgcttgaattttgttaaagatcagtatttctgggcatttaaagagatttgttaattttttaaatgcttttgctaagagtctctttttgccgtaggaccttagagcttttggttgtaacgagacagggcaggctggaagttagtaaatgtttcccttattgacaaccccaacttttctcttattgtagttatccatcttggtgcatcctgacaaaaatcaagatgatgctgacagagcacaaaaggcttttgaaggtatttgtaaatttacctgcttctgagtattagattgtgaatggcagggcctaactgttccttgtcctagatcaagcaaagactgttatagttttgtcttctggtcaccaagaagctgtggttttcagtagagcagttgccatttcaaagcagaatgttgttgtttaagaagtagaccttaactttgctttgttaaaacttttatatgccaacaaagactgttattgcataggatcattttttttctttgaacataaagaattttatcactgaattaaatccagatgtagtgtatttagccttgagtatatatttaattttttccaaggctcttaaggaaagtcattgctatagttgaatgttttttttaacttagtttaacgacagtaaataattaaagtagggaatgctttagagagcacaagtccatttacactgcctgagtatagttcagactttcagagggtgtttgcagaaacagttaatttcaatgttttgcattagctgtggacaaagcttacaagttgctactggatcaggagcaaaagaagagggccctggatgtaattcaggcaggaaaagaatacgtggaacacactgtaagtatttatagtgctgctgtgtttacaggaagtatcagcaagccttgggcaccttgtagaagggtacatatgaacatagtaatgcctactggcacaacctgtggctacttctgtgctctctaccactttgctgtggtggtcatgaatagtgtgtgcctgaagctgtaattcacccctaagagaagaactcagatgaggagtagctggtacactgctcctacctctttccctaccagtcctgtgttggggagaaagggttgttctctccctctcatcacatattgccacttaccccattcttagagtggaaacgtggagcagcctgtgactcttgactcttgatttttattcttgtccctgtgaagggtttgcaacaaggcttggcaaaggctagcaagaggataggcgtaaactttttttaaaataggaggaggtttatgtccatcttaataacagagttgggaagaactcagttgaaggaaactgagttgtagctggtgttatttttgtttgctcttgagggcatacataagtctccaatgtggtgggaaatgtcagtatggctttcccaaggtaagaaaggtcttttaactttttacttgctggggcaagaatcttgaggtcatttgtaagagctgcttcaattgtgattggatgacttttcacatgaagagctttgaaatctgagacaactttataaccataataatgaatccagtttcggtgaggaaaatggataagaagaggagacaaagggcccataactatatcctgcgggtcatgtgttggaaatggcacttgtaggccctatcctggtagaaatagggaaagtgcctgacagtttctccttaaatcattgtggcttcgtatgtctttcacctgtaagaaagtcatccttaggcttcctgaccacagggtggcagtagggcctttctgagcttagagggtacttggcctttgctggtataatagactggttagttcatggagtagtgtcattcttgtatgaattcgtatatttatttatttattttttatctcagtagtggccaatgtgataaaagtatcagttaatatgatatgtggtttaaggaggttccatggtgaaagtgatcaagaatgcagttatagaaatgccagaaaaactacttggacataatgccacagattctgtagcttcttctaaaacttgacagatatatttgctttgctctaaacacataaccacaagccaagaaaggtaaataagtagtctgtttcaaagactttttggatctgatgagttggggacaacctcccgttggtcccctttcatctttcattcttcctggtagattggattttagatgagattagaaaaaggacttgtggttcctaattttccttgattctgttgttcttttgaggagggaggggaggggctctttttttttttaatgaaaactttttgctatacccgtgcctatagaaagttaaatatattgtatgtgtacagcccagtggatattctcaaagcacagatgctcgtcttttgatgaaaaaaaattctttttaggtgaaagagcgaaaaaaacaattaaagaaggaaggaaaacctacaattgtagaggaggatgatcctgagctg

SEQ ID NO: 359 - DNA, 42523 bp, Homo sapiens
  source 1..42523: mol_type = genomic DNA; note = NC_000006.12:39048781-39091303 GLP1R [organism=Homo sapiens] [GeneID=2740] [chromosome=6]
atcagtctccgcacgcggttccgcaggtggcagcgatggcccagtcctgaactccccgccatggccggcgcccccggcccgctgcgccttgcgctgctgctgctcgggatggtgggcagggccggcccccgcccccaggtgagatccagggaccccgacgacaccgggggaggcgggtggctctgcgggctgcaggcgcagtgtcctggtggagggccccgggacttgaacgaaactccgagaccgctggcgggggcatccgaaagcctcggggggagtagggactggagacttggtgcccctgggctggaaggcccaggtgagggcttggactacagaggattccccccaaccccagcgaggcgccctcttcctcgccacccgggtccctctgcccgggcacccgctgccccgcggccgccctgcgctgacttctgctccgcttctcctttgtccccagcactttcccaactccttctaaaccgtgtcagcggccctggcacagcccggcatcctcccggactccctctgccccacagtctgacccagacccctctcccgcagtgcctccccagacaatccacctgctcaaagaccctgagaagaccctgggaggagctgagagggccagggtgcggagacccggctcctctccctttctcatcagcccccagcacagcctttgattcatggctcctggggccctgcggtggcagcttgtccttcccagtgacctcccagatggaacctaccccccgtcccctaccagcctctgtagcaaacaggcagaaggctcagtgcccccctggaagcagccaggcgcccccactcacccactctgctgacctcccattctcatcctgcactgacagcaggccccaagagaaggcatactgggacacgcaagaacacctgggctccttggtgccaccagagagcaggccacaggtggaccaccgcagcccctctctcttgcccttgttgcttttcctgccctgggatcctgggctagggacagtggtcagctgcttttgaagaggggagctgtccaaagatgctgggacttgcttgagcagagaggagacatagacttgggtggcctgtcctgggtcaggaaacaggttcttcctatcacctcccactgctacccccagacctaaagaactgagatctgtggggagtggacctgaacgaaccttgaagtttgtcccagaaccattgccttggtgagggcagactccacctcggcggaaaccccagatgtggacagacatacctctcagctaagatgccagcacatttttcagcccccagattattttccagacgcatcctctccctgcccctgttccccagcccagctgctgtcctgagccccaggagacaacctcccccttccaagacaccttcctcacagcgcccccagccaggccttggttttcctggtgcggctgggatctttcaggggccagggctgcagacccaagatgtggttcttgcccatcgttccctcctcttacggactgggttgggataggggtggaggctctgcttcctggttccatcctcctccaggccaggtttacaggtctggtttgaatgaagggaagaaagcaaagggaagaggaaagtttctgtgagctgtcttcccagaggccttattcccagaagtgtcaggctcctgaacccacactttcctctgatccgattttactccttagccccaggcctaaggcaaaagctgggcatcctgggggcataacaggattggggtggtagagaaggataggaggggacaggtcctagcagggaggggagctttgagggggtgctcttgtcatgggaaactgagctgccacagagatctgagtcacaggaggtgttaaggatagattgcaacaattatgacacaacatcatgcgtgcttataagactaaaaaatagtgtattttgcattttgttttctgtctatgaagtcaaaagggttagagttactcccctcatgttgctgatgggggaatgaaagctcagaaaaagagggtcccctgtataaagtagcccagcagttcaggagcagggaagagaaaggggtgaagggctgggctcttgacctaacacctcctactcagacgggactgaagggagacctctgagagtgagctgctcactgtcaggtctcgtgaggctggaaacagcatccctgcaggtagggggatggctgagttgacttctgaagaaggtgccctaggctactctttcattgctgctgggaaggctcattcccctaccctggtccttacctctccaataccctggtgagggagcgggcctactgaggagacaggcaagcctttgacactcaaagttaaaatcagacacaactggattcaaatatagggtctgctattagctggtgatctggagttggacacttggttatccccaatacatgtccttatctgtaaataaggatcataagctctatcacatagggttatggaggggattgagacactggcccctgaaatggcaactttagtcactttagtcaaatggcagaactgacccatttgtccttggggatccagaagtgttttccagggctgcaggatagtatgagagaggggctgttggagaccctgggtctctgtactctagtgaatggcaggtggagtccagggctgagccttgatcagtgcggacattgttctaagctgggtttcctcctggacaggacccaggctgggggctggggcaggagcaaccaagaaaccacatcctgccctcgaatgccttgcaccaaggcaaaacaggcttcctcagctgcagcctgcccctaggaaaattcctatgtgtgtgtggtggtggtggtggttggaggaggggacagagatacagacaggtagtctgagacagaccagggggagaagggagtaggctatatgaacccccagttcccaggtatgtgtgagtgaccctgtgtgtaacagtctgtgtgggaatgagtccctgtgtgtgcaacatctcagcatgcaactgtacatctgacagtgtctatgtttttgtgaccctgcatatgatactgtgtctgtgggagggtctgtgtgtgtgtgtgggggggggggcatcttggtgtgtgaatgggtgtcaactagtgtgtgtctatatgtgcaggagagatagtgtgcatgtgagagtgtctgtgtgttcctctgtgtgtgtgtgttggggacagtgtctcagcatgcgactgtgtacctggcagtctgtgagtgattgtgtgtggtgggagagagtctgtgtcagtgtctcagtattgggaatgtgcttgggggcgtgtgtgatgatgcgtgtgaccgtgtgtccacgtgggggtttttgtgactgtaagaacatgtgtgtagtattccttttcctgtcctttcgttcagatatctaaagcccttagggaaaaaaaatggattgtaagctctgagcttttgaaaaaaaagaaagaaagaaagaaaaacaaggggcggtcaaagagacaggggtctgttgatggaaggggtgatttgacttctgggaggtgacacagaggaaggaggttggggtcctgggaggagatgccagggaacctgaagggctggacttagttgggggactccagaaatttgagttggaatccctccttcctccttctgagaggccttcctgcatgtctcccacctctgtgccacctccttcccgtcaccaaaatggtccccagagaaagaaagaatctgatacacttattcgcactgagaaataggagtgcctttcagattggcagccagtgtttggagagggagccccttcctggggtgttggaaagcccaccaccccgggggcttccactccacctgcttccttctctgctgtccttccttccaacgctgcctgcttgtacagggcttgagaagtcacaaagattttcacctgctttatcttgttggatctgtgcagtttgagaagaatgatatgcccattttatggacggcagaactggcaactgatgaggaaactgaggtcctaaaagataaatcgtgtcccacagtcctgcattaacagagctgggatttagaccaagaacttataaatcgctgtccagtgctccttcctgtagaccacaccactccctcctggtgtcctctttcctgtctcctgcttcctccaaaaactcctgaatctgagggatgccccttccttcttgtaacctccaacccaggtgtcgtctccacgtgccttcatccacctcagagagatcccatgaagcctgtcaagtcttgattctagaaactgccatcctgcccttcccatggccctttagaccccctctgaccgctgctttgctctcctggtcagctctgctgccttgtgagggacagggacatctggattgcatccttcccgctacccagaacccacagccccaccttgtcaggcttgcagcagggacttatgttgtgggaggatgaaatggaggagtgggggacactggtgggcagggccttgcccctcctcacagggcatggggtccaaagcttcctccctgcttcactttgccattggctgtggttactgctggaagatctcacaaattaagcagaatgattggtcattggacatgaacatatattcatttcctctttctgggaatatgttgatcctagaagtgaggaaggggtggggccccagtccccaggaagcctggtcactccctcccactctgccctttccactaaacagtagaaatcatggggattgctgccattgactgagccttctccatgtgcccaccatcctaagcattaactcagtccccacagccatcccatgggggaggggctgctgttcccttttgcacaagtgtaagctgagcctaaaacatacaactcttgcactcggttgcaaacctaatatctgggtgacccaggtccaggcccagatctgagcccaaggccagggttgttcagcctccactatgttacctgggcacccaggccctatggcactgggtggccctagcctcatttactcagtctttccccagaccagaacctcccatctgtcccagggcccaccaccactctctccctgccccaaaaaatcctcctgataacagtccacagctctcctctgctctccggagcactgatgtccccacctttgtaccttttccctgctgtgccctcctgctgaagtgcccgccctcctccttgctagcccagtctgcctccaacccccttcaccccagccccacctcacagtccccaatccctcaggcctcttgagtctgcactgaaccctgccccaaccactccctgaacactttcacccactgccttccctgttatgtcacttgtcctgtaaagcattgacccccgagtagcctgaagactctctcaggcagggctcctgcagtcacctttatactccctgcattcccctccacccacgaccacccagaacctggcacagttatggtttctgtaaatacgaggcgtgggagaggccagaagtctgggtagtttgcactgtgtgtgcctgcaggggtgggatgaaggctcgaaggtatttagaagccctgatctggtgtagggaggggacaagatactcttactgtcaggaatccctcacctaagggggagccacagccccatcctcaggaagctccagtctgaggggagacacagccccgtcctcagggagccccagtctgaatatagttttatgtccacagctctgctcagagtaggtgacagcgctgccctggggtgcaggaggccagattggccttcatggcgctgtcgttaacccctccccccgcctctgggaagaactggcttccatacctctctgcctgccccagacacaccttctgccccagttcccagcagtgaccttgtgtgtggtctgctttcattctagaaacagaaaccaagggggatttctccgtctctctgccctccacccccagcagctgctgcatttaggggcagcatggaagagccctttacccggagaagagggaagaagtgagaagggaaacggggcggtgggggttgatccaccaggacttgctctgatgaaaactgtgccacctcctcagctgtggctaatatcatggacaacacctttgcagctgttatgtttgatttcttgttctttttttccccaagcaaatacagttgacctttgccctcagaagagctctgtccttcagggtagcccctgccgccttggcacacttatgccaaggatgctgctggggcttaaagtgagctgggcccttccatggggcctccgaggcagcaaggggtgagcaaggcaacccaagtctctcagggaggtgtgtgataagccagctagaacccgagactggatccagcatgtgcccagcacgctacaaggcaagggggcaagcttctaaaaagaagctattttaatttcagcacacgtggacatttttgtgatttcaaaaagcaaaatgttgttttaaattatgtatgggtcctacattttatacatggggctcttgggtcatttcagcatctgcagcctctgaaggacgaatatttataatttttaaggctgttcaggaaaaaactaaaaagaacgacaaccccaagacatagctgaaggaagtgcacaaaaacactcagaaggaatggtggattctcagtgggatgggtctgtttgggtctgtgtgctgaaaagccatttcggtgacctcactggaagtggaggctcagctctccctactcacaggtgagagggatccctcccattgcacgtgtgacttcagtgttctggaacctccctgaccccttcacctcatgtcctcaggactcttcctttgggtggatagaagctgggttgaatattagatttggttgctgtgtcagaggggagcacggggagggggtggggggtgctgtgttgagtgcatctgtaagtgagtgcgttttggaggaggaatgctaatggcagacatcccagctctttgtagccctgaacgccactactctccccggcccccgcacaccttgcgatattctaccatggtcactgatctgaaggactccagattctagccttaactctgcttcctgggggggctgtgcacccttgattcagttcctctcccactctggcctgtgtgtcttcttctagaatggttgaaagtgcaagaagccctcaggcaggctgactaggcgccagaaggagcttagagtcctgggccctcagaaagtctctctcctaagtgagatcagagatcacaaatgagacacacacgctcctttcctccttcacccacccacctccccaaaagcatcaatttagcagacatttgctgggtgctcgtgacacatcaagctatgcaccctgggaggaatgaagatgtcaaaccatccacctggggcccctgggtggcagtgacttattctcactctctttcagaggtggctgatgcctggcagaatttggggctttgaggtttcatggagattgagaaaccaagtgtgttagggggtgagggggcaggagaggggctggctgaacccacaggcctcccatatatgccctccccccagggtgccactgtgtccctctgggagacggtgcagaaatggcgagaataccgacgccagtgccagcgctccctgactgaggatccacctcctgccacaggtgagtccatgtaggctccccacctttagtgctccccacccaaccaacttctggaggactttgatgaactcaatgtccatggctgggagccatttgcctctataggatgccacccctgccctctgccttcatctcattgtccaagctactccttcacctggataccttcctttctgccgaccaaaatcttccttttcttcaaagtccgcggaagcactgcctcctccagaaaatcttccccaggacttctgccatcatttggcccttactcgtttgctgtagtctgctttggggttgctgtcttatttctgtcttagctgtcttatctgtgtgtccttccctgcaccgccggccagccccccagctagagcctctcagagcaggcacccggcctttccatttttgtcctcagcacctcccagcctgtgcatggactgagggctccacaaacatatttataggaataaatgtttcagggagttcacaaggtggtttaaagagcacgggattggagcccgctgggcctaggttgaaatcctgactgtaattataacacgtgacctaaagaaggttatcttaagtgagatcagaaggaaggtaagctaacatttccctctaatctgtgaagtgcaatttaagaataggcccatagggatttttcattgagcacgtactatgttccattatctatgtagcatatagtcttgatcccacaaaaccctatggggctggaaatactcctgttttacagatcaggaaacagacattaagttacttgctcaaggtcctgccactgataagtggcaagtgcccctgcttggctcttgctgggtggggaaagtgcttggcatacagtaagcattcagcagaggttagtggcatgcagcctccgaggaggggaggggtcttggggaagggagggaaagggccatggccagtcacaagcagggactcagagactgttctttctgctcccagacttgttctgcaaccggaccttcgatgaatacgcctgctggccagatggggagccaggctcgttcgtgaatgtcagctgcccctggtacctgccctgggccagcagtggtgagccccctccccgacctggtacctgccctgggccagcagtggtgaaccccctccccgacctggtatctgccctgggccagcagtggtgagccccctccccgacctgatacctgccctgggccagcagtggtgagccccctccctgacctggtacctgccctgggccagcagtggtgagccccctccctaacctggtacctgccgtgggtcagcagtggtgagccccctccctaacctggtacctgccgtgggtcagcagtggtgagccccctccctgacctggtacctgccctgggtcagcagtggtgagctccctcccccaccgtcccctgtatcgaggaggctgaggtcaaggcgctgcttcctttcctctgagacacagccctccccacccagaatgtctttaggcctcctagtgagtggtccgcctgcctttcctggggtgaggggagcagtcagtagtgataagtttcatgatggcctgaggtaccacctgggtctgggcgtgaggccagtgctggccagtgtgtggggaagggaaagtaagtgtctgaagagaaatgcgaccccttccaattcagtagtcaggaaaagagctgggtggggacagactcttgcggggagggaagctacccagggtgtctgctgtgtgtatacatgtatgtatgatatgtgtatgcaggtggcccatacctggcagtgacatttagctacttcctcactctttagaggttcactgggagaagtgatcagggcattggtggggtgacgaaccccaccagactcagccctcctcagctcactcctgcctgcaagggggaccttgtactggggaagatgtgactgggtaggtgggaaggtcatttcattgggggtacagagatttgcagaggctgcaagaggatccctgactggagggttagttaatgtgccccgctatctatcccagcctcccttgctgagcccagtttcacccaggcaccgtggaggataacaggagacaagcaccctcatggcaaggagctcccagtctccataaggggagaaaagatatttccctatcatcatcatcatcatcatcatcatcaccatcaccatcatcatcgtcatcatagccagcatttattgagtacctactgtgtgccaagtcctgccctaaaagcagggctttataactaccctgtggttatacctgctgtacagatgaggaaactgaagcacaaaaagtttaagtcacttgttccaaatgatgtggtcaatggcagagccaggatttgaatccaattcgtgctcctatcatcacaccttgaaggggctggagcccaagcagcaactggcccagaaacaagtgcgggcatgaggttatgctctggggaagccaggtgtcttcctggaggaggtggcctggtggggcccaatgtaagcttcaccttggcacgtgggactgaagtcagatgaggcccaggctggtctcctaaaagtactgtctccttgtccacactcacagtacactcacctctccccaaggagcagggagagcctgggcctagaaggaggcaggagcctgggcccatcagtggcctgccttctccaatactgcctgttggaagcactttccgtgctacactcttttcatcctcacaaccctctgaggcaagtactctgattaccctcccattttcagatggggaaactaaggcacagaggtgctcagtgacttttgcaagctcacacagccattagtgggcgacccagaagcttggtttagagtcagtgtggctaattgctacaccaaagtcttccttgggggtgtgtgtgtgtgcccttgcatgtggctctggcctggagacaggtgagtgatctggatgccctctgctgtctgggcacacctctagggacaggggtgagctgtctgccctctcctatgaactctgcaatctggtggttctgctgactagccgtgtaagcaggagcaagttgccagacctctctgtgccttggttgactcatctgggagatggtatagagccaagtgacatgggtgtcgggaggaccacagggccttgagaaatggtagctgttaatttttcccacctccctacatacctccctgacttcctgcaatacacacactttctctgcctcccatagatttgagactggcagcttggccagcgtctgctgggcctctagaccccagggagccaggcgtaggacagggcccatcactcagcactaagccacccccagctctgcctgccgcttgcagctccatccatcacctttaattttatttgagcaggaaataggtcctggtggtgcccgtttatgagcaaacatggttttattgctttctccatgaagataacggccactgcacaggccccctgccagcctttccccaaccccgtccccctgccactcaccaggctaatttactcccttttttgacacttggaatcaccgactctgctgccctctcctcactccctgagttacggatgctcagagacaactaccacaggctcaagctgcgtaattgctgcctctggcctgtcctggagctttccttggcaaaggttggcagcggaggcttccctgacccccacccaggtgtgtgggagcagttctgaagaaggggacagttctggagctttcttgggctgatcaagcgagtagcctgtggagaaacgtcacagtgtgccctggtgtcaaggagaaggaagggagttatctcaggcagggtcctggcagaaaacatgctcagttggcaatttggagagaatttaatgttggggaggggtcattttcagaggctggcaaggtaaagggaccaatgaggcatataaagcaccagggactacaacaatggaaagcttgagcacccctagacctgagaaggaagggacaagaatggggctggggggtccccatgacagctgggctacaatggagaagccacccagcagggctgtggccacagaggggacaaagtcacaggcagacttcaaatcaaggcagggagggagcaggggagaacacccagcctctctctccctctgcccttccatcttctgccaatgcctcccactggcccaacccaacagaggccagggaagccgaggggtgctgtcccatggctcaggcttctagagttcagaatggagcagaggagtggtgatctgagaaacagcaaaagtcaaaacaatcaccagacccctgagctgggttgtgttaggagctagggatgccactgagaccttagaggtgtgtgagtgtgtgcattggggagaaggggtaacccccctccatggagctgaaggtcggctcagcagcccaggcagtggtactgagggaggccagagccaccccttctgccaggagtgtggcggcattaggaaggcttccagggacaggtgacactggggccagacgtgaaagaacaggcagatgcagaagggaaaaggaagctcctccaaggaatgagggttccaggcagcaccctggacatggggccaggccacgggcctcggaactacgcagtgtcctggagaagccagccaagcccttgaattctgacccctctaattgagaacttgggtctcaggattgtgcagagagagcaggagcagatgagtcaaagacagaagatattcaaaggaaatggctggtacaaacgagactgggaggagaaggctgaagtggcttcagagagcctgttggccgcccgagggcccttcagcagcctcgtttacccacaaacagctgatctgcttgttacaaatcattccagcctcattagctacacctcctcctgatccctacctgtttgttagcttagttctaattatatgagagtcataaaatgctttaaaaataacctataactcacagttcttggaaactctggcgggtgcctcccctgagtaatgtggagcctgggggtttttacgacagcctggggttgccaaggggaaactgaggcccaagcttgtccccagaggagttctggctgaagtggtgtcacaagctccatctccagcctcagtgaaggagtgccccttcaagaaaccggcatgggggaggatgtttcaaaggtctactatgtaccgggcacttcacatgctttatcttctgggaagtcattatgcttcccattttacagataaggaaactgaggcctgaggatgtgaagggacatgctcaacatcccacagctggttgaaggcagaaccaggatttgaacttgagtctgtgttgttcagaacctgagctccttctcctaagccctgatgctctacagtacccttcaccctggccttgagctgatgccttcatttcgagcctggcctttgaccctcacctcactcccttggggaggccctgtgcctggcctctctgagtctcagcttctgcatctgtaaaatgggggcccagtagtccttgctggccacctcgttgccagggtgcaggagctaatggattcatgagcagctctccacagccctgagtgccagcatccacgtggaagggcggctgttagcttgattacaggcgccgcagcagcttccgggaggggaagtgtttaattgggggttttatttccagcagcagggtctggcttaatgaaatatccctgggcctcctggcatgtggctgccctgctgcctccctgtgttgacaagccttgagccaaatccctggctgtgatttaccagctcctcccaagtcagataaagctgggttgataagtagggctatgccctgacccaccccacctccagccaaggtgggcatctggggatcatgggcccagccaggaaccagcctggcttttaatatttgatgttaatgaagggtaattgacagatgcacttgcacaggctcactgagcgagggacacagtgatcctttgactctgtgctagtaatgcacacatctgtgcacacaccacctccccaccctcccaactggctctgaacagagggagcaggaatggtgcagcggccgggggtccacactggcaagggggcctgctgggaggagactgaatgttgagaaatctgagcccagaggaagggcagaggagaatggcacatgccacattctttcctattaacagcaagtttggctgctaacttgggacctccggaggcaaagagctggcggattttagtcttgactctgctactttctagttgatgatcttaggcaagttgtttggcttctcagaggctcagtttcttcatatgtacaatgggactaactgttcctaccttgaaaggtggttctaatgtccaaaggtgtcaggtgtacagtaggtgttcaaaaactgattctgtgaaggcacagcctatggaaagagcaagtaaggagcatgttgtgaaggaatctgcaacaaggcagtgcctactgtatgccaggccctgtgccagctgtgggaagtgcatcttactagcatcacacggttgcaggctgagtcctgggtatgcgggtctttagatggtttgtgtgcctgtggttccatggctgtgtcttcttttctctggtccctcaaccttcttcctttctccccatttcctcccatcaaagcaggctgctagtgcaggctctgacaccatctcattccgcatggagtcagctcaggtccccatcactgcttttgggggtatctacaggaaaacactgattttgcctcacgtcagaagacttggccccagtgaagaatctcaggcatccatgcagcagataagagaggcatttgtgggcttgagaggggcccttcgcgttgctaaaatcagaccacgtgcctccccttctctgccgttgggggtacacctgattttgttcataaatgcgttcgaagggtattggaacaccatcgttcccactgctgtcagtttcaccattagattttcaggtttttgtttttctcccaggtgaagtatcttttaaaatgcaggttcttccagaaggagtcatgctgcaagctgacttgccccactgtgttaccagataatttctgtgtcttgaagggggacctggttcagggtttgtttgggaaaggagctgggaaggaggagaagaaagagcagggaggctgtcctggtgtctgggatcagggttaggggagggcaaggtccattggcaggccttgctgacagtgctggaagaggctgtcaccagactctgcagtaaagttgtccctgccacattttttgctagggtgaaaaatagaactcccagactagatggttgcccctgtcctgcacccctgagggtcaggccctggggctgccacagtccccatcgtgtacacacacacacacacacacagacacataacacacacacacacacacacacacacacacacacaccccacattaatgaagcctcttctcaggagactcagttctttttttttttttttttttgaggcagagtctcactctgtcgcctaggctggagtagttagtggcttgatcttaactcactacaacctcctcctcccaagttcaagtgattttcgtgcctcagcttcctgagtagctgggactacaggcgcacgccaccatgcctggctaattttttgtatttttagtagagatggggtttcaccatgttgcccaggctggtctcgaactcttgagctcaggcaatccacctgcctcggcctcccagagtgctaggattacaggcatgagccaccacacccagccgagacccagttctgactgctgtctctccacatgaacactgagcagccactgcccccagtgggcctctggtgccttctccattctctggccttcactccctccttcctcccacagctgggaaaactggtctttaaaatcttctagtcttttagaatgttgaactcttttaaagtttgtcctggctgcagcttctctccttggtccccctgttcttcctacaggtcaatatccccccaccctctcattgtgcccttttgtcccaagttcattggccctggtgtcaaacttaagttcccctacagagaggccaggaatgaaccatttcctcctggacacaagtaagcagtggcctctatcagcctcacatcaaacctgaggccacaggccagccatctccctggtaggtggacatggggcatggtgggggacagcctctgctgggatgtgaatgggcacaggcaatgccccgccttgcctctgcagggcctgtgtttgatctctgttagtttccatctatgctcttcctttctcaggtcttttttgttttttctgtgtgagtcttgattctctgaagacagggacggtgccaccatcctcagacaggggagctccctgaggacgggggctggatccctttcctctctccaagggctatctccatttccaacctataattagagtctatgtgaaggtaggagctgggtattccctttttctatgggggatctccaaaggccaaggctgcatacgaccaagaggccgtgtactccttttagaccagggggtccttgcaggtaggtctgtgtctcctccatcagattagaacttcttatgggcagggctgtgtctctctctctctcagatcagtgctctgtcttccttcccttctcttgggaactcagtgccaaccttgttcccagggtctgctctccccaaggagtgtgggagggaggtgggcactgagtcctaaaaatcagaaatagcgagtgactgcggggcaggcacggctgctgctggtcggtgccagaccttgtcagtagtgtgatttgaggctggaggcagggacatggaactgagctaaactcctgtcatctcaaaggcatgaattcattaaactgtgtcctagggttgccgagaggcagggctgagggtggagctgaggagcccctgccttggtggccccctgtcttgtccctggaccaacagcgtatatgtcaggggaggaaggtccaggtgtgtgtgtgtgtgtttgtgtgtaaagaagggaaaaggatgtcactaactcagagtagtccattctgggggagcagggatagccctcagaatggggaggaaggggagcatctagcactgggcaggctgccctattctgggctgaggctcagggccaggtctccccaccccagtgccgcagggccacgtgtaccggttctgcacagctgaaggcctctggctgcagaaggacaactccagcctgccctggagggacttgtcggagtgcgaggagtccaagcgaggggaaagagtgagttgaggcggggttctgagccagggagcggggagccatgtcttggagcacttcactggagcaaagacccttggctttgatgggggcatctgtggtcatttcatccatctccttgcctctgggggctttgcacaccatgctttctggacaaaggtggtgtgtattcacctctctggccttggaacagggcccaagatatccaagaaccatcgccgtaggttacggttattctctttcttggtcttggtatccccggtgagtcctgacttggggccccagctctgtctctgtgccatgggaaggaagattgtgggaagagggccatgggctgcccatgtacacgtatgtcccccgtgtgccacagagctccccggaggagcagctcctgttcctctacatcatctacacggtgggctacgcactctccttctctgctctggttatcgcctctgcgatcctcctcggcttcaggtaaggtggcccggaccctgggagggggctgcttcatcctaactcccccagatagaggaatgaagcagcccaacaccaaatcaaagcaacagtgcagcacattcgtccttctctcaagagctctctacagagccctgaccgtagaatatgaggttgaaaacacaggatgtgatactgtgttcttggtctagtctccacggtgtaaaagtgtgcgtatgtactgcaaaaaagaacaaaaataccacgcaagcaccaccaacctcaaaaccttaaccgtcggtgatgggattacggaaaatcccaggagatcttctccaatgaacatgtgtaactttaataatcaagaattcagtatgattttagaaaagatcttggggattagagatcttcctccctttggagcttttcagccccagtggaaaagttcctccttagatctaacctagatgagacgttccttccaaactaggagctgggaacagagtaccaggttcttcccactcctctgcacttggagaaggggggccagggggactgggttcaaagagggaagggattctgagagaatgagacctcaggacaccaggcagcaagagcaggagaggtggcattccctctcctaccttcaaagcacctggcacagtcctgggcacacggtgctcaataaatgcattcactcaatgaatattctcctcttttattatgaattattccagtgattcaaaaatgcaatgactgatactatgatcactcatgcacacaccatccagcctaagaaataacatgtcccatagttacacttctctgggtaaccctctctgatcccatccctctccctgccctacacccatcagaggtaagccctgaatgtgcctcttttaattccgacacatttccttgtacttttaccacatttgtgagtagctatagaaatatatagcaaggttctgtgtatttttaatagtgtattgaacatatttgtcttagtcttttcctgctgctatagcaaaataccttagactgggtaatttctaaataacagaaatatattcctcacaattctgaaggctgtgaagtccaagatcaaggcaccagcagattccatgtctagtaagttcttgtcctctctttccaagatggcaccttctcactgtgtcctcacatggcagaggggcaaatgggtgaaaagctctcacaaacaccctcaggtctcttataaggtactaatcccattcgtgagggcagagccttcatcaaccttatcacctaaaggcttcaccttttcatactattgccttggggactaagtttcaacatgaattttggagtgacacaacattcaaaccatagcattctgcccctggcccccccaaattcctgtcctcctcacatacaaaatacattcatttaatcccaatggctccaaagtcttaattcatcccagcattaactttaaagtctaagtccaaagtctcatctaaatattatttaaatcaggtatgtgtgagactcaagggatgattcctcctgaaggaaatttctctctagctgtgaacttatgaaatcactgaagttatgtgcttccaaaatgaaatgttgtggcaggcattctcatttcataggacagacattcccatttcaaaagggagcaataggtctgcatgtggtggctcatgcctataatcctagctaattgagaggcgaaagtgggaagcctgcttgaggccagagattggagaccagcctgaccgatgtaagagaccattaaataaatacaattgtttatttttttatctggaaaaaaataaagaattaaaattcaaataaaaaaagagagaaataggaaggaagaaaggggtaactggtcccaagtaaatccagacttaatgggacaaacaacattaaatcttaaagcttgagaataatcttctttgactcagtgtcctgccttcctgatatggaggtgggagttgggtccccaagtctccccgaagccccactcgcacagctttgctgggttcagctcatgtggcagctctcacaggctggagttgtgtgctggtggctctaccagtctggggtcttggaggagaatcttgccccccatgactctgctagtcattgccctagtcaggactctctgtagcggccccacacctgtgccttaactactatagatttattagaaacctccactctgcctgggccctgaggctctccaggatatcctttgaaatctaggtcttcctggatttcaaagaagtaactatgttccctacagctcgtgcactctgtgtgtctgtagagttagcaccacgtgaacactgccgaggtttactgctacgtcctccagagggacggcctgagttatacctgggcccacttgagccgcagctagggtagccaaggagcactgcacccaagtgtagggagcagagacaggaggtggccctgggcagtgacttccaatgcctcacagtgtcctgggctcctcccccagaactgttctgctctcaagaccctgacatctggacctgaaagatctctgaagtgcattcagggtcattcttccattttctacccatactaattttattaaatgttcacttggccacacccttggtattgtctcctgaacatgcttttgcattctttacaatatggtcagactgaaaattttccaaatctttaagttctccttctcttttgattataaatttcatctttcatttctctcttctcatattttgctataagcagtcaagggcagccatgctgtaccctcaatactttgcttagagatttcttccaccaaatattctatttcattgctcataagtctttgctcccatgaaacacttggacatagacacaattcagccaagttatttgccactttgtaacaaaaagatggcatttcctctggtctccaatgccatgctcctcatttctatctcagacctcatcagaatggcctttactgttcatatttctaccattattatgttcacaaccacttagataatctctgtgaagattgaaatttttggccgggcgcagtggctcacgcctgtaatcccagcactttgggaggccgaggcaggtggatcatgcggtcaggagatcgagaccatcctggctagcatggtgaaaccccgtctctactaaaaatacaaaaaattagctgggtgcggtggcgggcgcctgtagtcccagctactcgggaggctgaggcaggagaatggcgtgaacctgggaggcggagtgagcagagcagtgagcagagatcgtgccactgcactccagcctgggcgacagagtgagactctgtctcaaaaaaaaaaaaaaagactgaaattttctacatagctctcatcttcttctgagctctcaccagaatcaccttgtatggcccatttgtggaaatatagacttttttctatcccaccacccagttcccaagctactgctacatttttaggtatttgttacatgactccccactctcggtaccaatttctatcttagtctgtgcctgctgttataacaaaataccttagactgggtaatttttgaaaaatagaaatttatttctcataatttagagggtgggaagcccaagatcaaggcaccagtgggtttgatgtctagtaagggcttgctctctgcttctgagatggtgtcttctcactgtgtcctcacatgatggggaaggagtgaacactatgccctcacatcacagaaggcaaaagggcaaaaagggctcacaaactcacttaggcctcttttataaggacgctaatcccattcttgagagcagagccctcatgatctaatcatcttctggaggcttcacctcttaatactatcattgcattaaggattaagttttatcatgaattttggaggaacacaacattcaaatcatagaaatatttttctgtaattttttggtccaacattatgtttgtgtgagattcattcacattgacacgagcagtcctgttttgtggatttttaaccaccattccatattccgttgtataatacagcacagtttatctgtcaaccttttaatggacatttgagttgttctctttttttctttctgaattacaaatgttgggtgcaatgtacattcttacttgtgcatttctctggggcatataactaggagtagaattgccaggtctgactaccacctgctttcgcaattttactatgttaagttgttcttcacagtggtcacaccagtttaccctctcatcagtaataaaagagagcttcctttgtctagccttctcaccaatatttagtgtcttcagacttaattgttgctaacctgaagtatgtgaaattgccttatgattttaatttgcatattccagattcccaaagagatcaagcattttttttcatgattttttctgtgagttgctttttcatatcctttgcttactttttcattggcttatttgggtttttcttttctattttacatattcattatatattctggatacttatccaggatttaccctctctttagtctgtggcttattttttcactcattttatggttttttatgcacagaagttcttcattttaatggaataaagtttatcaatttagtattgataaataaaatttatcaataaagattaagcagttgataacagttaattttattgattgctttaaaattattcattttttccaaagaacaaattctggacagtcttattaagaaatctttccttggctgggtgcggtggctcacgccagtaatcccagcactttgggaggctgaggtgggtggatcacaaggtcaggagatcgagaccatcctggctaacacagtggaaccccatctctactaaaaatacaaaaaattaggtgagcatggtggcacccgcctgtaatcccagctactcaggaggctgaggcgggagaatcacttgaacccaggaggtggaggctgcagtgagccgagatcacgtcactgcactccagcttgggcgacagagcaagattccatctcaaaaaaaaaaaaaaaaaaaaaagaaagaaagaaagaaaaagaaatctttccttaccctagtgtcataaagatggccgtctatattttctgtaagtttcagagttttgctcttccttgtggttctttgatctgcttggaattcatattgcgtatgatataaataaaggatttcatttttttttctgtatgtggaattagctgcctgagtaccatttattgatagcctttccttcccccttggtttgcaatgactgccattccatgcagcaaggctccacgtatgtatgggttggtttcagtcacctacagtttttttctgtttatctttccctgtccggataccatggtgccttagctactgtagatttactagaaatcatatagcaaaatctcctcctctgtgattctttaggagtgtctggaatattcttagccctggctcttctttataagtttttaaagttctactttaaaaataaggtagaatttttatgaatacggagagacttgactcctttaaggtagcgagtctttctatctgtgaatgtgatgtatctatctcccactagtttaagtcttcgctaatgattttaagcaagatttataaaattctccatcgagatcttacctatcttctgttagactcatttcaagctagttaattaaaaatattgcaaaagaattatttctaaacatttacttttaaatttttttaacgcaggcatatacaaacatacttatcagcaaccttgctaaactgtcttattagttctaataatttgtccatagatttcttgaattttctatgaagataatctaccatctacaaataataactattttgtttacttctgattcttgtacatttttcccttgccttattatagtgggcaggatctgtagttacaatgttgactagaagcagtgataacagacatccttattttgttcctgatttcaaaggaaatgctcccacagtttctcagttaagattgatatttgcccctggttaggtaaatagccttcattaggttaagaaatgcccctgtactttcaatttgctacacattttcacatgaaaggatattaaaactctatccaatagtttctgaattcctaccaagtgcctagtcctgctctgcctctgtgaggcatttaggatgtgggccctgtcaacaagaagcagtgttcccactggggaaactgatcctcatgcataaatctctttggttatgcaagactttgtgtcaaagaagatgctgcagagagaaggatagaatgtggatgggaggagggggcagtgactacatagcggaagccttcatggagaggcaggatttgagttggacagaaggattttcacgatgatgaggaagaagggtattcatagaagaagacacacgcacagtcccagggctggaaacatgcctaatgtgtgtgttagcttgagagcctggggttgtagagcagaactgttggctgccttgccagggaaaggccctgctttctccctcagacacctgcactgcaccaggaactacatccacctgaacctgtttgcatccttcatcctgcgagcattgtccgtcttcatcaaggacgcagccctgaagtggatgtatagcacagccgcccagcagcaccagtgggatgggctcctctcctaccaggtgtgtggtgcatccaggaccgcctcaggagggatgggcggttggaggaggcctgcctctgccaccctagacaggcctgggacaggagaagacaagagccgaacagtcctggcccttcgggagcccccagtctgatgggagaggcagttcgccttgggaccctccagtctgctgagagaggcagtctaccttagggagctcccaatctaagggaggagacactgccctagggaattctcagtctgacacaaaagagtagtctttggagacacacttgagtttgaatgtcagctctgtcacttactatctgtacacttttaggcaagtcacttacttctctgaggctgagaaataggtgagaagtcacttacttctcacctgcagggggatacattactttcttccaatcaggatagtgaggattcaatgagctaaagcagataaagtccttagcactagccctagccagagatgtgagctctctcctcctgcattaaccatggcaggatagtggctggagcaggacggggagtggtatcaagagaggcagagggcagagctgttgtccccatgacacccttcctctacccccaggactctctgagctgccgcctggtgtttctgctcatgcagtactgtgtggcggccaattactactggctcttggtggagggcgtgtacctgtacacactgctggccttctcggtcttatctgagcaatggatcttcaggctctacgtgagcataggctggggtaagaaccgccatcacccaccctggacctgtggcacgggggtgggagaccttgacccctcttctaacatggtacttggaacgcactgctgagcaaggggcaaggcccactgggtaaccctcttcctgggcacaggaccttctgccccggtgctgttaagatgccgtagggggttatggtcctcccctcctctgcataactctcctcccttaatggaagcctccaccgcatgtggccaaacaccaccctctaccactatcatgcacaccactggaggtcatggcactgttctcttaagaccacatggggacataagttcacacccagtcccgggcagcccgagggcctgagggaaatggtgagtcctgggcctcaaggtggggaggggatcaagagggtagggggctggctggggggagcctgctggtgctctgtcacatgacgatgaagaggagggctcagaggagagccaagtacagtggggcaggggggccagaggccagccaaggaaagggtggacggcggatgtgcctggagcccagctggaaatgttctagccaaaaaagtttgccaagaaccattgtgtctttttttttgctggaacatttctggttgtgcttctgcctctcaccacgtgggattgtaatgaggggcagcattggggttgggaagggggctgggatccccttcacccctgggaaaacatgcaacaggcctttctggagggacccacggtacccagagaataggccctgccctctgtcctccctaatctgccattgaatccatgagttttcctgttccacaccatcccccgccctgcttgccactccttcattcactcctccttccttcatgcgcccacctcacgctgctctgaccacggctgcccctgccacggacctccggggactttccagctcagtcacatccagactcctcttccctgacaatggtcctgtccctgagcctttgcaaggctgttctccatgcaggaatgttcagggagcatccttcccacaccagggtgtccgctgcctcttcaggaagctgcctcaggccaccagtcctcgtggttctgtgctctctgccctctcaagctctccatcccctgtccttgcacttcatttatttttactggtgttcctcagccatttttctctatacagctccccccaccccccaggagaagagtagcctgagagattttaatgtgaccagtgtcttgaggacaccaaggcccagagctggcagggccttacaggcagagcaggccctggaacccaggcctcctgactcccaggctctgggcctgcggccatcatgccctgttctcttgcctgggctgcatcccttcagtcccctgcagcacccctgagcaggctcaggcctctgcacaggtgggcaggtaggcctggctcctgctcacagatccctgctcctcacctgcctcctccactcccagaacccagtcccttccttggccttttctccccgaggcttcttcctcctgctagagcaggaggagggaggccatcgagggcagctcagggaaggctgtcttcagggtgggggacggtgtctgtccattctaggaaatagcatcagcgctgttagtgcctgtcaccatggcgacccgagggcaggaacaatcaagggacgtgtgtgatgtgtgcagaggagcgggggtggctggagtttggtggggacacactgccctagaggtctctgagtgggagatgggggagggagtgccaagtccttttcctaccacctcacaccctagctcagggctcggggtctgtgggagcacaagggcaagacccggaggacaccctgctctaatcagaacacctttttcttgaggattggggtgggggagacggagagagattcacaggttgctaggagctcagacgtgatgccaggaggccttgcccaagctgggatacttgggaaacaactttcagcttcatgtgcaagtggaagaattaaaattaggactctgacacagttggagaggtcccccaaagggcatggcagcttctgctgcagtccccaggcagttgggggcctgtagaaacccacatggaggctgtgcaagagggaggcaaatgatggttgagggaatcattacttcctggagccagttgtgtgtgtcttaatttgagcttttttctccaacctgtcttgctcgttttctaaatgggagaaagatgaagccagcagggagtgcgtaatgtttgcatgcagcagggctttcgtgactgtgttttttgaaaaggccttgttaaggaaatgctgacgatgagtgaaacttgccaggtctggctgataacatgggtgagtgccctgatcctggaaggaggtctcagagagaagggacagcagggggcgagggatacccagaaggaagcttctgcatgtgtacgtggttcaggaaatcggcatgctcttgcccagacaatgttccttcccttattggtgtgttgactcacccatcattcgttccattctcactgggcatcttctatgtggcagggcctgtaccatgtgctggggcctttggagaccatcccattccttgtccagtctcataaaggcctgttactaaagcaccgtagatgctgagaggtccgatttgtgtagaaatcaatgggccaggagagagagagctgatgaagaatgctggtccgctgggggctcctttgcctcctccatctctccctgcatcatcaggcacagtagatctgggcacacaacctgcttagtagctgctgttgagtggacactgatgtgctaaagacatagacaatggtgacaggaaaggctatgaagtggttctgtcctggaaatgtgctccaggcagagattcccaaagtcatacgtgcacactcatggtccacccaccacaccctcacacacacatgtctacataccttaatatgcacatgcttacctatctcagacacatctccaacactgagggaggggccaacggagacgagcatggagacagccagtgcagaaggccattgagggcggtgggagtgggtatgggattgcagccctgaattcgagccccacctgtgcccttctgagtccctgatccatctcctcatatgtcatgtgaggaaggaaaatccaattttaaatcaaccaacacagaccctgagctctcagggtgatctgggcattgaggctctgaaggtgagtgaggcccaggctctaccctcaaggaactgggaaccagttgtattaattctctattgctgcagaacgattaaccctgaaacttagctacttaaaacaacgaaccattgttatctcacagttcctgtggcctgcaatctcggttcaacttagctgggtaccttgtggctcaggatctcacagagaaaactctttaggcaagagcatgtggatttcctgaatcacatacacatatagaaacttccttcttgggcatcccccaccccctgctgtcccttctctctgagacctccttctaggatcagggcactctcagagaagcagccagctgtcaccagggttgctgtcatctcaaggcttaactggggatggagaatctacttccaagctcattcaagaggcagttggcaggaagccgcagttgctggccaaaggctggaggcctccatttcttgctgcagagacctccatctaggccttctgagttctctcagcacatggcaactggtttcccccagagcaagtgatcagagaaagagaaagagaatgcaaaacaagccacagtgtcttttataacaatcagaagtgacatgccatcacttctgccagaggttcctgggtcacatgaaacaatgctgatacaacgtggactaactacccaagggtatgagcacaggaggtggggatccctaggggccatcttagaggctgtctactacacaagtcaagtctcagccgagtggaaagtagtattgttgtagctgttgttattgtaggccactgcggacagttagttggtcagctggcatcaaggactgggctcctgtctccattccaggattctgccgagccctcttgaaggtgcacagtggtagggaagagatgactgaaaggacatccagtgcctttaggagttgactggcaacgtgggctgaagcaagagagaaaatgggcatcagagggttcgcctgctccttgcctcatccgtcatgctgtccccaccgcatggcccagtcccgctgctgtttgtgtgtctgtggcctggtaacttagccgggactctgagggcaagtcctgacagtgtgcctggcacacaggaggtgggggactgatgactgatgaggacctctctgtaaggaagagtctgggggtccgcatggggctcctgctgcctctgttctcccaggtgcccagaaaaaaactagaaaacatagttggaggccaggcaaggagaggggctggaagtgtgaggggcttggggcagggagaggcctcggcatgtagactgtggctctggcctgccagcccctctccccttctgtctttccctctctcttaggtgttcccctgctgtttgttgtcccctggggcattgtcaagtacctctatgaggacgaggggtgagtgtcctgctccaagggggcgggtgtgcccaggtccccatcctcaaggtccatgggattccttggtacctggggcacccatctgttgagaggataaaggggggtaccaggagcttagaaggtgaatttagttctctaatctcccctccctgcccctgcccctgcccctgcccctgtcccaggattgtttgatgactaacggaactgggtctgtggggtacatggtgccctcctgcaggtttttctgtaatatctgcaagtgaaatgtttgtgtcattttgtatatgatgctgggtacacacatgactgtgttggtaggtccttgaaagcttgtttgggggctgtgtgcatctctgtgtatgactgtgtatttggactatgcgtgtgtgttgtgtggctgtgcactggcagggctctgtgggtccatgggactggtttttgggtggctcctgggagctgtgtgtgtggcactcaacatggccatgtgcattggcggcctctgtgcctgcacctgagctgggggtcctgtgagtcctgctggatgcatgtgtgcatctctctccctccccagctgctggaccaggaactccaacatgaactactggctcattatccggctgcccattctctttgccattggggtgagtgatggtgtcagggatgggagtggcagctatgatagggctgggctggtgccccctgccaatccccggccccaccccgcaggtgaacttcctcatctttgttcgggtcatctgcatcgtggtatccaaactgaaggccaatctcatgtgcaagacagacatcaaatgcaggtgatgtaactgagctggctttactgaggaccctcagcaagtgcccctttccttctagcagagagagagagagagatcctgggatgcttagcttagagccctacactaccctctccttccacccaggcctggccttggaccccaaacccttgcttttgccctgtctctgggcagcccctggacttgttggggtcttgacctctattctttccctccaggcagcctgtcccagggtatttggggtgggagaacatccatgacccagatatcaggacttggtaggaagtggggagggtagagaaagggaagaagagtccatgggagaggtccagaatgactcgagatctctgccctgcccctcagacttgccaagtccacgctgacactcatccccctgctggggactcatgaggtcatctttgcctttgtgatggacgagcacgcccgggggaccctgcgcttcatcaagctgtttacagagctctccttcacctccttccaggtgacttcatgcttggggacacttgcttgtaaagtcctagagtgggggtgggacagacaccagcctgcatcatgcagatggaaaaggtgggaagactgggacctggaggggtgatccctgcccaaagtcacctagttggagcagagccagaactagtatccccaggtgtcccaatacctgggccagtcttctctgtaagcacatgggacaagaagccttcctggatgtagctctgggtaccagcctggcattgcagctgccatctacttggtggcgagcaccctgccaggtgctttacatgcattgtgcatttactcctcacagaacccaggagatgtgcagggttagcctcactttacagaggagactcagaggtgttaaaaccagagttacggtgtcacagtttcaaagaaaagaactgatcctctccactagcattagatgatgctaagggggtgtaaaaatacaaaaaaactggtccctgcctgcccctcaagagtgtcatgagatgcctgcacacatgtgggctcatgtgtgtgtatttacatacatgtgcagacatacagaacacaattctggagccctgggtctccttcatgaacagatggggctggagtggggaatattctccatgatcagagtcattgtacttcactggatcaggcctcctcaaggagaggttggatgtaggatctctacagcttctgggcagcttctgagcagggtctcctggaccccatggcacatgcctgggagacccatggggagaggctagctggggcctgtagccaggcctagtcgcagaggtgcaaccctggtgttccttcagaaaggaaatgagagggaagccactgccccattcctggatctgcctgggccgctggatttggggagggggttgttgaggatggagtcccaaagtgcttccgaccagggccagtctgcagggcacctccctcctgcttcctccctcttgatgtgactcttgtttccaggggctgatggtggccatattatactgctttgtcaacaatgaggtaagctctgaggagggacggtggggaccctggtgggtgggtaccatcagcccgtctggagtagtacaatggggactcccatcaatcttgccagctgaaaccccctactcacctcactgaggcactagggttgagaagccatcttgtccacagatttggttttctgtgcatggtctctctcacacatgaacacacacacacaagtacatgtacaggtataccctaatggcatgtgaccctaaggaagacccagactcatgttaaggggatcctgaatgaccctctttgcttggtggtagtgactgtcacttacaaagtgattcaacacacacatacccaagccacatgcttggggctttaataatcactatctcatttaattatgacccccacatccctcaaaaaaaaaccctgctaaaattcttatttcatattcccattttttatatatacatgaaaacactgaagatcagaaagagtcaggaacctgccctaggtttggaaatagtggcacacatcgcttcttagccttttggctaaggtgaagtgtggaaatagtggcatggcagagccaggattcaaattaattctgcattaaagcagaaagtaccccattcttcatacacacaggcaagagccctggctcactgtggggaagggggtggctttctggtgctaggatgggagaagggggttctcgctggccccacacactctcctgaaaatgtctgcaggacagcaggcctccctcccatccctgagatggtcagctcctgggaggagggcatggctgtgttcatgggcacctggaaaaggccccttccaccaaggtactcagctttggaatcccagagctcagggatgttggagtcagcacattaataggcttgtctttttctatgggtgtgggggatgcagaaaggacagtgggtggggacctgggtgtttcaaggagctatgagatggctcaaagaagcaatgtgatgtagcagaaaagatgcaaggatgcaggctttggcatcttatttggtctgatctgggccccatcacttaatgagctgtgtgactttgcctaagttacctgcccactctgaaacttagtttgctcatttacaaagtggggataatcctgtgaggattaagaaagtctgaaaaaggtgcgaaaggggaacagagaacaagtccttccttcaaggtgggatgctgaaggcccatcctagctcctcacaggtgctgcttggcatggagaaacacacaccattatctccagatgctcagtaagcaatcactattagatcagtattcagtgattcccagagacaggggcctaaggaatttcagaggatgccgtgcagagaaaatgaggctgggtgaaagggaagggaggggaatgttcccttgtccctgaggcctccccctgcttctgctgaactggctacctgtgggaagtgtggccctcagatctctaaatgggagggaaaccaaggtctcttaagggtttactgcatataaggtgctcagagtgtctcattacatccaatgctgtgcagcagatggtatccccaattcacagctaagaacgttaagcctcagcaaaatgaaatgagtagcctaattcaatagacagaagatggtagagctagtgggctgtggcgggggcaagatcccacttaatgcctcagggaagcaggtgctggggaggtgaaggcagcgccaggcaaagagtggcccataaatgggattctggctgctcctgggacaggtcttagaggacccagcggctccgtttggagggtagggcagggaacaggctcgtgacccacaggaggcagtcctggtcctcctccactgccatatcctcaaaatgagtttctttaaaactgatgcaaacgaggaagtgcaaaaacctaagctctgtgggtggcctcccctccaggaatgctctcagccagctgggtgatgcgctacccagccctgagctctgctgctttccattccagcccagtggtgatgggggcaagacagggtggcatgtatcctgtgtggggatgaggagcagaggcctgtagggagagactgaggctccctgctgccaccttgtcatcttgacccccccacgtccccgtttctcacttctctatcctctgacactgtcactgcagccctactagcagacacgtgtgcttggcttcccccccgccattgtgaacagtctcccctgacccctggctcagctgcctctccagattccatccttccaagcctagtcatctcatcacctccctcctcatgcaccacctatggctggcccacctttgtaaggggatagtacttctttgcccttggaaaaaaacttgatcctgaatcaccagggttgcacctctctgaccaggcctggctacagaccccagctagcatctccccgtggatcttccaggctagtgccacggggtccaggagaccctgctcagagaacgggagaacctgtctcccttcagagcaccagccagttcctttaaacccaccctgagactcctcatgccctggctgctccaggcacaaggacagatacatcattgtcactgggccacaaaagacacatgtggctctggggctaaggcctctgtccacaagagctgttctgcagacccagggttgccatggcaatgccaggtacttgtgacctgaggagaaaagatggcttgaatattggttctgtgtggctgccaaggcctgcaccagctgctggtgggcgtgagtggggacagggagggggaggcctgaaggtggttttgctgtagcttgtgcctgagagccacagtgaggtgactcagagccctgagtgcttgtcccagccctgccactgccgagctgtgtgacctggggcaagtcattttgcctcccttgcctctgtctccccagccgtaaatgaaggtgaatgagcttcccaattcaccccgaatcctgaggctggcatggtgcctgctggagagggaggtcaggaggggtgtgctgcactgcagaggtcgagggcagggatgaggataaaaatccgatggtggaggaggaagtgtggtggcctaagtcccagcccaggtgctcagaatctgtggtgttgtctttgtgggttcattttcatagctgaggaacagaaggaacctgatgtgagatgctcatgcatttatgtgttcattcatttggttcatttaaaacacatgtactgagcacctgctgtatgctgggcactgtgctaggttcagggatgctgagatgaagaagatgtggtcccagccctcgaggtgctcccaggtgagaggtaggagatggaccagggacaagcaggactgcaagagccacgcaggcaggaggccaggggttaggagccgggcattggaatcaggccagatctaggttcaaatcctggctgagcgacctgaggaaataaacactctgcacctcagtttcctcatctttaaatgtggagctactttgcagggttgatgtgaaagtcagctaagataattaatggaaaattctgtgcatacagtaagtgcccaataaatatggtgattttcaaggacaatcgtgattacaggggtcacagcagaggttcaggaaaagtgctgaaggagatgggggcagaaggagacactgtgtgtcagcaccctgagaagtcccataggtgtccctgaaacctctctttggtctctggtttcccggaggtgtgcctcagtttaccatctttccccccctctccagcggaagggctatgaaacaagcctggcctcctggcagctgcacaagtgggggccaccactggactcagggcccccatcccagctgtcagcatgcgctcccttcacaaagactcagccgggcagggagctggcatacaacagggtggctgtaggtggtgtctgctcagcctccttccctcccccactcaagcttgggttcatgacgctgcatgggacactggcgtcatcctggcaggcagcctctgggccatctcaactctactcagtgcagaaaatgttcttttaagggatggcatgcagccataccaggcgtcttgctgggcatagctggatggacgacaaaggaggagaggagggttgtttgcacaggggctggtggggagattggccccttatccacagccgctggcatctggctgtcttggtgacttggcctaaagggaagggcccagaccccagacactctggtgtgggaagggtggggacttcaaagaagctctggaaagcaaatgtatgggaacatcacccagaagagcagtccagaccccccaggactagcttggcaggttccagctaggcctctccagggaccagaatcactggccaccaccgggagccacagcattgccacaaaccctcaagggatgggggctccacagtgttacttggatttgtctctttctgccccaacaatctggcccccaagcatcagccctcctgagaggcttttcctgatggggaggccagagcccagcacaacagggatcctggctgactgagctcccctgggctgcacccccatggtcactgcagtgtctctctagatggcatcagttgagaagccctcactggctgccccttcctccctgctgtttcccgtctcagccacattccttccttccctccctcctcccctgtgaggtgctggggcctggagagaagccctcagggagtttagaagggtctgctgtagacaccaggaaggctgggggttgccgtcccccttctcaagcatccaagctgaaactggactgtgcgctgtaaagacagagtctctcttctctctcccatctcctgtctccctgtgtttcaccctccctctcattctcttccgttaaataatactgtgatggattgtaaaaggtacttagctgaatcacagagtttagagatggaaaagaccaattaggtcatcaagctgatctctctcctgaggagctgcagaaaataggagacaacaataaacaattttattgggatattaatttaggagcccgaaggccttgacttgtgtctcttaatataatgcagtggatttcttcccttccccactaatgtaatagtggggccattttgttagccattggtttgcatgatggctttcgtttccctccttttcccatggaaggtccagctggaatttcggaagagctgggagcgctggcggcttgagcacttgcacatccagagggacagcagcatgaagcccctcaagtgtcccaccagcagcctgagcagtggagccacggcgggcagcagcatgtacacagccacttgccaggcctcctgcagctgagactccagcgcctgccctccctggggtccttgctgcaggccgggtggccaatccaggtgggagagacactcccagggacaagggaaggaagggacacacacacacacacacacacacacacacacacacacatacatcctgctttccctccccaaacccatcagacaggtaaatgggcagtgcctcctgggaccatggacacattttctcctaggagaagcagcctcctaatttgatcacagtggcgagaggagaggaaaaacgatcgctgtgaaaatgaggaggattgcttcttgtgaaaccacaggcccttggggttcccccagacagagccgcaaatcaaccccagactcaaactcaaggtcaacggcttattagtgaaactggggcttgcaagaggaggtggttctgaaagtggctcttctaacctcagccaaacacagagcgggagtgacgggagcctcctctgcttgcatcacttggggtcaccaccctcccctgtcttctctcaaagggaagctgtttgtgtgtctgggttgcttatttccctcatcttgccccctcatctcactgcccagtttctttttgaggggctttgtttgggccactgccagcagctgtttctggaaatggctgtaggtggtgttgagaaagaatgagcattgagacggtgctcgcttctcctccaggtatttgagttgttttggtgcctgcctctgccatgcccagagaatcagggcaggcttgccaccggggaacccagccctggggtatgagctgccaagtctattttaaagacgctcaagaatcctctggggttcatctagggacacgttaggaatgtccagactgtgggtgtagattacctgccacttccaggagcccagagggccaagagagacattgcctccacctctccttggaaatactttatctgtgaccacacgctgtctcttgagaatttggatacactctctagctttaggggaccatgaagagactctcttagggaaaccaatagtccccatcagcaccatggaggcaggctccccctgcctttgaaattcccccacttgggagcttgtatatacttcactcacttttctttattgctgtgaatagtctgtgtgcacaatgggcaattctgacttctcccatctagtggaaatgagcgaaatcatggttgtagtgatgttgtttgggagagtgcagtagtaattgatttgacccactcacacttggagctaattaaggtttgccctgcctgcagcctcccccacaaataatgaacagcagaaagactggacggggaaacctatcaatcctgcccccagccatggtgaggaagccccaagccatggtgacacacagcagcactgcagatagccagacacatggctatcctagagaggctggcaaggagttcgtggctgcaaaagaagtttctggagcaagagagagctcgctcttgggagtcaggacctccggggagagcagagggttccgacggattcctttatgagtcagtctctctctcccttttaaatggtgggaaccctccccaaaacctttccccagacacattctcctgtgcccctcagagaggcatgtgatgtgcaaggaaaataataggatataaaacacatcaagtagaaaatttcttatacttcagcttcagtgaagtgttgtctatgttaataggcaagttgaacctcgggctaaagaaaggaattgtgtggatggctgccttgactgagacaatatgggcaggggggcgttcctgcttccccagaacaagggcaggcttcccaaaggcaccccttatttgctgtctcttcgtaagcgtgggcaccagtgggttgatgtgggaaacagtgctggtgcaagtgtttaagttttggataaactgaggattttgagaatcattattacattacatagcaacaaagaaacagattgatataatctgtgtgaaataaattgctgaggagagggattgtagggaagaagttgcttagttaggcacctgggaagctcaaatcatttagtttaaactgtaagtagagttgtcttcccaacgagaactggtgattcctgatttcagaaggctcatcagacccctacacccaagtcttttaacacggaggaagtttttccttcatgaatacatacaagataccgaactgaagaaatcttttctttgctccaacccccgctcccccggccccccgaagctattaatagtcattcaaatggcactgcactctttccaagctttcctaagctaaatatggctccaacaggtctgggaactattgaatgcaatgtactctgaaattccagcagctgtttacatgcctgatgcctaatgccatacgcctggaacttgctgagaactctcggctgcctctgtcctggggtactattgctgaccagcagggtgtaggcgctgcttttgtttgagctttgtagccacaaggtctgatgtctgttgtgaacagcagctgacttcagcactctggccagcttcctcaaacttgttagtggcttgcattttgtcaatttttctttgccatttcagtctttcaagcagctgaatcgcagaactgaaacaaaacacttatattgcaaagttccttccctttaaaatgagcttctggattgcagagatgattttttatggtcttagcgtgcctcatgctgtagaccacatcgttggagctctgggagagctctgagcagagaaagaccttggtgatcccccctggcccgatctataggattgaggaatgaggcttgtagaggtggcttgcccaaggtcacaacactagagggtggttgagctgggccaggacccagacaagcccttttctctcagtctagtgaggcctctgggaaggataggtgaaaactataaatagctgttcaagatactctgagtaaaagtcagtggtgttatctggaatttctactgaagaggaaatacagcagcaaaggtagactcatcagatggtgaaagtgtcatctcctttgtaatttatactggtgagaggaggggaaggatgtgctttcctatttttacactggtacttcattcatccttgtcttaaacttaagaaatgaaatgcatcagggcacacatatacatagaaacagcacataagccattttggatggcaattccagcactcttttaatggattggcttaatttttttttctgatgcctctctatgtgtttgaaaagttgtattgatagtcacacagagtgtactaaaataacctaaaaggtcttgaacctcccctttacctctttagaacctctgaatttggagacagctagcaaacggcaactgtagcctagcaaagatggcacagcaccacaaagggcaaatggagtcaactcccttccatgctctgaaggtcttggccactctcatcagggttggctgtgtactatccagcagctcacagtcaggagacctcccctcctcagtccctcccatttctttcttccgcaaggaaagaacattgcatgtgggcgtgtgtgtgtgtatgtgtgtgcatgtgtgtgtgcatgtttcttctgtgcatagcagcataaagttaggagatgatgactccagaatcatcacacccgctgtgcaggtcataggaccgcacacccgaggctgggagtctaagtggtagatgcttcctctccatgcgcagacagggctcccattatttgctaatgcctgcgacgtgctcagggaaggcaaaatctattccaaaggtttattttccctctgttgaattgattctaatctacagtgcttaccctgcttttggctcctacgaggcaaactataaaaattctcaaataaaatacagaggcttactctgcaaagacacctgtgtgaatgacgtgctaaacattcagcagaaaccaaattaggatcaactcttaacattttttccctcttttgtggctggaatgagttcccctgggaaagaaaatcgcccaagtgagaaacttatgccaaccacattcccatgcccctacagttacctgctggcccagatcagctctctgggtctgcagagggccgagacaggaagcattattaagcagtataatttcaaacactttacttagtgccacagtgtgtctgcagtatctataagtacttccgctctgtcaaggaatacagactggcaggaagcagataagcataattgttttccaataactccccaagtctcttggaatatatatgtatctgaatctctcagaggagagagttttctctcttctttggccattttagcctattttccaggaccttgtctagcagtggctccatttttccccgatgcatccaacttccctccctgcactcctcctccccgacagctgcctcaggaataggtgaccctgctggccatactgtgaatgctgttctttcagctgtgaccaatttgggggtgcagctgagagtgaggtgctgtcagggctgaaaaggacgcacctcattctacatttggatgtgatgaggagcagggcagccaccagcttggatcctaacttacattgggtggtgcaacctttctgacggggcctgccaaactatcagtaattagccagcctagacaatgtagcatgactaattattgctgtgtcaaagcaattcaggacaagaaaaacatatctaaatgagaatgtttagatgtggtgagaaaagagctctcaccacaatttgaaacatataaaaagttgagttctttgcaggggagccaacgggggcattgagggaagggcaaaattcaccccagacagccagtgcttgatcttgccaaacagtttacactttacctccaaacctgcagttctaagctactccactaaaataatcatcccatcctcaaagcagaccaactccagcatcccatcggttctggagggatttgatgcaaacctttaaatgcaccaacagagaggtaagccaagctctcaggagggacaaagatagatttctatcttcagtgctcttgggggatgtttgctcctcatgagtgtttaaacaagatcatttccaggtgatttcttaacatataaattcctgcaaaataggaccagcttctataggtagcgaatgtgtaggtcatataattccttgtacagatgtgaatggatgcagactctttcctaatttgccttgtaagccaaataaaagtctgtctctactgtc

SEQ ID NO: 360 - DNA, 191154 bp, Homo sapiens
  source 1..191154: mol_type = genomic DNA; note = NC_000010.11:c31032407-30841254 ZNF438 [organism=Homo sapiens] [GeneID=220929] [chromosome=10]
cggagtctagcgggagccgcgtcgagccggggaggagcgagggaccctgggagagctgtcttttcagggctgaggacccgccagcacctgatggagagcaaatggctgtttccacacgtggagaacttttaacgaacacgtgaggaaggcgggcaatgtctgtggaaaaactacctcacaacccaggcgtcttactccagcccccagggcgacagcttgtttacagtatttctgaaggtctccgtccccttttgtcggcccctcctcctcctctaaccccgacttcaggctttgagtgaggctttggtagagcagtcgccgccgcaggcgccccggtcggcgaagcccacaggcatgcgggcgcagaggccgtctgcgcctgcgcggggtgtctgctacggggaggtgcgtggagctcgagggcgtggagctcgggggcgtgtctcccgccgcggcgccggggcggggcgagggcggagcctgggggcccagcggcccgcgccccgtggcttgacctccccgactgctgggcccgtgacgtcaccccgctgtgacgcgcacgctgtaggaaaactgtaagtttacgaggattcctgcagctcctagggcttgcggggcccgctggcagctggcagtcccggcggtggtggtggctctgggggcgtcagttccttggggagtcgccgattgtggcgaagggacaggtgtctgctcagagtggcagcgcgccctgctgggcggtagggacctggggtgcgggaggcgaggccgcgccccgtggggccgggccagcaccttttcccctggggcggggcgcgtctccgagcctgggagcgaggccttagaaggggcggaaagtccaaatggagagtccctttttttcttccgtgataaagggacttagattccttttcttccccctctcagccttggagtttgacatgttaagtaggggatggaagcttcctctcagagaataggaatcctatgtcctggccgttgggatcccacaagtgaccaagtcatcgtggacacatttataagataaccagttgctgcctcagttttcttttttgtgtaaaagggaggtacagcagcctctggcctccctaatggttgttcccacagcactaggaacacgtgagataacacaagtgtgtaaatttgctaggagaaagcttatacacagacacttggttattctgaggaatgtggtagccactggctatttgaccaggaatcttgtagaaggggaactttttcactgttttgcctccccccgacaaccttccctccatctgattctataccacactggagcctgttgggtgatcgaactgttgtcactaaacttgatagaatggggatcccaagaaataacaggtatcgttagcacggtactcttggcaattacaatgcccccgttgtctgggttttgcagaggaagctttcagtgtgctggaactagcacattatagacaacacagactcactgagttttaaggattgctgtatcgatttggaatatccaatcatcgtatctgactgcttgaatattttggtcaaggggtactacattatcgattagttattactagactataatgcctctcaaactccgggactagtagtcttcaggaactttgaagggaagaatactgtgcacacttcagggtgtatttatacaggagctcgagagttcacatttctgtaaattcatttcaggagtgtgatatcttttcatccaggtaggaagagcctttgaatcagaaagcagggcttctaatttttgttctattcgttaactagcttcgtgtccaaggacaagtcacgcaaacttggaactttgtttttcttatctaaaatgagagccgatggtttatctgtttgttggtttttccaggatcaaatgagatcacgagagtgcaaatgaaaggctaagtgtgctattgttattaggagattcgcattggtcccctagcctggatgagatgtgagtcagaaatctctggaaatagagcagcaaagaagacagcctccaacctagcagggctcatattgcagtgggaaatagacaacgaacaatacgtgcataatgtaatttcaggtagtcataagtgcagtgaagggaaggaagaaaggaggacagtgggggaacagggaaggttgtttttggtgggatctgtcaggaaaagccattcaaaggcagggacacttgaagtgtgagggaaagagcctgaggtaagaacatttcagagaggaataattaatagcaatgaacacttaaaaaaagtagagcttaccatatgtaaggcactattctgaacactaaattaaatttttacaagtcttttgatgtaacctagtatctccctttcatagatgaggcaactgacacacagaaaggttaagaatttgccaaagttgcacagctaaaacgtggtagagactatttgaacgtgggcagtctgacttcagagtccaggctccaggtgactgtattttcggcctcacagcaggaacagcacaggacaatgctctgaggtggtccagacacagtgagagtgtttagagcacagccgggaacggggaaagtagtggccaatgatggtcaagggccaggcaggccgtggggtcccttgtaggctgtggtgaagtaaagatgttgttctaactgtgatggaaaaccattggaaggtttgcatcaagggactggtgtctgatttaagttttattgtatggagaattaactgtagattagagtgggtcggatggagtgaaaatcgggagaaagctgctgtgccctgcaggtgaaatgatggtggtttgggctgggggaggttagttgtggagatgatggtaggcggtagaattggtgatacgttttgaaggtagagctgacgggaaacgagctgatgtggaatttgaagaaaagggagaagtgatgattttttaggtttaggctggaacaactagaagtatagtggtgctgtttactgaggaaaattacaaatttagttttgcacaagttctaaatgcctgttagacatagtcataacaacagtgctagtaaaaatagtattatgtaagcgtaaactgagtcccaggcagggttttaagtactttaacctatattaattcatttaatcatcataagaattatatgtgcaaggaaccattattgtccccattttacagcacgagaaaatagaggcaaaaagaggttataagtgacttgtctgaagtcacccagctggtgagtgatgtagctaggattcaaacctaagcattgtggctttggagtccatgcattgaatccctgtaaccacctccgagtgaacatgttgagtatgcatgcctgtgaatatggaactcaggggagtggtcagggttggagatacccatttatttttctgaagagaaagcatgcttttgtttttcatctaagctttggttgtctgtgggagaaagattataggcagtgggactgtgctaactggtctttgattacgacctgactgggttcatgcagccagtatctggtattccccactgtaggttccgtaggggcaaggtctgtctctttgacttctctatctctagtccctaatccagtgcctgctgtgtagtagatgttagggatgactttatataatgggcatttggttaggttttggaagttcagagatgaataaaacagttctttaccttagaggagcagggtatgaggaaaaacctgtgggaataaaattagagtagactaaatgcataaatacatgccgattagttcatttgggttttctgcaccctcccctccccagcttccatgacttgtgagatggggcatgaaaagggcaaaggggcaaaagaatgcctaagctgttgcaggatgaagttgaggctccccaagagtccttttcaacaaaagaattactcaaaatcatgcatattttactatatttgcattagctttatttggcaatgatagaatttttaccaaatgaaataaattctgatatttgactgtccttttgaagtgatgagtttttccagttctattacctcagtgttgacagggctcaccagagaaataagggagttggcttgaaatgttgcagcttgcataatagagggtgatggaggggttgggtgaagtattcaggcaggtttccaccggtttaagtgtgtcatgccaaagttccacctattggaataagtttgagtttctttgctgaccatctctaacattgacatgtattttttttttgtcatagaaaggggatctggtgatatatattgtaggtggaattgcagattacatctcgtatagctggatcattgtagaacatggagactagaaaaatacaaacaaaaaaagatgtgtcttgttcccgtagatctttcatggcataccataacctcaacagttgtcacaattttgttacttcctaacatgagtatttcaaatttaaaccatgtaagaattatataaaattgcactgccgtagattttatggttaatttcagaatttttaaaaatatataaaattatattttgttttaagctttcattgggaaagtatctaaataaccagatctatgattactctaaacagaagccctctactaacgtaaatgtagaggggtgccatctcattttgcagttcacaacgttttaaatctgctcttgtagcttccctacatttaatggagttgaaatgattagtctttatttacaccacatttgcagttagtttcccaggaacatcagatacccatatatggtataaagtaaaattgcatagtcaatagcctattgatgctcaggtgttattgacttttaagttcaggcacagtgagggcaggttgatggttatttaattgtgtcaggtagctcccagcagagggggagtgatggtaagttctatctgaaaacaacaggaccctctgtttctaacactgaccatgcgaaatataacatcctagatagtaaataaaattcagattccttttaaaatttacatttgcacaagcaaattttaaactattttatgagtacttttatatatatgaagatttattgttgaaaacagtgtgtctagcccagtgatagtacatactgagcatttaaatataattctttttttaattaaatttattttttaaattatactttaagttctagggtacatgagcacaacatgcaggtttgttacatatgtatacatgtcccatgttggtgtgctgcacccattaactcgtcatttacattaggtatgtctcctaatgctatcccttccccctcccccgaccccacgacaggcactggtatgtgatggtccccaccctgtgtccaagtgttctcattgttcaattcccacctgtgagtgagaacatgtggtgtgtggttttctgtccttgtgaaagtttgctcagaatgatggtttccagcttcatccatgtctctacaaaggacatgaactcatcctttttttatggctgcatagtattccatggtgtatatgtgccacattttcttaatccagtctatcattgatggacatttgggttggttccaagtctttgctattgtgaatagtgccacaataaacatacgtgtgcatgtctctttatggcagcatgatttatagtcctttgggtatatacccagtcatgggatggctgggccaaatggtatttctagttctagatccttgaggaatcgccacactgtcttccacagtgtttgaactagtttacagtcccaccaacaatgtaaaagtgttcctatttctccacatcctctccagcacctgttgtttcctgactttttaatgatcgccaatctaactggtgtgaaatggtatctcattgtggttttgatttgcatttctctgatggccagtgatgatgagcattttttcatgtgtctgttggctgcataaatgtcttcttttgagaagtgtctgttcatatcctttgcacacttgttgatggggttgtttgattttttcttgtaaatttgtttaagttctttgtagattgtggatattagccctttgtcagatgggtagattgcaaaaattttctcccattctgtaggttgcctgttcactctttatggtagtttcttttgctgtgcagaagctctttagtttaattagatcccatttgtcagttttggcttttgttgccattgcttttggtgttttagacatgaagtccttgcccatgcctatgtcctgaatggtattgcctaggttttcttccagggtttttatggttttaggtctaacatgtaagtctttaatccatcttgaattaattttggtataaagtgtaaggaaggaatccagtttcagctttctcaatatggctagccagttttcccagcaccgtttattaaatagggaatcctttccccatttcttgtttttgtcaaaattctacttcttgcaatcacttttatttttgcattattatcttcaactcatatatatttgtagtagtagctggatgcttgtttgtgtactttacactctaaatgtttgaatatatttaaataatttatataagtagcacttatttttgcttcatttcacatttggttgcttaaaaattaaaatctttaggtttgattttaacacattacactaatggctaataattagtaagtctaggtggagactaagctttagtgacaggttaaccaagttttaaccccaaaagaacacccagaagaaaattcttagggaatagtaagcaaaaccagtatgtcgatgaaaggaataatttaaccataactacgtagctattattcttcaagttgttactattctacagggagtattttcttatttggttcttcaattgcaaagctattaatttcagtctgcattgcaagccaccaagcagtgtgaaataaatactggaagatgatactgtgaagaatctgaactcagaatgattttttactttccaacacactctggggacatttggcaatgtctagaaaacatttttggttgtcacatttgtgtgtggggacattactcctagcatctagtggattgaggccattatagcatgtcactgaatgtcccacaatgtacaagacaacttctcaacaacagaaaattatccagttcaaaatgtcagtactcctgatgttgagaaattctgtaatatcttttcttccttcactccctccttccttctgttcctccttttttatttttttatttttttgctttagaaatggaggtggtagttttaagtggcaaatgcctgacttggacaaaggattgtgttgtactgcttttagtttgttggatagctgagctaatttggttcatttactgaatgggaaataattcttggagctaataatagtagccttgaatttttttggttgctagtgtgtctagtggttttgtatttgtttttggctatgaatatttttcttactaaaattaatttaatctggactttatataatcctggattgtaacaggtttcctagtgtgaattccctttattgttgtatatgttaaattagctatttcacagtttcatggtttatatctgtcaaaatccttttcacattaattttcatttttgattgttacaaacagcccataaaatgtgtagggcatgcattatcctcactattagaccaatgaagaaacagacttaggttaaatgactttccatatgtgttaataagttagtgatgaaagcaaatctagaactttatacctaggaatctttttttttttttgagacagagtctcgctctgtcgctcaggctggagcgcagtggcgcgatcttggctcactgcaagctccgcctcccgggttcacgccattctcttgcctcagcctccctagtagctaggactgcaggcacccgccaccaagcccggctaattttttgtatttttttagtagaggcgggttttcaccgtgttagccaggatggtctcgatctcctgacctcgtgatccgcccgccttcacctcccgaagtgctaggattacaggcgtaagccactgcgctcggccgtacctaggaatcttttaaagttaccagttattgttatcccatttaatcttcttgacaatactgtgaaatagagttattactctcattttatagaaaaagaagttggtttagagatattaaataacctattcagtgccacccaactcataatgtagtttggctgtttccactgagctattctgtgtcttcagatattctccaataaataaatctgacaatttctggataaattcacagaatctttgcctaacttaattaggtttcttgaaactcatgttgccacttgaatcattggtaattcagtgtttgtaagcctattctaatttgacttaagtagaaacttacctgagttttggtaaaccatacttgctgggtaggggagaaccgtgcttgcagaagacagtcctttaaacaggcagagacgtttttatgtagggttttgaggaagcacagagtttgagattggctgattttgaaaagtgcaaaaatttaaggattagccagctttaaacttagagtttagagactgaccggctttgaggagcaaaggtactgaagcggggcagttgctgattggcttactttgttggcaaagtgcttaagtggaaaggttgagtagactttaaggatggattgactggggtagatttaaaactggttttgtggttacttgtttccagcttaggactagagccaaagaacaatcttttcctttcttgaagttgaagaatacgtactttttatgtcaaacatgttgatgttagctatggcgctaatataacatacttttgattttgcttttcttctgaaacttaaaagaaaaatggatgtacaaatatcacttgttttctgtctatcaatttcaggacaatatatttggaacccaggctgcctcaaggattatttttatatgtagttcaagaggtaatatattatttgtggaaatatattaatgctttaaaaattatggtgaaggctgtgctgtctatggtgaaggttatgtctattttttttctcttttgggagtgtgttatattatgtgcctgccacaattagtcttgatagatgccgaattatagatctagaagtctgttgtttttgctgttattagagatacatctagaagtgattactttttgaatgttacttggaaagtattctgatcaacattatgaaagattagtgattatattacatatattttatagaacaaggcaagcaaaatattttagtatttgcaaatcatgttactataattattagatcatagtaccatttatataaagtattaggttggtgcaaaagtaattgcggttttggaccgtgaattttaaatcattataagtcggctcagacacgtctttattaatcagagcaggaagcattataatcaacacatttttgccaatgagaaataagtttgttcattcctgtagcttaaaaattcatgctttgggatttggaaagcattttctgctttccaaaaacctgctggttttggaagcattttcctttcaaatagttgtcgagatgcttgaagaagtggtggttgacaagaggtcaggtgaatatggcggatgaggcaaacttcatagctcaatgcattcagctttcgaagcgtttgttgtgtgtcgtgcggttgggcattgtcatgaagaagaattgggccctttctgttgaccaacgctggctgcaggtgttgcagttttcagtgcatctcattgatttgctgagtgtacttctcagatgtaatggtttcaccaggattcagaaagctgtagtgggccaggtgtggtggctcacgcctgtaatcccagcactttgggaggccgaggtgggtggatcacctgaggtcaggagttcgagaccagcctggccaacattgcgaaaccctgtctctactaaaaatacaaaattggccaggcatggtggtgtgcacctgtagttccagctacttgagaggctgaggcaggagaattgcttgaacctcggaggcagaggttgcagtgagttgagattgtaccactgcattccagcctgggtgacagagtgagactccgtctcaaaaaaaagaaaaaaaaaaggaagaaagctgtagtggatcagagcggcagcaggccaccaaacagtgactatgacctttttttggtgcaagtttggttttgggaagtgctttggagcttctgggtccagccactgagctggtcgttgccagttgtcgtataaaatccactttttgtcacacgtcacaatccgattgagaaatggttcattattgttgtgtagtataagatggcacttcaaaatgacaattttaaaaaattttccttcaggtcctgaggcacccatttattgagctttttcaactttccaatttgcttcaaatgccaaacgaccgtagaatggtcaatgttgagttctttggcagcttctcacttagctgtaagacgatcaacttcaatgattgctctcaattggtcatttgtcaacttctgatggcaggccaatgatgttcctcatttttgagtctcctttgcaaaacttcttgaaccaccactgtattgtggtgtagtttttggtagtatttgttagtagttcctaggccaaatgcgttgttggtgttgtgagttgtctctgctgctttatgaaccattttgaccccgaataagaaaatcgctggaatttgctatttgtctaacatcatttccatagtctaaaataaatataaaataaacagcaaataataaatcattaagaaaaaaaacaaagtgagaaatgtccattaaaatgatatatagcataaccacatttattttaagaatgtattccaatatcaaacggcaaattccaacaatacaaaacctgcaatgaacgtttgcaccaacccaatatttcagttgtttaacatttatttagaatatttttctttttcagtatgaaataaagaactactgtactatctataactatttactctgtgacaaaacatttttctaaattgatctttcacagtaatattttaaattattattttcctatggagatgttaaaataaatttagggcattcattatcttagaagttatagaagtcagaatgagtttttggtgtaatttcttttttgtattgaagttttatttttaaatgccctaagtgctgtctgtatttatgtatgtaataagttcataacatgttaaaaaatggatgctgttgtaagctgagattgcgccactgcactccagcctgggtgacagagtgagagcctgtctcaaaaaaaaaaaaaaaaaaaagttgctgttgtttttatatgcagcccctatttccttccttaatctacagcttttgtgtcataccttcattcctgccttccaggtaggaataatccagtggtaaaactatgtgtgatttagatatttttatggaaacactctttgaaaatgtaaagtctgattcttgtctctgttgacagaccaaatttctgacctgtatgatagttaaccttaagaggttaatcttagcctagtgtgaaaattaatactatagttaatatattataaaattatttataatataacattaacattatgaacaataagtaatattgtttttgacagagctgttgtttactaaaagatattcaaacactgttatctttaacagttaaactttataaatttatactaaggagaaataaaaaaaatcctttttatttgggaatgcaacctcctttaaaccatcaggcccagaaaggaatttaaaatgtaacagcagtcacatctcattccccctagagctaaataatgacctcttcaagctgcttgctattggggctccagactaactgacgccaagtacccataaaatgccatataccctgtagttcaacaacgtatatccaatcaccaagcaatgttatttttgtaaaccaatgagaatttctgatgaacagcttttgtaattgccgcctctcctgattcgtcctttttttctttaaaaacttgagactctcttttgttttctggagcactcagctaggcaacttggaagtgtgtccctggctgcagtcctcaacctttgtgcttgaataaactctaaactacaatctcacccttttgattgttttaggttcacgctaaatatgtacttaaaattcctaggaaaaaattgattcctgaatatggttactagcattattcttgttatctgcagtatgaaataaatggatttgaaatgtgtttttctctgtgtacatgcagtgaatagttgggctcttatttgcctagtgatatgataaagaatcttaggttaggttatcttttgtagtaaaatggaaaaaaagagttacatgttcttcaataaaagccttattttctagtctttgctggtataatgggtaaaatggtagctcaaattttaatttgcatttttttaattactagtgagtgagagtgagattctcttcatttactcgtatggatttcacttacagttccaaatttagcaaataaaaatacagataccttgttaaggttgagtttcaggtaagcaacaaataaatttttagtgtaagtatgggccatgcaatatgcaggacacgcttctacaaaaaacaacaattatttatctgaaattaagattcagtggggcatcctgtatattatctggcaaacttaacttcactttctgtgaattgtctgcctctgcctttttgtcagattttcagttgcactttctatcttttggttgttgtttttgcagcagttcttggcatacactggattttaatcccttgcctttttagatgttgcaaacatattcttccagtcttttgcctatcttctaattttgtctgtggtgtccaattcatcaaagttgacgccatcaaaatttttccatgtttatgcttttgagatcttgaagaaatctttcgtcatcccaaggttgcaaatatgttatttaactttttctttcattagcattatagttttagcttttatacattggtttttaatacatttggtatttattttatgggaacaatattaggagatgaggttagagaggcaatgaaggggcacattgtgtgaagacttgtcggtcattgtgaggactttggtttttatgctaagtgaaataggaagccctggagggtttggaacagagggtgccattgtctgaaccgtgcctttaaagaaactctgatgactatggagaatagattgtatgagagtgtggcaaagactgctaattctgctccaatatctaattcctcctttcttctactaccagaaccctgttggtttagccagatacatggctatgtacatagagactgtttttaaactcctcctgccaataagtatgactttgtgattagatttgggccagttagataagaacacaagtgatatgtgcaaattctgagttatctttgtaaatataaggtgcttgtcctgaacttcgtctgcccacccctctccctttccccctaactgaaagcagcagcaactggaatggcaacagttaccttgaacctaaagatccctctgcctaggttcctggatgaccttgtggaacagaaccaattactactcttcatcttctccctggccatctgcctatctctctcttgtttcaaggaagagaataaactttcttgttttagccactggtttttggcatcagtttattacagcagtttagcccatagcctgtatagtacaaaaattggcgcctgaagtggtgttccacaattaaaaagctgaaatgtatagcactggttaagtggttggtcgacagacagtagaaaacatgttataggctggaaaactggtgacccttattatgtggtggcaaaatgttcagtgagactgtcacctctaataacttggaagagagttaatttgtctacccagtttgtacctccagggaagtagttagaaagaatcagactgttaatatgagttgattcgtccttgccagtaactacaagagggcatcaaataagagaacgattagccagtttgcaattagagttgaaagggagtatagtttttagttataatatacagctaaaggaggttctctctgccaatggcctgtggtctgaattgactgagaggccagtaatatggggcattgcagtgttggaaaaaattgcttctctgtgccaaacagcaagaggtaagatagtcattctcaggaatctcctgttagattttcttggcctgacagtggcagacagtccaggcaaggttcaaattaaggatttgcttttccacctcaaccagtcatttgaactatgtaaaagcttcagttatacatacaaaatctcagttccttacaacaacaaaggtttatttcttactcatgacatgttagctgtggctgtgttccacatactttgtcacttcattatttaagccaaaggaataagcctgtttgggacattgccattcttgtgacaggcaaaagagatatggcagaaccagtgtcttggaagtggtacgtgttacttttgttcatattttattggccaaagcaagtcaaatggctaagcctgaaatcagtcaggtcagaaggattatctcaagtcacatggcctgtcctgatgtcagtgggttggagtggtataatcctcctgatgtgaatcagataatctcaaggtagctaaccttcaatcaagagagggttgaagagagggagcgatggctgcgtcacagaggccagcagataaaacaggagagttgacaagcttaatatctatgaccagattaaatccttagttgtggttactactttcttgtggaactgactgaggcaaacagaccttttgaaatttttaggagattatgttgccaaagatcccataagtttggcttgcaaaagcctctgctggtttgatattgtttgacacctaaagcaacccttggtcccaaatttgcaccagcaggaagtaggctattagatctttgctgccctattggagcatatactcttccaagtttgtttcatgtatgaccagaaaggataatggaaaagaaaaaatcttccaaaggcaaagccaagactgcctggacaagggtcttcccctcagagaacagaatctgaaatgaaccaagggacttgccttcttgctagagcagagatactttgcaattcctttctagaagtgtttcatcattgataaaaatgtgtgtttgctattcttttattttcagaatggaagacttaattgcattaatctcatttgtattccacagttgtattttgtgtgcgatggtggtggtggagagcagaggttatactcttttgttagtttgcgagccgctggactaggaaggagctacacggatgtgaatgagttgaagagggttgtatattgcccagagacctagaccttaagctaaatccagtaactggatgagacttcaagttatccctttagaaaggagatgactatttcagagtgggaagaaggatgcactcccacctttggtacgtatttagctaggcacataacccctacaaagaaattgtatttcttacgctccttgtagccagatgaagccagatttctaagttctggccagtgggatgagagtggaagtgacatatgctacttttaaaaacatatttgtattaaaaaagaggcttgttagtcatattcttttccctcccatccccgtaaatgaagcattggtgagttagcttcaatcatgcacctgagggcagtgccccaaggagtggtaagagaaaacaggaggaatcttagtctctggatgaccttatagagcaaagctacttacctttccttgaccacttgtctgcctcttgactgtaacgtgagagagaaataaattctttttttatctgagccactatattggtctcattacaggagtttagcttatatcctagttaatagagatggtaatgatataagcaggaatcaaatatagaatgttagattggaaattattcttgatttttttcagttgaagcttttcatttatgtattctttctatgaaaatttatttttcagattgtctaattgtaccaacactttagaaataaagctcttactttaacatcacccctgttataattatgctatgtttctttttattttcataagcatgtgctttacatatttatattaaaattttatatcctgatattttcatgtgatatctattttctttcttgctttagagttcttatatttgcatggttattattgtataacactcagttttactgtacttaaaattttattattattggtcactgtggactagttatgtccccccaaaattcatatgttgaggccctaaccttccacatgacagtattggagatgtggcctttaaggaggtgattaaggttaagtaaggtcataagaatggacccctgatcagatagaactggtgcccctataaggagaggaagagataccagagctctcttttcacctgtgtgaagacacagtaagagtacagccatctgctagcaaggaagagggtcctcatcagaacttgacaatgccagcgccatgatcttagactgcagcctccagaactgtgaggaagtcccagtcatggtatgtcattattgcagctgaagttgatagtatattggcatttagattgctttcaagttttccttctataaataatgctgttttttgtttttgtttttgagacagagtctcactctgccacccaggctggagtgcagtggcatgatctcagctcactgcaacctcagcctcccaggttcaagcaattctcctgtctcagcctcctgagtagctgggattgcaggcatacaccactacgtccggctaatttttgtatttttagtagagacggggtttcaccgtgttggccaggctggtcttgaactcctgacctcaggtgatctgcttgcctctgcctcccaaagtgctgggatgacaggtgtgagccaccacgtccggccataatgctgtattcttgtaaaaattatttatttgttgaattatcttacgtaggactcgatctagaataattttattttatcactggtaataatgacagaaacaatattgataataatagtaataacaatggcaatcagcaatgatgattataataaagacagctatgataatgacaagatcaataacagtaacagactgggtatggtagctcacgcctgtaatctcagcactttcggaagccgacgtgctttcggaggatcgcttgaagccaggtgttcaagactaatctgggtaacatagcaagaccttgtatctacaaaaaaagttttcttttaattaactgggcatggtggcatatgcctgtagtctctgctactcaggaggctgaagtggggggatgacttcagctcaggagttggagttatgatcacaccactgtactctagcttgggttacagagtgagactctgtctctaaataaatatatatatatatatatacacacacacacacacatacacacacatttatatataattataacagtaagaatgacatatttattgcatgtttactgtatgcaggcactgttttaagcgtttatcttatttgatccttacaacagatttatgtggtaagtactgttgctcatgttttgtagataaggcaagtgaggcactgggaggttgggtaccttcaccgtcatcacgcagctgattaatggtaaagtgtagattctcgctaggctttacttgccacagagcatgctatggactgaattggatccccaccaaactcatgtggaagccctaatcctccatgtttatagtaattagagatggggcctttgatagataattaggtttagatgagggcctgaaggtggggccctcatgatgtgaatagtgcgcttataagaagagacaccagagagcttactcttgctcttccgctgccatatgaggacacagtggtaaggtggctgtctgcaagcccagaagtggcccttatcagaaagcgaccatgctggcaccctgatcttggacttctcagcctacagagctgtgagagaataaatttctgttgtttaagccacccagttaaatttctgttgttgtggtagctcagacaaagacaaagcctatgctcctaactgtgacatgacatgattagaggttttttgttttttttcagatcacacagtcagtatagcaaattggactgcaaagaagggaccaaaaaagtggaaaggacaccaagaaagaataatgttactgaagccaagagacaagcattttaagatcaaggatatcattattaaattgataacactttgagggaattttcatttaagaagtcatctgtgctttgggaagagcagttttgtgtttgcagtccagattgcagagggttaagtaggaaatgatgtggggtaggggagacagtaaaaacagttttaactctttttcggacttggatgtgaaggaaaagaggcaaataggaagtggcaagagagacataaagtctggggatgtatattagtttggttcatttttttaaatgaatcaaatgatgggagaaatgtaagcatttatgtgcagcggggtaaaagaagagaaggagagatagaaaatgtggagggggaagtggataaatgatggcatcagatccataaggaggtggataccttaagttgcagattagctttgagcgggaagtttctttcctgcatcttcctggcaccttcctccacagtgccaggaaggagggaagaatgtgcgtgtgtttgttggtcagtgagggtggaggaaactgagggagtctgacctaataacccctcttttgtttctgtggaggtgatgtcattttctgagtgaagggggtgtagggagcttgaaagtggtggacgtttggaattgaatctgtgggacatcagagagcctgagagaggattgatggcagcagtgagaagggtctgctgaggtgggaggccatgtatttgtggaattcccagcttgtgcagttggggattttttttttttgagacggagtctcgctctgtcgcccaggctggagtgcagtggcgggatctcggctcactgcaagctccgcctcccgggttcacgccattctcctgcctcagcctcccgagtagctgggactacaggcgcccgccaccgcgcgcggctaattttttgtatttttagtagacacggggtttcgccgttttagccgggatggtctcgatctcctgacctcgtgatccgcccgcctcggcctcccaaagtgctgggattacaggcgtgagccaccgcgcccggcccagttggggatttttataacagtgatctctagtctgggtatgggactaaagaagtagactcttacattggtttagggagtgtatgtggaaggacaagccagtaagacagttgagaatttaggccagggagtgagaggttattaggtcagattccctcagtttacttcaccctcactggccaataaccacacacacattcttacctcctttctggcattgttggggaagagggtccctctttctgggagatcagattctgggttacaatggataagaagtgaagcttggaggatggttaatggattaggaaagatagagagtgaagtgggaaagagagagtcaggtggagaaagaccagagcttaacagatttaagaacagagttggtgtatgcagtcattccttcaataaatgtgtgttgagcatttatcttctagacactgttctaggtgctatggccccctagatcaaaacagtgatcaaaacaaaatctgcccttgtagagcttaattccaatggggaggtagacgattaacatatattatgtgtataaacatatacatacttgtatgtataatttcagatggtaagaaaatgtcaaaaagaaaatgagattggccaggcactgtggctcatgcctgtaatcccagcactttgggaggccgaggtgggcggatcacaaggtcaggagatcgagaccatcctggctaacactgtgaaaccccatctctactaaaaatacaaaaaattagccgggcgtggtggcgggtgcctgtagtcccagctacttgggaggctgaggcaggagaatggcgtgaacccaggaggtggagcttgcagtggagccaagatcatgccactgcactccagcctgggcgacagagcgagactccatctcaaaaaaaaaaagaaaaaaaaaaaagaaaatgagatcagggaagagactctgagaagtgacctctgagcagagacatgagtgttatcaggggcacagcaatgcagatgtctgagagcattccagggcaaggaaacagcacatgtttgtgcaaagccctggcaggggcttgtataaggaacagccatggcactggggagcgtgagtgaggaggaggacagtggtaataaattagggccatgatacattagggccactataaggacctaggattctattcaagggtcgtgaaaagccgttgaaagtgtgagtcagagacataacatctgttttacttttctgaaggctcatactggctgctttttggagagttgattggccatgggcaattaagtaatccagagaggtagaaggacaagagatggtggttcacaaataacatatgggaatttgagatttcagcagttgagtgcttctgagtgagaatctcgttgctattcctttaagcagacacacccactccacaatagacgttcttttctgtggatgaaggcctgaccctgacccttggcttataccgcaccctttcctgtttttgactctcttcctcaccagctccattattcattctcccattttgtcctcaccttgtctttcatatctgatgcacattgttgtcttcctggccaagacttcctctagatctaggttttcagaccttttattcagtctgacttcagacttcagtctgcagaaaactttgatggaagcccagtgtgtcagccaggggaaaccgagggaaatgggggtcaggagtgcagtgctctgcccacttgcagttgtactctgacctccaaaacaactttgagacaccttctgagaaccgttagcctgccagctcacagtgtggaaaagccccacgttgaactgttgctcttttgcagcagctcatccctgggatcaccccaggccatgctctctctgctcagcctgtgccttcttaatcctcaggcacctgttttgcctgacagtggtacgtgcaccctcccgttacaaagtggtgtgctgagggcactcagaaccatgaagcatgcatggtgcatcttcctgagtgttaattttcctcactggctattatttaatccactacatttttatagtaaaagttaacatagttctaattatacaccataggttctgtctgtccttctcaacaaaatcttttttttttttttttttttttttttttttcaaacagggtctcacttcgttatccaggctggagtgcagtggtgtaataatagctcactgcagccttgaactcctgggcacaagtgatcctcctgcctcagtcatgcaagaaagtacctagaactacagatgtgtgctaccgtgcccagctaatttttaattttttttttctggagcagggtcttgctttgttgcccaggctgatctaaaactcctggcctcaagctgtcctcccttctcagtctcccaaagtgttagaaacacaggcatgagccattgtgtctagccaacaaatttttttaatgaccctaattaaacatgttcaattttttatgccaaaagaaaatagatgtactatagtttagaatgtaacatttgtgtacaatttttaaggaaaaaaataagatcaagaaatttaaagtttccatgggccacttagggttatgtctttagtcttcccaggattatttggtccctcagctctgaattaggactactttgatggaaaaggttagaactacctatttaagttgtcagatttgtaattctgtattttggttttgttcagtggagctattataacatttttattcagcatggaataggaactggccatgggttggtctctgaatcatcaggcttttctggttaaaggtaaacatataagtattttttcttttagccatgtttaattttgaaaaatgtcattaaagtaagcattgctgcattataaaaatgattgacaagtccgggcactgtggctcatttctgtaataccagcactttgggaggccaaggcaggtggatcacgaggtcaggagttcaagaccagcctggccgatatggtgaaaccccatctctactaaaaatacaaaaattagccggttgtcatggcaggcacctgtaatcccagctactcaggaggctgaggcaggagaatcgcttgaacttgggaggtggaggttgcagtgagccgagattgagccactgcactccagcctgctgggtgacagagtgagactccatctcaaaaaaaaaaaaaaaaaaaaagaattgataagaaccaggtgatggcctagctgttggagcagtactcaaaaacaaggttgtcctaggccacaaagtaagtttgatgctttgcatttaaaaaaaatagggtatcttgtgttaagctttgtaatgcttcctctgagttgagagtgaatctttaagataaaacatttctttgtcaggactgtttgcaactaaggaatttaaggttgagggttttgcaggatactgccaaattataagactaatgagggcaaggattggatcatgttcatggatgcacgtgagctaggagtagtgcagcacctcacatataatacttagtattttttgagtgaaggaatgaactatccttggtataactgtggaaaatattgttaggttgtataatagatagaggatagcttccctgtatctattgagttgaacaaggcagccttcctggacgtgttgtcacaatattgctatcagtatatggctcttttaaattaatggaagcagaggcacagctgtacgttttctttaaaagagtgccagttatcaggtctgtttaatcacatgccaattctgtctgcaaaatggggatagcaacacacaatctatctagtgcaagtagctgcactaaggttagatgaggtatacagggtaagagaaaatacttgcaaattatatatctgataacggacttatatccacatttataaagaactcttgcagctcaatattaaaaagacaaaaataccccattaaaatgggcaacggatctaaatagacatttctctaaggaagatttatgaatggctgataagcacacgaaaagatgctcaacgttgtcactcatagagagaagcaaatcaaaaccacataagatactacttcatgcccactagttagctgtaatcaaaagcagataacaagtgttagtgaggatgtggagtaattggacgctccatacattgctggtaggaatttaaaatgggcagccactttagaaatagcttggcagttcttcaaaaggtgttaccctatgttacctagcagtttcactcctaggtatctgtgcaagagaaatgaaaacatacctacatacaaaaacttatacataaatgctagtaacattattcctaatagctaaacagcggaaacaacctagatatctatcagctgatgaatatataaacaaaatgtggtacatccatacaatggaatattattcagcattaaaagcataaaggaataaagtactgacacatgctataacataacaaaacatgctaagtgaaaggatcagacataaaaggctatatgttgtatgattccatttatgtgaaatgtgcaaggtaggccaatccatagggacagaaagtagatttgtgagctgagagggttagaggagggagatggggaatgactactaatggatagggagtttcattttgggatgataaaaatgttctaaagttgcggtgattgtggcacaactctgaatatactaaaaccatggaattgtatatttcaaaagggtaaattgcatggtatgtgaattatacctcaatgaagctgttaaaaaagaagaagtgaggtaatatgtgggaatatactttgagctgtttgaaaagatattattattattatttcaatttgactgtaaggccattaaataaaagcaggatgacttagatatttttccttgcttgcaggcttgtgatttttatgccatgactcaactttataaggctgtaactcagcaatataaaatattgaaaatgttgaaacataaaatgaaaactgctttgtctactgtttatatttaataggattttctgaatcagttaattagcaataagtgaatgtgtcattaagaaattagattttagaatcgtaaagttttagagctggcagaaacttcagaagtcatctagtcccccctcattttgctttatgagagagctgagtcctacagagacaaagtaagatgtcttatgtcatggcattgagtaaattctagaactgagtcagtgttctttctgctgactatttggtttcagtgctattaagtgtgttctactattaatagaactaacactcttaatagctatttaaatgcttcctatatactaggcactctctgttaggtactttatatatgttatcttggttaatctacacaaagcttatgaagacagttcattttacctgtgtattagttttgtattgctgctgtaaaataaaatgaaacaaacaaacaaaaaacaaaagatctggccgggcgcggtggctaacgcctgtaatcccagcactttgggaggccaaggcgggcagatcacgaggtcaggagatggagaccagcctgaccaacatgatgaaaccctgtctcaactaaaaatacaaaaattagcagggcatggtggcgtgcacctgtaatcccagctactcaggaggctgagacaggagaatcgcttgaacctggaaggtggaggttgcagtgagctgagatcacgccactgcacttcagccagggcaacagtgtgagactctgtctccaaaaaaaaaaaaaaaaaaaaaacaccaaaaaaacctttgtgacttaaaacaacacaaatttcttatcttacattctggaagtcaggagcccaaaatggacctgacatcctgttagcagggcttcccttctccctgaaggcttaggggaggtcaattttcttgtcttttccagcttctggaggctgcctgcattccttcacttttagtctctttgcatcttcagagacagcagtggctgggcaaatctttctcacagtgccatttttctggttttaattcttttgtccctgctttcccctttaagaacccttgtgattactttgggcccatctggataatgcagatactctccttattttaaggcccactgattaccagccttaattctgtgtgcaaccttcattccgccttaccaaatgagtggaaaaaacacactcaaaatggtttttttttttctattagccaacagcaatcaacacagaagacttttgtaatcacacgtgtgggagttcccccccccgccccccgccaaccacaccaagacattttgcagcagacaccactcgggttgccttcaattcaatgctgacaccacctggagagagtgtcagatcccatatcttcaggcctcagtctcacagcaagtctcaggaggctctacctgtgcttctgaccaacctgctataaattggggttcccacaaccacctctttgggttcatttaatttactagagggctcacagaacttaggaaaacacatctactggtttattataaagggtattacaaaggatgcagatagagaggtgcacagggccaggcatgtggaaggggcaaggaactcccttgccctccctgggtgtaccaccatttgcgaacctccatgtgttcagctatttgaaagctctccaaaccctgcccttttgggtttctatttaagcttcattgggtaggcatgattgattgaatcattggctgttggtgatcaacttaactttcagaccctttccccttcctagagcttggagggtgtcactgaacgtcccaaccctctaatcaagctttggtctttctagtgtccagcctccatcctgaagctacccagggactgccagccatcagtcactcattagcatacaaaagacatcactttggagattctaaggattttagcagttgtgtgccaggaaatgaggatgtagaccagatatatatttcacaatatcataccatgtaatatagggtagacagagattccagggaataagggatggacatcctttgagggaggcaatattctgtgtaccacaatctgttaataagctgaagagatttaggctcagagagattaagtaagttgtccaaggtcacaacataataaatgaaagagctgatattttaacccagatctgttatttatcatatatgcatatctttcacaataacatgatctttcccacaaataccatttgatcctacttaggaaaagtaaataggatgatgagcattgttcaaatagtaaatacctatttttttattgtatatatttaacgtatatgatgttttgatgtatacacacagtgaagtggatactacagtcaagcaaattaacatcagtcatctcacatagttactctttttagtggcaggaaaatctcttttagcaaaaatctcaaatacagtacagtattaaccatagtcctcatgtcatacattagacatcgagacccctttatcctgcgtatctgcagctttgtatcctttgacctacatcttcacattttctcccccgtccacccctgtttaccatcattttgttctctaagtattcaactttctttttcttttctttttttaagattccacatataagtgaaatcatgcattttctgtgtcttgcctatttcactctgcataatgtcttccacattcatccatgtggtagcaaatggcaggatctcctttttaaagctgaataatattccatttacgtacgtgcatgtacatatatatatacacacacacatatgtacacacacataactcacagttcattcatctgttgacagacactttggttgtttcaatatcttggctattattgtttctaaatcttggctcatgctacagtgaacatgggagtgcaagtatctttatgagatggtgatttcatttcctttggatatctacccactggaggaattgctgagtcatatggtagttgtatttttaatttccttaggaacctctgtatggtttttcacagtggccgcactgatctgcattcccaccaacagtgtatgaggtttctctttttcacaccatcaccaacacttgttatctctggtaacttattaaagtaataatcacatttgcttaataatatcaagaaataggctatgttattatgaaacagttaaaagcatataggaagtttatttattgatgtgggaaaagtatttatgactcatcatgacttccagccccctcccccacatttctacttatcacttcctttctgttaccagttccttccttatccagcctagatgctttgattcaaattattttccggcaaattctttcaattcctttgtacctctttggtctctccaatctcagaactggatgagctcaactacctgccagttttttcactttaatgatacgctcagcagccttaaaattgtccagcagtcttccgacgtgtctattatctcactccctcactcctcacagcatactgccttcattcttctcaaaccttttaaccccctatcagtgttatttgatgtcttagcagttttccatgcagttgaccacaattgaccattgcttccttttggaaacacttgtctcttggcctttgagacaaacccttccctggttttccttctcccattctagttgaccattttctgtcttctgtgttacctgacatctaaaagaggaaaggtttagttctcttgtttttcatcttgtacttttggttaaatataatctttttgtgtaagtcttattatctctagcccagagtttgtcatcttcagcactattgacattttgggctggaaaattttttcagtgtcaggggatgtcttgtggattgtaggatgcttagcagcatctctggcctctatgctctaactgccaatagagttccctctacccttattgtgacaatcaaaatgtctccagatattgccagatgtctcctgggtgcataaaatcaccccccattgagaagtacttatgtagcctgaagttctcttctgaggatctggggataacacctttctgacatctccacttgaatgtctcctaggcattgcaaatttaatgtgaccaaaatggactcttgttttttcttccatatatgctctccccccagattttcagattttagattatttatgatcttgcattggaggtaccaataaaagccattggaggcttttatttggagtaaactagggagccaccagagagttttgggccaagaaatgacatgatctcacgtagatcagctctttcttgagcatagactatgacttggaagactgaaagcaggaagaccagttaagaggctactgtggtaatcacagtgaaaaatggtagtagcttgtataaggatggtagtagggcatatgataaggagtggcatctttagtttagtgcttaaacacaaatagccctgagaagaatgcacttgtaccttcatgaggttagtatcagagtatgctttgtttttcagatgttttctaagaacttgcagggaacaggttttggtgggtcagaatgagaagacagtagccaagttcctgggttcctccaagccagaacttcctgggatgttacttgaagggattcaggccagaacagggttttaaaacaagggacccaacgggaagagtaagcaagacatccaatactacctgttctacctcacaatcttacttagggctggtcctcccacggtaaaacatgtactgggtggcagggtagatagaacaattggaagtcaggagtgtttccttcattaaatataggaagcacatcatcttgggctggaaggcccttagctgaagtgaggtggctatcggcatttgggatgggacaggtttttgttgtacaagattgccctacacatctcaagacttgcaatagtgtgctctctcattgtgacatctaaaaaatgcctccccacatttccagactccccatgggagtcagacgtgttcacctgtataccactggactgagccccctttgctaatttgaaaactgccttctgtaataggaagttagtcaaaaggctatacattccaggcccttaaagaaaacctgcattacttgtttggggacttagaaggtatctactagtactttaaattagcatctatgtttattgctgatacatcccataaatgttttctgtccatgttatgtaccttaatatactactttgtaattcttttgtaggggtcatagccatttcagggccatctctaaagacactgcaaaggacacatgctctagctgctctcttctccgtattgttatataagggaacctgaattaaaatgaattaagagtttggatgaaagggcattccctagccatcttagcaaagggagtgggagtaggattggaagagggaggataatggcctgtatgtgaatgtttatgcacatcatgttttttaaatcaggtctagctagtatcaagagctaaatattttttaatcgtatttttgaaaagtagtagaaaatagaacaatattcagatttgtgaaggattgatgactcagtattagagggaaaactcaccaaggaaaagatctaatagttttgaacatataaaatgtaaggtttatttacaatgaaaaaaatcacacaacacactggaggaaatgcttgtatcaaatgtgactaagggtgaatatctataatatctgaagaggaagttctctcgaacttaatgaagaagttttaatacataagtaaacaaagtattttagcagttaatgattaataaaaaggtgggattatgtttaccgtcactggtaatcaaagaaatgccttttaagttaaccttgagttatctcttctattctttcgaaaatactgaaaattaaaataactgacaattctggagaggctttaaggaaatggacccattcagtcttatgtgtttcttgtgctactcccagccactgcctttccctgaacatgctgtgccattttaaattcttacgtctcatctttatgagtccttcccctcttctttctgttgactttccatctcttgagagcagcattcagatcctgggggcatcccttcttactcagccctgccaatgagcactctgatttgcattcggcactgtattgcagccatgggtgtatgaatcagtccctaccacttggctggggagttcttgaggttgggactggtcaggccctgcatcagggtctggtatacaagtaattattcaataactattgaactaaattattggattttggtgaatgttttaatgaactacaatatgttagggtgatggaataacatgatcactaaagtgcaattataagtgtaacttatggcaaaattttgtaaccaaatacagaatgatatgtttagtgtaatttcaactgcattagaaaggtaatatgcagaaaatgaatttttaaatattttaaagttataggtaacaaacttttatttctttattacaatctttatgatacaatatataatttttaaaatcagttggcacacttgacctccctctcttctcatcagaattaacctctctgtgtcctgtccaattatctgattgaactctcaggaaatagggtgggcctccccagaatgtgggcttttaaggatagctgcatttatgtgactgaattaggtccccaagcattttttgagcttttactgtgcctgggtgcatataacttgaaagatatggtacttagtattttatagtttgtaaatacattcacattatcagcgatgagttctacagcttttaataatgtcaaatataaatggtagttgtttttttaaaacattttttgagtatctaccatctgccaatgactgaaatacagaattcctttaaggaagtccttgtctgacaggaaagacagacatccatgggcctttcatacagcaagatgagtgttgtaatcgtgttgtaatgagtgcaatgggttgtagagtgaatggagaagcagttatttcttaagagggctggtgagatgagatgactgttctctggtaagataactctcgaacaggactttagaagatgggcaagatttttgcaagatggataggagaaaaggggaaaagcatgaacagaaaggtagaagtgtagaaatacatgatgtcttcagaagccactaaaagattttggagagggatatgacatgattaggtttgtatttggaaagaaaattgagatcagtgattataacaaggaaacacaagaaaagttttttttttttttgcatgcttttctatgtgacaattttgtgagcatccccagattttaaattgtaacatagataggacaggctttacattatgcacagttctggccagccaaccatatgccctctcatagctgtacatcagagtgtcccttctaaaagtctgggtgaacagtgggctacaggaatgaggtcagctaagaagccattgcagtgttccacatcaccacaggaagtgatggcttaatcagggccatgataacagaaatggatgggagggaatatatttgcctatgtagacttggtatcagagttttgtgggggtagagagaaaaaggaattatacatcagtgtttctcagattttaatgtgcatgtgaattgtctagggattttgttaaaaggtagattttgattcaataggtctggcagtggggcctcagattctgctcccaagtgatgccaacactgttaggccatggtccagtgaataattaacaaggacgagataacgtgggtgtgagactccgctggctagatggtgatgtcattatctgaaatacctgaaatggggaataccagagaaaagaaagcttgggcagggggatggggtgaagtttttgtgggacattcaggtataaaaattgtagacagctgaaagtttggattctaagcttgagagaaaaatcaagcatagagacacaaatttgggaataagcatttcgttgccgacataaaagtcatgagaatgagtgacattacctacaaaaaagagataaagttaatattagaaaatatacctattccttcatcattcaaaggcctcatcttctaaaaagacaaataaagaaaatatacctatttgctaaaattttaatgtccatttaagtgactataaaccagcaatgggaaagaaattggataggtagcttcctccctatgaacaatctctaggtgtaaattgaggggaggagaagtcttctttggaaacccccccttttccttggtaatgaccatagatcaagttaaaaacgattaaagtatcttatgagaaatcattcatataaataaatatgtgtaaagaatcgtcaaaatgccaggcagtcttctgaccttaacattaatagcaaatgaaatgaatccctgaaacagtggagcttatgggggagattgacaaatgctgtgttaggaaagtatagtgtcatgtgagagcacacacatcaggaacacatgactcagtgtggagacaagggatggccttcctgaggaagtagcattaagctgagaccagaaggctgagtggtggtgacctacaagaagaagaagggaaggtcataacagtaatgacttggagtggagaggccctgcaggttggagaagttcagtgtggctcaccatggagtgtcagagtgagggagatgactgctgagctccgagaggtgaacagagcccctggtgaggcccactcctctgggacttagtagagagaagagggagaaaatgatgtattttcccaaggaaaaactgttattctactttggtatagttcaaacaacagtcttatgcatatggttttacaaggcttttatggactggcctagtaatgacatgactcatagtaatgttgtttctataggaaaaatgttttgggcttcaaaagctgtcttacaatttaactttcagatttttttttttccatttgggaaccgcttggataagagcacaattctagtgttttttgttatttctgttaaaagtgtgctttctctggtatgtatctatgtggctacagtgttgattttccgtcttctgatatgaatcaaagctatcattgcacagatgcagttgaaatgttgttttattttcttgaccagattcagaaagtgtatggaaatagagaaatctttttataaattgtttagttttcaaagtgtttgttcttcaaagttaaggattccctctgtaaactatatcatggtatactgtgttatataccatgaaagtatgaaaaatgaaactgccatgaaaattgttataaacagaaagtaaaagagatcggtgtgttttcactattgaagtcaaatagaatgcagaaggtaaacaataaaggataaaatacctagctttaaaaatactttaataaccatgagcttatgatcataatcgtcttcattactagctattgttatcattagtaatacttgatttttttttttttttttttttttttttttttttttttttttttttttgagacagtctctctctgtcacccaggctggagtgcaggggcgtgatctcggctcactgcaagctccgcctctcgggttcacgccattctcctgcctcagcctcctgagtagctgggactacaggggcccgccaccatgcccggctaattttttgtatttttcttagtagagacggggtttcactgtgttagccaggatggtctcaaactcctgacctcatgatccacccgcctcggcctcccaaagtgctaggattacaggcatgagccactgcgcccagccaatacttgatattttaaagcaagaaacagcagctgttaaggtcactccctttgtaaaatggatctatatgagtttcattttctttaataaatgaaactttaggctgaaactctcaaattcccttatctccaacatgcaaagttaatttcatccacatctgtcttgtgaaagtatctttctttctatatcagttagaatgctttcagctggtaagtgacagagacccaactgaaagtatcgtatgtaataactgcattttattgtctcatataactagaaatctggaagaaagatagtttttttgttggcttatatagcagctaactcttatcatcagactctctggctctgtcttttcattctaccatcctgataagttggcttttgtcttcagacttttcccctcctcatctcaagatggcagctttaactccaagaatgacatactcatatcaaagcacccatgactgtaagaaaagaaggtgtctctcttatgtctttttttaaaatgaagaaaactttcttagaagcctcctagaaaacatgacctcattagctaaaattgcatcctatacccgtttctaagccagtcagtggtgaggggtacggaagtcctgtgtttggcttagactagtcaagattcatggcccttcactcctcccaaggtaaaaaaaaaaaaaaaataggattttgttattcagaaagaagggaagactaggtaggcaaccactagtgtctgccgtatcttccaaggccaatttatttgcctagagctttaattcctttctgcctcttagaagactttgttaataatttctttttgcgttcattttcagtcttctcattctttttcttcaggcttattgaaagaagagtctgcatatgctgccttcatttttttcccctcccatttattccttaaattccttgcaatctggattttgttcctcctaataagaaccttcctttctatcaacagcaataaccacctgattcccaaatcctttgccagtgtctttgttttctggattttccattctctgtttcatttgtttgtacattattctttattatttccttccgtctgcttgcttaggtttagtttgcttttctttttgtaggttctgtcttaaggtggaagattagattatccacttgagatctttcttttttaatataggcatttatagctacaaatgtctttctgggtattattttctttagctgtatccaataaattttggtatgttgagttttagttctcactaatctcaaggtattttctaattttctctctgatttctttgacccattggttatttaggagtgtggttccctcccatctttgtgaatttcctaaaattccttctgttactgatttgtattctaattgcatgccattgtttcagagaacattctttgtgtgattaatctctttaaattattgaaggttgtttatggcctagcatgtggtctcttttggaaaatgtttcatgtgcacttaataatgcatattgccttgttgagtggagtgttatatagttgtctgtaggtctggctgtcttacagtgttgttcaaatcttctgtattcttgttgattttcttcctggtggttttatctagtattgaaagagggaagtctccaattattatttttcaattgtgtatcccttcaactgtcttttcttccttctcttgttaagtgcatatatgcttctaattgttataccttcctgatggattgacccttctgtcattatgaagtgtttctctttatttctagtattatattcttgctttaaaatgtattttgcctgattcttttatgtttactgtttgtatggtatagcttttactttcaacctatttgtatgattgaacctaaaatgtgtcttctgtagattttatatagttgggatctttgttctttttcttttataaaaatacagcctgataatctttcttttgattagattgcttcatctgttcacatttaatgtgattactgatatagttggatttttgtctgcagttacgaattttgttttctataggtctcaggtcttttttgttctttcctttcttgccttcttttgaattaagtagatatattgtagtgtgatgctttaattcctttgctacttttaaaaatatatattttgagttattttcttagtggttgctccagggtttacagtgtacatcccgatttataagaatttcacttctgatttatacttactttcagcaaaatagacttcctctgttagctccatttccttccccaactttttctgctattattgatgtacctattatgtcaaacccaacaacacactgttgtaatttttactttatgtcttttgaagaagctgagacaagggagagcaagtacgtatttatagttagttgtattgacctctctattttttattttctttacatatttctgcatatttgagttagctctggggtcattttcttactcccgaagaactttgttctcacctgcttcttttgtgctgttattgtctaaatgtatagcagtaaatgttgttagcccaataattaaattatagctacagtgttttattgaattattctttaaatcagttaagagaagaaaggggaagaaatatgcaattacagtgtcttttgcaataatgtacgtaatttcctttactggcatgctttgttttttggggcttccaattactgtttggtgttacttgcttttagcctgaagaatttcctttagtatttcttgtgaaacagatattctagcaacaaattttctgtctttatttttctggggatgccttaatttgacctttattttaaaaacacagtattgctggatattagagtcataattcacagtattttactttagtactttgaatatttaattccattgctttctggcctcccttgtttctaatgagaagtcagctgttaatcgtattgggggctgctttgtacttgtctggtcattttgctcttgctgctttcaagattttctccttgtctttggctctcaagattttgcctgtaatgtgtctggaagtatatctctttgtatttatcctatttagaatttgttgagctccttgggggatgtgtagattcatatttctttttcttttatcaaatttggaaagatttcaaccattatttatttattttttgttctttttcattcatttttttttttcctctctctgagatagggtctcactctctcacccaggctggagtatagtggcatgatctcagctcactgcaggctctacctcactgcaggcttaagcagtcctcccacctcagcctcctgagtagctggaactacaggtgtgtttcaccctgcctggttaatttttaatattttttatagagacagggtctcaccatgtttcctaggctggtatcaaattcctgggctcaagcaatcctcccacctcggcctcccaagatgctggaggtacagatgtgagccgccatgcctagcctcattatttctttaagtattatttctgcctcttttttctcctaatggcatctgttttagtccattttctgttactgtaacagaataccaaagaccaataccaataaggaaaagaaatttatttcttatggttctggaagctgagaagtccaagagcatggtgcgagcctctggtgagggccttcttgctggtgggaattctctacagagtcccaaggtggcacagagcatcacatgctgagagggcacatgagtgagaacaaaactggattttataaacagatgcactcttgtgatagctagcctacctgcgtgataacccattaatccagtaacttattaatctactaatccattcatgagagcagaaccctcatgacccagtcacctcttaaaagtactacttctcaatacttctgcattcaggaccaagtttccaatacggtgaacctttggagaacacatttaaaccatagcattccaccctgggcacccaaaatttatgtccttctggtgtttaagaatacattcattccatcccagtagctccagagtcttcattcattctatcatgcattcaaaagcccaaagttccaagtctcatgtaaatcagatttgagtgagacacatggtgttatttgccttcaggcagattcttttcagctgtgagcctgttaaatcaaataagttacctacttccaaaatatagtggtggagcaggcgtaggacagacattgccattccaaaagggaggaacaggaaaaaattaaggagtaacagatcccatgtaaaacgaaaacccaacaaggaaaacagcattacatcttacagctggagaataatctcctttgactccatgtcctgcatcatgggcacacgggtgcagggttgggcctccaaggcctcaagtggttccaccccgtggctttactatgctcagtccatatgtcagcccttgtaggttacagttgggtgcctgtggctttcgcaggttggacctgcatgctggtggtatagttctgggatctcagcagcattcctgctcccacagctccattaggcattactttagtggggactctgctgcggccttgcttctggctgcactaggcattgccctacgaggggctctcagcaatgagtctacccttgttgacaagtctctgccagggcaccagtctttttggtatatcctttgaaatctaggtgaaactaccatagccccacttctgttacattctgtacagctgcagaattagcaccttgtggatgccaccaaaatttatagcttgtgccttccagagtggtgagttgagccacacttgctgctacttgggtcatgactggggcagccacagagcattgctgtggggtgcagggagcagagtcctgaggcagtcctggacagcgggctgtgcagaatgccatggatgccatgggctcccacaaaaccattctgcactcctaggcctctgggcctctgatgggaggagcagctttgaagatgtgtgaaatgccttttggagtctttctctaattgtcctgatgaatagcctctgggtcccttgtatcaatatgaatctctttagcaaatggttgctaggccacattcttggtttcctttcctaaacaagctttttaaattctacatagccagcctgaggagagttttccaaatctttccactttgcttttcatttgattataaattctgtctttgtcatccctttgctcccaaatctcactgtaagtagcaaaaagtaaccacacagtatcttgaatgttttgctgctagaaatttcttccactcgatatgctagttcatcactctcaagtccagcattccacaaacccctagggcatggacatagccttgaggcgtgtcaggctgtttgctgctttgtgacaagtgtggcctttattccaagttctagtaccttgctcctcatttccatctgaggcctcttcagaatgacctttacatatttctatcaacattctggtcatgagcacttaagtaatctctaagaagattcaggctgggcacggtggctcacgcctgtaatccctgcactgtgggaggccaaggcaggcagatcacctgaggtttggtgtttgagaccagcctggccaacatggcagaacccctcctctaataaaaatacaaaaattagtggggcttggtggcgcatgcctgtaatcccagctacttgggaggctgaggcaggagaatcacttgaacctggaaggtagaggttgcagtgagctgagattgcaccattgcactccaacttgggcgacagagcaagactgtcttaaaaaaaaaaaaaaaagaagattcagagtttctctagtcatcttcagaaccttcaccagaatcacccttaatgctccatttatggcaatgcaggtttttttctatccagctcctccacagtcttccagcttctacccgttacccagttccaaagccacttcttcattttcagatattatagcaaaaatcctacgtcttggtaccaattttatgtctcagtctgtttctgttgctataacagaataccaaaaaataaatttatttcttacagtgtataggctgggaagtccaagagtaaggtactaacatctggcaagggtcttgcagatggcaagaagtttgttttgccccatgttcagccatagattagtagcttggattattcattcccagtcactcctgagcgaagcaagccttgagcatgcccacagtctagtaaactgccagggatactttcatattaaagcctggcttcctaggagttgatcttggggcagaagagcttattgttcagccactgtttgatcagaggttatacttcagcccccgagtgacagtgaagcttccttttttaattgatctgtgtggcttgtgcccatatcaagctctgattgctcaagtggatgcagcctcccacttgggcacagccttcctgacctctgtgtttactgtgagctggctgtctctttttctagttctgttaaacttctgatagtcctaatttgttggttgctgcttgtatcctggggccatgagcaccttcttaactatgtcaattccctcagacagagcagaggaactttttgtccttaagggctgctgtctccagtctgcatctccccacaggtagaaccttgcaccactgcacagaaactgggggcaggaatagtgactcacttcttccagagtgacacccctgctataaaagggtgttgggagcatgggcattagccacttgtcttcttggcttgcccctatggatatggaacctttgccccaccagcaagttgatccaggagtgatagaagcccagtgttttcagcctgctgcacctagagtagaacttttgccccacaaatgagggctggctagagtaaggaagccctggccctctcagctgtgcctctacagaatagaaactctaccatagagggctagggaaaatgaacagtgccagtggcttgttctaccagggtgaaaatgcagccccagcttgggagctgaggggaaaaggagcccccatattcttgaccggaccttctggactagagctctcgagtaagtaaaacagactaagacataagtcagagcttggaggtgcaggggaggtaaggtgggagcaggtcatggctcaaatgccactgacaggctcttaccaagatttagaatattttcttgaatgcatgtttctccatttattatatactcttcaaacaatttccagtttaagtggttgttttaaacaattttttttccagttaaattgtttttgttggggagaaattctatggcactcttcattcctccattctggaagttgtctcttggttttgctcattaaaaaaaaaaagatatatcttcaatctctcttaatctatacaggttactttatagattcttaatctttacgttccttctccatccctttaagtttcatacagtttacctgttgaagaacctgggaggtttgatctgtagaatttcccacattctggattttaatgtgtgcgtatttgtggtgtagatccacacgtttctctgacctctataattcctataaattggcagctgtccatgaactggatcagactcagatttgattcctttggcagttctatacatagaatttaatgaagtttaggatacctctgaatcacctggtgggcttgtaataataaaatgcagattactgggtcctatgcccaaaccttctgattcaggagattggaggttggacctgagggtttgtatttctggcaagtatctgagtgaggctgaggctgctggtctggataacctactgtcaatgtttggttgcatctttttttgtgatcttagcagccatttatgcatattatttgtatctatttgttcattaaggtttgaaaaatagtaacattctaattctttttatttttttcatttattcattggaatatttttataaagagatacatgtccttatttcttattcagttacccagagttctcaaaagacaggtaacataaattcttgattttttccctttgatatatttcttaagataatgaattggttctctatcatctcttaaaggtgaccagttttttaagaatattattatgaacttttagaatttaacgtattagttaattcatttcaagtattaccatcactgaagctcaaattattccatctttggccaatggaagcctcttaaacttagctcctgagtcctagattcagctatttctcttagaagccctactgtttaaggggtgatcatgttttctctcagccctttctgtagacagagatcagaagtatgtgcacatattgaagataaaataaaaatatttcataagtttatattggtgtttccaattcaaacttgagactatggtggagatgatagtgtgtttaaatcttctttctgtatctctttcctctgttttcaaggatatgagtgcttatagaactggaaagtcctacaattatgtattttcatcctatagtgcacacacaacagtctcagaatgacaacaccacaatactactcaaaacattaaaatccatatttttgcatacattctcgcccccttaatcacatttaggactggagatgtcttctgagactttagtttattcagcaaccatttagagcatcttctctgtctcacactcactgctagaaaggggatacaaagagatgtaagatatgtccctgttctctgaaagctaagggtcagggttattgggttatgtatcattctggtataggaagatgtggccatagaatctgggattctgttcttctttaaaagaagttaatgctaatgttaattcttctttacttgcatgtttcttaaaataaaaccctttctctctactcttatcagggagcagcttccttttggtggagctccttaaatactttctaatctcccttacgtagtatattattagtcagggttctccagagaaacagagagagaacaagagaaagatatagagtttattttaaggaattggctcacaggattttgggagttggcaaatcaaacatgtagaatacagcagcaggctatatacttaagtaagagttggtaatggtcttgagtgtaaaaattgcaaaataggctagtaggctggaaactcagcatttctatgttaccatcttgatgtagacttgcctctttttcaggtaacttttatcttagctgttgaggccttcatctgattgaataaggcccaccacagtatggagtctgctttatttcaagtcaactaattataaatgttaattacatccacagagaccttcacacaacatctagattagtgttataccaaacagctggccatcataacctatccaaagtgactcataaaattaactgtcacatctaggttaactgtttattgccaaaattgatattctttctaaaaaactgtaaacttatataattttattgcttgactgacaaattggtttcatcatattggcgaacctataaaatagtcctattaagaaattattttaaaaataaagttatttctaaaacatattaacatatagctatattcattaaagcaaaactgttttaacattaaaaatagcgtaaatataattctcagtaaaagcttacattatttagtttcttagctataatttgtactaatatatttattaggtacaataattataatcttgttatctctctctttctctggagaaccctgactaataatatactacataagggagattagaaagtactaaggagctccacagaatacagctctctgtattttcctggaaaaaaaattttaaaaatacggttgtattttatctttaattgcttcataaaattgtagtctttttcaggttgcattttgtgattgctacatttgaaattattgatttttttcaagttactgttttctatataaattgtgatttttaaatttgagaatgtaatctctatgtcgataatgaggtacctggtaagttcaaagcaaattctattaaattttattttgtaatagtttaatatgtaaatattctagcacatacattttcaaagctactattaaaaaaaacagtaaactcgatttacagcacctttattcaataaaatttttatgacaaacttgtcaaataaattgtgtctattatggaaatcttttaaacatcttaaccaaatttagatgctgctaaattgtaggcattctcaagttcattttattctagtacataatataaacttatttaagtaaaaaagtaagttcgccataaaaattaaatcttgaataaaagatttctgtcttagtttgggctgctctctcaaaatatgacatactgggtggcttaaacaacaattcatttctcccggttcggaaggctggaaagtcaaagatcaaggcaccagcagatcagtttctggtgagggcctgcttcttggtttgcagacctggtttgatcttctcattatgtcctcacatggcccttcctgggtgtgtgcacttggatggggggtggtgggtggggagagagagagagatctgtttctttttataacagcattaatctcatcaggagggccccaccaacatgacctaatctaacgctaattaaaggcactacctctgaataccatcacattgggtattagggcttcagcataagaatttaaggtgacacaaacgtttagtccatagctattttcaactgactttgaatgtaatgtttgaatgaaaatcatccgttatgttgatgattttgcaaagtctaagcctcaaagaattctaagatagataacaaaaagaaaacatggactatcatgctggaattttttttttttaattcagcatcagctttgtcacaaatattttagttttttttttttttttgagacaggggtgtactctgttgcccaggctgaagtgcaatggtgtgatcacagcttacttcagccttgaccacccaagctcaagcaatcctcccatctcgtcctcccaaaatgttgggattgcaggtgtgagccaccacacccagccttagttcaatttttttaaccctgtgtgtgtgtataaacgtttgtaaattttaattggtagaatgtcacatcttttgtggattcagttgtaaaatatgtttcccccaattttgattggtaatatattgcagttttgggcacagctgtgaattatatgtgaaccacagccaagtccaagtttatttctgtttcaccattttttaaatttagtaagaacattgttctttctatgatgctgtactcaaccaaggtttgtaattgtgttatcactgtaaaaacaaatagaattgacccttattattcacagattttgttttcatgaattcgtctgcttactacagattgagcatctctgatctaaaatcagaaatgctctaaaatcctaaactttttgagtgccaacatgatgctcaacacaatcctcaagggtcatgcgcaaatgaaatactcatgggagcattttggatttcagatttttggattagggatactcaataagtatataatgcaaatgtttcaaaatttttaaaaactctgaattcaaaacacttccgaccccaaacatttcagggtaagggatactgaacctataaaatttatttgtaactgcaaaatcaatactcatgacactaggcattcaactgagtgcatgactgcaaatggtacagaatggtgaaaaatttggattgctcaacacattcctagttgacaagctgatttccttcagctctcatacggtaaacaagtctcctttttgtggtttatatagtgccatgatttttgcttttttaggcttatgatttctgtgtttaaaatgactacccagtgtggaactgaagtgctgtatattgcgcctaagtgcaagaaggctgtgatgtgccttaaggagaaaatgcatgtgatagataaacttatagtgctgttggctatgagttcagtgttagtgactcaacagtgaacagccatacattgcttaacaacagggttaaattctgagaaatgtatcattaggtgattttgtcattgtgaaagtatcatagagtgtactgatatgaatctatagcttactatacacgtaggctatttggtatagcctcttgttcctgggctacaaacctgtacagtgtgttactatactgaattcgtaggcaattgtaacacaatagtaaatatttatttatctaaacatagaaaatgtacagtgaaaatatagcttgataatcttatgggaccacctccatcatatatgcagtctgttgttgactgacacatcatgcagtggatgactatatattaataaggtatcttgaaacagaaatatacataaaatgaggttatgtttgatcagctaattaaaatgtaatcagaggctctcaggagctctcaggaacccaaccctgaatttcccttatgagtaaacagtttggtattccctaattcagtgttcatggtgacttcatagaacttaactactgtgaataaggagaaccaacggtaattttgtctttgttgttgaacttctaaactgatttttaagtagcaattaaagcaatgtcaagtgtttcatattctacagaatgaacttccaaaagctttactttggtttcatgaattagatgaaatcatcaaaccattattggaattaactgatttttctggttggtacatctcctgatgctgacagaaagctggcaacatttaactgtgagtttttctgttaatggagccaaccagttttcactttactttgatgatgtaaaagagacgctttagaatcagaactaagtgcatttttttaaaaagtcattggatctagatgaaaagtcatgctttagagaataatacgtaaaacactttctctgtcctgtctgctttcattaaatccgtgtctttaagctagccatgagcagggagcagtattcagtatttcttctaccttcattcaagactggaggagttagctgtccctacctgctcctgcctaggtatactttttctgcatggtgcctgggtgctgtctttaagaatgaagtatcagttacagtacatttagtacatttagaaatgggttactgctaggtgtcttaaagatttaagcaagttgcgaaattgacaactggcttcattgcacatgcatctcacacatggctcaatgagattatggcagagcctaaaagtacaagtaagtcttagcatattttaatgctatcattaaaaaaaatcattagaaaatgaaaaatccaggacaaatggtaaatttgtgggacactgggacaatggccgtaaattgggactgtctcaggcaaactgacacactttactagacatgtgtccttttaaaaatcttcaaatcccaaactcttgattactgttttcctgtcaaaaaggctgcgccctgaatatgaatcacttgtttgtgactgtttactaatttccacagtattatgcacatggaaaagaatgtgaagcattcttcttagccagttttattcattgtggcatttctttttttctggaacattttctatttatcttaaaacttttattaaattttgcatgctttcatttttaaactaaagacatgtaatcaactatggaattattttcttctacattagttcttttattatcttaataaaaatatacagtaattaaaaatgaaacttgaaaagaaggcaccttttacatatatttgatgaaaatggattatctgaatatgattataataatactttgtattgttacagaattaattaaaaggatttacggtatatcttatgactctacaggagccttgggatataggtaagtgacaagcattttttgaagagagatttctgaaacattaagtaatttgatctcataggttcctggcaaagtagacagtggggcatatcttacttcagcaattaactcttttctcttcagtataacatttgtagaaatatcacatttacatgaatcttcatgtaacatttccctaatagctaacaaatcatatttcccagggaattttaggcttatttgtataataattacaatgaagatattgtttataagacatagaagtatggcatgtagcaaaatttagagcattagaaaaaataattaaatgcaatatggtaccctgggttatacctaggaactaaagaaagacagtagaaaaacaggtgaaatataaatgaagtctatagttaatagtaatcaattagaaattaatcaatgttaatttcttagttttgacaaatgtcctgtggttatgtaagatgtttaactttatggacaactggatgaagggtgtataggaagtctatactatttttgtatctatcttgtaaatctaaaattatttcaaaataagtttacttgaagcacaaaagtcagtttattgattcaaaatgtatagtttagaagtagattttctggaccatggtttaaaaaaataaaaaaaataatttgaaaaatccagattacataaaaacgattcaaggaaatacatggctataggtttcatttttcagtttataggaagtatgcaattttatttttttaacattggtgatatgctttggatttgtgtccctgcccaaatctcatgtcaaattgtaatttccaatgttggaggaggggcctgatgggaggtgattggatcatgagggcgaatttccttcttgctgttcttgtgatagtgagtgagttctcatgagatccggttgtttaaaagtgtgtaacacctcccccttcacactattcctcttcagccatgtaagatgtacctgcttcccctttgccttccgctgtggttgaaagtttcttgaggcctccccaaccatgcttcctgtgcagctcgaggaaccatgaaccaactaaacctcttttctttataaattacccagtctcagatagttctttataacagcgcaagaaaggactgatacaatgggcatggtgtttgcggacatctcctcgtacttggttacaggctttctctttgatactttaagccacttgtgttctttggtccttttgtgtaactttttctgttattccaagcaggccctttaaatggttcccagtacacttctttttcttttctttagtgtattgtttagagaaaaaagtccaataatgtgactcagtggtttggggttgagaccctgttagtgtagttttgttcagtcacactacttgagcttctaggtcaagtagtagacatggtagatgtattgttaacaagtacgaataaagatgaatataattcttacatatccatttctgtaattgagctaaaataatacagaatctattgctgtcagataatagaaattctcagtttctaaaatggactctagcatgataactattttaaatttctataaatattaaaagacttataagaaggaaactttgtagtttgctgaaactcttatgtaacttttcattaataaaagtaaagtagccatgcaggtcttgtagatggtttcctgcttctgctgccaaatttaatgattttagttaaatttcataaagggaaatataaatatattatacttaaaggatatagacacttaaaacaacagacccatgcctgaataactcttgcagaataattgtccggcttggaaatttctgtgttgcttggtagtctttagccagaattggtgttaacagtctcatgttaatagaattatagttaaagaattataatctattttttagttgtttaacatgattgtgctaaccttggttgggaagttgagaaaaagacaggatggccgggcgcggtggctgatgcctataatctcagcactttgtgagactgaggcaggtggatcacgaggtcaggagatcgagaccatcccggctaacatggagaaaccccgtctctactaaaaatacaaaaaattagccaggcgtggtggcaggtgcctgtagtcccagctactcaggaggctgaggcaggagaatggtgtgaacccgggaggcggagttcgcagtgagccgagatcgcgccactgtactccagcctgggtgacagcgcgagactccatctcaaaaataaaaaaaaaaaaaagaaagagaaaaaggatggttttctcaggccaagtttaaattacattgatcatgtaatagttcacacaaaacaagcaaacaagaaaaacttattattctgtgctagaagagcattaaaagtattgtttttagggacatgcttaccattcagctgattgtaatttgtggtcatcaaagtgtaaataagaatagctagtatatattgaactttttttttttttttgagatggagtctcgctctgtcacccatgctggcgtgcaatggcacaatctcggcttgctgcaacctccacctcccgggttcaagtaattctccttcctcagcctcctgagcagctgggattacaggtgcacgccaccagcccagctaattttttttgtatttttagtagagacatggtttcaccatgttggtcaggctggtctcgaactcctgatctcatgatccccctgcctcggcctcccaaagtgctgggattacaggtgtgagccatcacgcccggcctgaacattttctatgtaccaggcactttacttacattatctcatataatcttcataattacctatgagataggctggaattccctttacagatgaggctgagagagaagagctgtctccagtctaattctgagatggggaggcggacagaacaagtgcctattatgtacagtacctactgtttgttcatgatataagcagctcccaggaaatgctgtcatgtttccataaacacgtagtaaacttcggattatttcagcttttctaggtaagaatatctgatcacactgggtgacctagagtggattctcctggggtgagcagcctggagtaaggacttgtgtttcttgtctagctttactctggctcattctgcagtcccctaacatgtcagttgttctctgtcacctgattaattgctgaacactcattcattgtgtgcttcgttgatcatatgccaagaacttttggcagctctggggaacatgctctccacgtgcctcctggtaactgttggacaactagaagttcctagctgttgtgaaaactttgatccagaaactgcaacacatgccagagaccagggatggggtagttgaacagctgacaggtgaaatgtagctattcagattgttagttggtcaggagtcagaaatagagtaggcatgtgactctaaaaagtggtttttgaagaggattatgatggttggctatggacttcatagtttgtagacataaaataattctaacttctttttgaggaagagtcataaaagtacaaaatctcctttgctatcttctcttctttatggtctctaaaagttgacatttctcagggctcagtccttagccttctgtatttattttccacacgatctcatatgatcccatgttttaaatgccatctgttctcccaaatttacaatttctttactttggtctctcccatgagttctagacttatttttatgtcttttcaacatctccattttggagtctaataaacatttcaaacttagtatgtctaaaatgtaaatcttgaacttttctccctgggtaagtgatatacccagttgttccaggccaaaaactcaaagtcatgtgtgactttttattccatatcccacatccagtccattagtaaggcttatatgcctgcctttcaaaatgtatcccaaattactcctaccccactcctcacccttactgccctattgtaagtcactgtcataagtcacctaggtgataatatcgtcttctaaccggccttccttatctcctcattgtatctctccagtcagtcctccatataggagtaaaaggtgtttttttttttttttttaatgttaaacagtttctgtcattcctctgttcagaacccttcagtggctacccagcacacacaggatgaaacgttgtctcacatgttctaacaggcctgctgactttatctcctgtcactcactgtcttgctcactctcctctagccacacatgccttcttgctattccttagatactcccaagtccatttgtaatcagctagcttctcctggttccgtgatcccacacccctcactccaaccagtttagcctagtaccagtggaggtagatttagagagaagaaaagtgcatatccaagactctctagcacatgtatcagtagagtcacaataaaaatattacagctttagcattcctagttttggtaatttggattgctttcaagaataagaaggactggatttagatctacagaaagtcatagctagaatcaatggggaaaagttacagagagagatttctcctcagtttaaagagtgctacaaagagacttagactcccacacaataatagtgggagactttaacaccccaccgtcaatattagatcaatgagacagaaaattaacaaggatatccaggacttgaactcagctctggaccaagaagtccagatatgtcaaagatcagatggttgtagatgcatgatgttatttctgaggcctctgttctgttccattggtctatgtatctgttttggtaccagtaccatactgttttagttactgtagccttgtagtatagtttgaagtcaggtagcatgatgcctccagctttgttctttttgcttaggattgtcttggctatgcaggctcttttttggttccatatgcagtttaaagtagttctatccagttttgtgaagaaaggcagtggtagcttgatggggatagcattgaatctataaattactttgggcagtatggccatttccgtgatattggttcttcctatccatgagcatggaatgaaaactgaaattactttttgttccgtaagctgcaggatggatatcatgttagcaggcatgaaaacaacattaatgtccttgtacatctccattagagctgttgggtgactaggtgcattttcattgagcaataatattttgaaaggaatctttttctctgaacagtgactctcaacagtgggcttaaactattcagcaaaccatagtgtaaacagacatgctgtcatccaggctttgttgttccatttacagagtagtgtagatttagcataattattcatggccctagcataattcttaatggcctcaatgcaaatgaaacagccttatattcgaagacgatatcatataagactttcatagctagagagggagagtcaatgcttggcttcaaagcttcaaaggagaagctgactctcttgctaggggctaatgcagctggtgacttgaagccaatgttcatttaccattttgaaaataatacacactagaaatatggataaacttcaaaaacattatactgagtaaaataagccagatacagaacaccacaactgattccatttactgctctaggttagtatatcagaagtgtgagaagagataaatttactgtatggtgacaaacagtggacaagttgttgcatgcagctaagggtgggttgtgactgatctggaggcagtacaagggaactttttgggataatggttgtgttctatatcttgattctggtggtgattatatggagatataaatttgtccaaacccactgaaaagtacacttaaaatttatatattttattatatgtaaactattatctcagtaacaatgcttaaaaaaaccctggtacacaaattttgaaagttgttttactagcaaaagattaacttctgtctaatgttagaagacctttgtgtaatgctaaaacttagtcatcctgaaaaatccatttagataaatcagtgtatacaatatacataaagaatatatgaattaaaagtccctaaataaggaaagagagtagacgaattctcaatatactgtctagtctgtagtttgatgtattggaatcctcggaatgaattggtgtacatttccagtttcttgaatcgatgtttggtagtaccctggacactaagaagcagccagataaaatgaaataattacaactggttcttggttctgctttcgtgttcttaacttcttgagttgacttttatttcatgttttttaactagaaaaactggttagaagacataccaacataccaatgtcccttagaatctttttttttttttcggagacggagtcttgctctgtcacccagcctggagtgtagtggcacgatctcggtgcactgcaacctcggcctcccaagttcaagcaattctctgcctcagccttctgagtagctgggactacaggtgcccgccaccatgcccggctagtttttgtatttttagtagaaatggggtttcaccatattagccaggctagtctcgaactcctgaccttgcgatccgctagcctcggcctcccaaagtgttggtattacagacgtgagccaccgtgccgggcccagaatctatttcttcctttaggaatggatcccctagagtttagctaagcacatggctccctatctagaaactgtgcttctctgcttcttttacagcaacatgtggctgtgtgactaatgagaggttaatggtaatgtgtgtaagatcacctctgttaagacaagccacttaccctagactttcttttttccttttctgctggctgggatgttacaccagttacagtagccatcttagttggaaactactttggaaaccacgtggaagatggcagggccagcctgggtccacagatgatcttgtgaaacacaccttcccctgtcaccccatattttggcatgaaaaagaagaatttctttctcacttgagctacttttgagtctctttgttatggcagaaagtttatacgctaatataaaatggaaagcatttcagagttttaagtttttctttatactgtttgctatattgtctatatattggtatggtattctcaattaaagtagtttttaaaatacatatgattacatgccaagagttcctttttgattaattatttgagagaatgttttgcaaatttccaagttacttttaagcttttggtattaataatagaatgatgttaatatatggcattctgcttttctagatttttatggttgtatttctggactagcctatgatcagttttcgtaaagttacacagacctttttaaagaagttttctttatgagatacctaaatacctattatgttgttgaactttattatttttttgtctgatctctcaaaggcttaaagttgtaaatcactgatttcttccgtcaattttaattatttgtagttctataagtttttattttggtgtatgtgttaatgtgttatgtgttatttactgtcagcatctcaattgaggattataccttttatcagagtaatatgacttcttttttttttttttattaaataaagggtcttgctttgtcaccaaggctggaatgcagaggcacgatcatagctcattgcaccttccaatctctagggctcaagtgggcaatcctcctggctagctggtactataagtgtgccactacacctggctaatttttccttttaattttttgtagagatagggccttgctatattgcccagactggtcttgaacttctggcctcaagcgatccttctggcctagcctcccaaagtgctgggattacaggtgtgtgccactgcacccagccatgactttctaatttatgacttgtgttttgttttagctgacattgatattgctaccttagtttatatttctccataaatctgtgcttcccgttatatttacactttctttgtcattacttttagatatgtttcctaaaagtagaacatacttggattttattttttatcctaaaaagaactttgtctcttaacaaatatttaatgcatttaaatttgtttccaaattgttctgattggttttattgatcttttcagctttttgtttgaaattcttccttgttttcattgtgttttggattttttgctgttttgatttaaagttttatgtttaatttggttttcatttttaacttattgtgcatctaaggctttgaaaactaaggattattttaaatatttttttaactttaaatttatatgacacctatcattaacagttaagaataggatggtatctcttgataaatgagaaatttaatatgtttttacttatctgcttctctgttttcattaatatgatctaagatttttaactcaagactgttactaaattataattttaaataatttatgcacaatttattttattaacttttatatgggcataaagaatatgaaaaccctaagttgtcacaaccttaatttctactttttcaagtatttatcaaaaggaatcttaaaccatcaaaattatattctgatatcctattacttattattttgatttattttcatattatatctttaaaaaatactgttttcattttttctgttgcccacattcgaactatttctttgctcattagactaggagaaaagaagtagaaatagtcagatgtgaaattaagataccaaattatgtatttggtattttctgtagcaaagtctaaggtctggaacatgtttaggattattggattaatggattttatggtgatgggttttatggggagaattaccagttatttagtagcttgtaagcttgtgtcctaagatgtccctgtcaattactgcatcaggtaacacagggcgtggcacttagattctcattggtatttgttcagtgacagaagctgtcctctattgctttcgagtctctaagactgttttccccatcttgaatgtgcctagtcatctgacctcctctcaaatgggcaccaacttcattctctctgtataataagggaccttgtatggggctttcctagtttttttcagaacatgcttgaggaccatttagggaagcagggtcttagaggacattcagtcttgtcttggaaacagtggggaaggaagaactctgtagcagttgctaggggtaatattatatctttaagaaaacaatgctgtcactaagttacttttagacatggaaggcttctctttaatttttttttcttttttagtggatgattatgtagctagactaccaagaggtagggagtgaagtaaagctgagaacagcctctccaggattatcaggttagggtgaagttcttggcaagagactggatttagtgtggtattctggaaagcacatgggctgaggaggcaggagacctttattctaattttggttctctgttcttgtttctaactgtggcaaaccatttaacttttgtgagtctcagactagatttattaaatgaggaatctgactcaaagatcctttctaactttaaaattctgtgtctgaccagaggaccagggtagaacaaggaggtttctactcaatagcatttttatttttaatttcattttgtaaagtcaagaggaataaaccatttatcttactgctttgaacaggaggattagaagaaggaatcatatatggctcacatgtttatgttctgacttcgtattaggtaagtgacatgacgcatgttgcagtcgattgtccctattgtaacacatggaaataatctggtactagagtgactcagaggaatgtttgttgttgttgttgcttgttctgtttttgttttcttgaaacgattttactccatcacccaggctagagtgcaatagcttgatgatagcttactgcagccttgaactcccaggctaaagcgatcctcccacctcagtcccctgagtagctgggactacaggcacgcatcaccagcctcggctaatttttttatagagatggggtctccctgtcttaaacaggctgatctcaaactcttggtctcaagcaatcctcctgccttggcctcccaaaatgttgggattataggcctgagcacctgcacctagctgggaatgttaaatcaccattttttcctggagaaaacttgacagaactatttatctagattcccagaaggttatcaccttttccactgggatatgtgtgtgtctcaaaattgagggtactgggaggtaggcctgttgtgtgctaccaatcagccattaggctgcaggtcacactgaacatctttcattgaactcctgagtggtgaaacggctgctagcactaaagttgtgtttcacaagggcagtaacacgatgctgccctagctggctatctgttgtaagttgagctgggcatggtcacacgcagggtgggcagagagagttttcaaataatgaacatgtcacagttgtgaaagagctgggaacgagtgctgactgaataaaatctatgcagcaaagggtgactctttttgaagaaagactttgttctgcccggattctggaggaagagccaccggaacagcacagaaaagactggacagtgggctttggtcgcttttcttctctgtagtcatcacattgaggactaaaaattagttgaaaagttttatttccctctctatcaagagcttccgggggtgggagagagttgtttcatttcagaaatgtgttttgttttagtaaacacgtatcatgaattgaataaatgcaaataaaattcaaaataaattagaaacttgaatttaaaaatatatgtgataggcttttaagtgccactgtatggtaggctctggtagggatgcagagatcaacattcagtaaagtctgccctcaggaacttgggtgaggccaacatataaatggctaatatttattatgtttcattcagtttttgtggagcatctactctatgcaaggcagcaggacttacaaagtaaggcagagaagattgagtctctgttctcaaggcatttatagtcctgagggatatgaataaataggtaactagagtgccaggtacatgagggcatacaggggagaataatagaatgtgtgggattgactgtgttctgagattagagtgaggcagcctcaaggtgcctatactttcagatttctgcagtctttaagtcttctagaactacagcgttaactactggaggaaacattattgtatgtttttgtaggtatagctgctttatattaatgagtccatagctgagcatctggaaggaaaaaaaaattgttgatacatgtgctttctgtattcagctgatgatgaagatgatgatgatgatgatgatgattgaattgccctctactagctacaaattatatctagaattttaaatttgaaattaaagggagacaccttttgatcaaacattgttccctattaagttacagtaaaagtctttcttgaactttaaatctattaaaaagagattgcatggcctcccataatcattgaatcccatggctctttgaggtagggatttcctattcagcccagtgtcctcctattcaagtatgaggctgctttctctctgtcatcattgaagtcttggtctttttggacaacagtagaggcctgtaatatattttaagctggatttgtaaattgaaggggcccaggctgagtctggcccatggtgcatgtggcttacctccatgcctgagccacaaaaggcccactatttgctgtttttagggagttaataagagcttttgtgacatagttcatacacactttattggctaaaatctagatgatctgaaggaaaaagaatacgttgcaaaagtcaaagttatggctgtgaactagaagaaaagttaaaaatataaaaactgtcacaaatggtacaaacgagaattagaaattagcaagagcacagaagcagaggttttttaattatagcactccttaagacattttaaattgttataatgatttcaaataggtaaacttttggtcttaaaaggaatcaaggggccgggcgtggcggctcacgcttgtaatcccagcactttgggaggccgaggcaggtggatcacgaggtaaggagattgagaccatcctggctaacaaggtgaaaccccgtatctactaaaaatacaaaaaattagccaggcgtggtggtgggcacctgtagtcccagctactcgggagactgaagcaggacaatggcgtgaacctgggaggcagagcttgcagtgagccaagattgtgccactgcactccagcctgggtgacagagcaagactccatctcagaaaaaaaaaaaaagaatcaagggctctactttctgtgtgtagtttattaaatgtaaacacatacaaaatttaaggggaaaaggtaatctttttatgtgaaactgttttgatttatggcttccgagactttgaaagcctctttgcaccttgattaaatacaccgagtggttttaaaacctaataaaattgttggggggtggcataggcagatatttttaatatagcaattaggaatatcataaagaagattaaagcagtttgtaacataagccttgaatagtattactaaataaagaaaatgaggttttagaaatttgaacacgttaactataaaaaaagtaaactttttttcatgtaatactgaaatcaactatggaattgaagaaactatgatttttctttttaaaataaaattatttacagaggaaattcatgaatactttgttaaaaaacaaaaagcatttatgtcaggctaaagttccatttgactaccacccttctgtctccccagagatcatcattttgctatttattcttccaaattgtcttctaaatatttttatgcatatatatgtatacataccacagatggatatgttttttgttgatgtttaaacacagaatgttgattgctggttcattttaaatatggccttccgttgttatgttttatttttaatacttctgcagtattactaatagcagctgacacttactgcgtagttactatgagctaggcgggatgcttagcatttttcatataatttagcctcatcttcataataaccttcagaagtaaaatagtttattttatatgaataaaattctacctttagtatacctttcatttacagtaaattactaatgccagtagtttagcattctttaataagatttctaccaaaacatttggaatgattttttaaaattgctaagactgtaactgccagttctgttacactttttattcttgtgcagttggcctttaccaagtccccagagtcgggtgtctgcttgctaaaccagaaagctggagatatgaggatgattcttgctcaacttttaggaatgaagtggtagtatgtgtcctatttgactgattttaaatgaggaacagacaaccccagacatttcctcactagttaatggtttgaaaagcctatgcctgtgatgatgtccattttggggacagttataggagacaagacttagattgaaggtggttcccttttgaaagaagtcttccattgtgcccttggtcataccagtatgaagacataaagacgctgcaataggaactccaagaatttttatgggaattggtagaaaggggtattgggtaggttgagagaaaaaaaggttgtgcttatgtatatgctgattttggagtttggatgaggatattttccacatttcatgacaaaataaagagctgttagtgaatgggatagctctcagagagttttaagtctgagctctgctgcttaactagctgtgtgactttgaacagcttcatgacactgttttaatcaaataataatattcacttcatacagctgtagggtcgaaattacataaagtacgttagacattgctaagtgttttataaatgtgctagtattaggtggtgttcttactgttttcattaacataactgttgtcaaaagcttctacagttcacctctataccaaagacttaacctacttgcttctatcctttattacttgagaaaggttactatattagggttctgttattttcagaatagtaaaagaggacctatcacctcttttaacatttaacaaatattgaaggcctaatatatgtgtgtgtgtgtatatgtgtgtgtgtgtgtgtgtgtgtgtgtgtgtgtgtgtgtatcagccagcatttcttctggctgaatgctagtaaagaaaggatcatttatattaatagtaactctggaggagagaagaaggtcccagtaaatatcatttgccaaaggtctcagtaaatatcatttcattgtcatcattattcttcataggctttttaaaatcttttttgtcttcaagatttaaaaaagcattaattattaatatctgtccatttatgcaagtatttgtaaataaatgaatttgtaaatggttatgatgagacactgaaaaaaaaacaataaaaacttaccttgctttggtttggttttggttttggttatgaagtcacaaataacattcaatgggagtatgaggtttttatgtttaataggatggaacatgggttaaaaatgttaagaagtgctcatttccagagtaagctctcattttcagctgaggagactgagctccactgagcttgcatttggtatacttcggggtccacattctaatggggaactgattattgctggaaacccaatcaaaagtgtggtttattctgggtttgtttaaaattttccttcccactgttctgttttcctaatataagtattatagcaatttagaattcatggaaagaatgagcacctttagcttcttacagtgtcatgagactgcatatttgttattcagtgttcaagaaattaaccatcagttgtttaaggcaactaggaagtctacagtttaatctcatttactgttatttagtgatatgccatttagtatatgaaaacactgtgggtataggctgttggttgaagcagactatgtgtgctttggagggggcactttgccaagggaaaaaatcttttgatttttttgttccctcttctggagagttctcaaaatctatccttttgacttttattggcagttgtcattttcatcgtcatctccatattcttttattttttttgacttactctgtggcaaaccatctctagcctgaagttataccaatgaaaaaaaaatcttatttccaagtgacccatgaaattccattccatattttaaatgtgtcacattggaaatgccacttttttctccattgtatttttgttaccctaacccatgccctcaccatctgaggactgtgtgtatttttacagttaatagctctcatactcactggtttgtggaaactgagcatttcccctttatccagaggcagttgtggtaagtgtcttgttttcttcagatcccaaccacgggtctctaaaggtatctaagatctgtatggtcacatctgcttttccaagtaacagctagaaatattttaccatgccttcactatagctaggctataataaagtttacaatcagaggctgggcacggtggctcacgcctgtaatcccagcactttgggagggctaggtgggcggataacctgaggtcgggagtttgagctagccagaccaacatggagaaaccccatctctactaaaaatacaaaattagccaggtgtggtggtgcatgtttgtaatcccagcttctcaggaggctgagacaggagaatcgcttgaacccgggaggtggaggttgtggtgagccgagatcacaccattgcactccagcctgggcaacaagagcgaaactccgtctcaaaaaaaaaaaaaaaaaaaaaaaaaagtttacattcagttaaattctctaagcttctggcttagaatattgaagaaacttttacatagagtagataaaggatggagtaggaatttctgatttgattgtgtgttattgtggaaagaatgctttccctacagactgactaggaacaagatgtttaaacataagccagggtggagacctgtttggtcagctttataggagccacgtttccctacttaggatgagtttgccaactatcccatcaacctaccgctgcctgatccttcaagtgtctttggaatttttacttagggcactgttgggtaaggcagtgatatagtacatatgtagcaattaggctagaggctgttttgcggaacagcatgattttatcatgccgttataaatttatgctgtgctctgtgtatatatatataaaatgtctttttttcccctttttctccatccctctctgctcctggcttgtatattcacataactgggcagcagcaggacttcatttatcacaggcagtgggagggggtacagagctatgaaagggttactgttcacatttcctgtgtagttccttctgatcttactgagttgtaattcctttcttgatgttaaacattcccaggctccagtaaccttctggcctgcttgcactggccaagtgtgtcccaggtgatcttgtaggcgaacctcctgtttttaagacaagaaatcgctccttccttcatgagataggctaaatattcattcctttgcagtcccagaagaaatcctttaatttaaaacaacaccagagcagtaacatattagttttaaaattaaaatttagcagccatatttgttgtcaggttaattttgtagatttttgaatctattcattcgtagtttagtgactttctggttgaatgaaaccctattgccatattaaagattacatcttttcttcttaaaacacactttaaaaatgagttttaattctaaaaggataaattttggccctaccatcttacttttagcctacttatcagtagatcattttaagttgcctcagatgcaaagcagcttaactgtaactacaatatttctgcttttctttactagtcagctgttagaagtttgtagttgagcgttggggagatacttatttcctttttctctggttttaaaagtatatactggctcttcttttccccacaatttaaagtatataaatttttgtggttggcaaaaaggctttctgtttttgccttttcctctaaagttttagaagaaaatattacgccatggagcataagaatgggtcagcagctaatttacagggaaaaggagtacttttgccaatgctgccttaatctcaggtaaagagcttttgtttggacaaggctccaagggtaagtttattcttactgcttatagcacatctctttgtcctcagtcatcaacttgggaacctagggacttggggactgaaacgaaacagtatctctttgaaagagtttctaggataattttaagtttgctagtgtgtaggcaaagtaaactgtctgcattgctctaagcaatgagataaaatatttttagtgtaccttaactgtctggaatacagttttacaggggggtgggtagatgaatttttggattaaatctgtctaaatctgctttaaagagccaacatgaattgctgatattaatcatttacctttagttccccagtgcctaatacagagcctgtcacacaataggtttcctttctttctttttttttttttttgagatggagtcttgctctgttgcccaggctggagtgcagtggcgcaatctcagctcactgcaaactccacttcccaggttcaagcgattctgctgcctcagcctcccgagtagctgagactacaggtgcgtgccaccacacctggctaattttttgtatttttagtggagacagggtttcaccgtgttagccaggatggtcttgagcccctgatctcatgatccacccgcctcggccttctaaagtgctgggattacaagcatgagccaccacgcccggccccttgattctttttaacagcaaaagtttgcctatttaaaatcatttttttcttttttttgaaacaggagctcactctgtcacccagactgtagtacagtggcatgatcatagctcactgtagcctcaaactcctgggctcaagtgctcctcccacctcagcctcctaagtacctgagattacaggcaaatgccaccaagccctacttattttttcattttgtagagacagggtctcgctatattgctcaggcttgtctagaactcctgttctcaagtgatcctcccaccttggcctccaaagtgctgggtaattttaggcagtgggttttcaataatggtttgttgaatgaatgaatgagactgccagattacttttgtagattctattttttttacagtattgctaatagtaaagagtgatgcatttagtacgtacatctttgtatttttaaaaatcatttcaacttttattttagattcaggggttacatgtgccacaagatttgttacatgagtatattgtgtgatgctaaggtttgggttatggatgatcctgtcacctaggtactgagcatagtacccaatagttaactttttcaactcttgcctccctcctccctctctccttcctctagtagtccccggtgtctattgctgccatctttgtgttcatgtgtacgtaatgtttcactcccacttataagtgaggacatgcagtacttaattttctgttcctaagttaattcacttaggataatggcctccagctgcatccatgttgctgccaaggacatgattttatttttttatggctacatagtattccatgatgtatatataccacgttttctttgatggacaccttggttgattccatgtctttgctattgtacatagtgctgtcatgaacataggagttcatgtgtcttgtttgtagaacgatttattttcctttaggaaatgggattgctggttggatggtagttctgtttttaagttctttgagaactctccaaactgctgtccacagtggctgagctaatttacattcccaccagcagtgtataagaattgccttttctctgcagcctcaccagcatattatttttcgactttttaataatagctcttctcactggcatgagatggtatctcattttggttttgatttgcatttctccgatgatcagtgatgttaaacattttttcatatgtttgttggctgtttttatgtattcttttgagaagtgtttgtttatgtcctttgcccactttttaatgaggttatttgcttgttgaattgcttaagttccttatggattctggatattagacctttgttggatgcatagtttttgaatattttctcccattctgtaaggtctgtttatgctgttgatagttcttttgctgtgcaaaagctctttagtttaattaggcctcacttgtcaatttttttgttgcaattgaggtcttagctacaaattccttgccaaggccagtgtccagaatggtatttcctaggtttttttctcggatttttatagtttgaggtcattgttccatatgcatatgactgtgtgcatgtctacatccttcctgttaatctgtaatggtaggtcctgttcagagtccttttgtcattgaacagttaatttcctcacaacattctgtgcccaagtccttaggtgatctatacttggctgacctatccgtgacactgcttggtcatagaaaaaaagatttcatttagttatcgattaaagataatctgttaacatttcctgaacacttatattttcccccaggaaaatactaatgtccgtcagtcaacaaatacttgcagaatgctagtgtaaacagcattgtgcctggtattgtggactctccagagatgtgcatcaccttgttcctgccatctgaagtgtcctagacttctcaacgaagaggatatggacactaatcaagttaaacagcaacctaaagtatgttaaatatagttatgagctaagtgagaggcatggacaagaatcaggtagctttgaggaaggagaaatcatttttacttgaattagagagtgatcaaagatttaatggaagcttgaatagggcattaaacaaatagttggggtttgagtataaaagagtaaggctatctgacatttataagtaagggtgacagttatcacacttcctgtgccgagcagcaatgaagaaacaactaaaaaagagaatgcttgaagtgtgtggtggaaacttttcttcatcagtgacttatttgttccttattttctcctaaagtagaatttcagaaaagcttccacctaggacatgcagcagctatttcagctactataaggatcactttagtaggaaatcctcccagacttttcacccaagtaaaatttcagcaggaagacaggaataagatacactgaaaagttattgttcatgactacagtttgataataaaagcttgattcaatctcattggcaaaaaaaatttttttttttttgagatggagtctcactatgtcacccaggctggagtgcagtgctgcaatctgcaacctctgctgcccagattcaagggattcttctgcctcagcctcccgattagctgggattacaggcgcctgccaccgtacccggctaatttttgtagtttttagtagagacggagtttcaccatcttggccgggctggtcttaaactcctgaactcctgaccttgtgatccactcgccttggcctcccaaagtgctgggattacaggcgtgagccacagggcctggcctcattggcatatatactagtgctcactgctgagttatatcttgatttgaatcctaacatataaggagatatttccaagttcactatttttttacacgtagataggtggctatcgatatttgtcactatagataaatatcataatttgataggagtttctattaacctcttaaagtttctttttttttttttttttttttgagatggagtttcactcttgtcgcccaggctggagtgcagtatcacgatctcggctcacttcaacttccacctcctgggttcaagcaattctcctgcctcagcctcctgagtagctgggattacagatgcccgccaccatgcccagctaatttttgtatttttggtagagacagggtttcactctgttggccaggctggtctcaaactcctgacttcaggtgatctgcccaccttggcctcccaaagtgcttacaggtgtgagccactgtgcccggccaacctcttaaagtttctttcacaataaagcatgtactaatattacaaactattttagtcctattttttgttttgtaaaggagattttaaaatgaatataatttatattgagaccctttgattatatttacttattaaaagcaaacccattagtgcattttagagtcaaacatctacttgtattattttattatatagctaaaggaaaaataatgccacacagaaacgaaaccagtttttccaaaacagtaaagatggaatcttgagacagtctgctcactttaatttttattttatattttagtcttctggccagtagcaaattgatgtgaccttgtgcatgtttctctgaatatccacagttgttcagctgtatgaattgctgccagtgtgacaatgagccggaagctatatccaacttgcttctcacactgtatttttgtaaagacctagattctttcaagatattactaagtgatccgtgattaaaggttttggtggtttgctaattttaggaaaagtgggagcaatcacaatgtatattacgtagtgtatattggtattttatttaacccagtgtttcccaaatgtatttgaacttgggaacacccaccccctgtctttcttccttccaaattccttcctttcttactttatttttaaagaacacttactaaaatctcttatagaacaagtttcaggaatgtgcactatgaaactttcatacacacatgcacgttatttagatgtgttgcttatgtctttttctattaatctccaacttttctggggcataggttgggaggaagaaggaaagtgagtaacttacaagttttactagttattctgatgtcaagtttagtgggaaagaggctgaagcttatatctaaaataaggtttgagattgatctgagtattttaagagttcttactatctgtatcttctatagtttgttgctctgtacaagcaggagttgacagagcataacagaagttacctttatgggaaagagtaaggtgggttggaggtgaaataagacttttcgcttttgtaaccttaagaagaaaaagcaaattaaaagacctaaactgatggagagaaccagtactttacaacagaatttcttatttcaagcttttgtaagtactagcctctctggtagttttaaacgcattttgtttagaaagtaccaaaatttgtaaaactttttttttttttttttcttttgggatggagtctcactctgtcacccaggctggagagcagtggtgcaatctcggcccactgcaacctccacctcccgggttcaagcgattctgctgcctcagcctcctgagtagctaggatcacaggcgcacgccaccacacccggccaatctcttgtatttttaatagagacggggtttcaccatgttggccaggctggtctcgaactcctgatctcaagtgattcactcaccttggcttcccaaagtgcttggattacaggcgtgagccactgtgcccagccctattcttgtcttctaatacaggcaggttagaagggattctatcaaatttaaaatttagcactttttgtttaaaaaaaataaaatgcgattatacaatcaaagaacattaaagctggtagaagtttcacaaatcatttgtttcaggccaggcacagttgtgcacacctgtagtcccagctactcaggaggctggggcggaaggatcgcctgagcccaggagttcatggctatagtgcgctatgatcatgcctgtgaatagccgctgttctccagcctgggcaacatagcgagacctcatttctaataattttttaaaaaggtataataaattaaaaaatttttttttttaattttttttttttatttattatactctaagttttagggtacatgtgcgcattgtgcaggttagttacatatgtatacatatgtaaaaaaaactttttttttttttaagaaacaggcttatataaagtaagataaatctggtaagataagattaatatcttttgttctttatcttgtacatacctgttattaatatactatgccatcattgtctatttaagtgctaagtgagtaagtatatattatttttctctgtatctttggcacctaaccttgcactgtgcctggtacatagtaggcattcagtaaatgtttgttgatgtgagtgtcgggggtgggaaaacttaattttacagtcaatcctaggggaatacgttaatggttgaaatcttaaaaggattatgttattttgaaaacgtctttaaaatatagcctattttatttttatatttatatctatcttgtctaagaaaggatttaaggtggtattactaagtacacttagtacagtgggatcaaataaaatttaaaataaatgagtaaaagaacaaaattggaggatttatacatccccatttcaaaactcaatctaaggtgacagtattcaggacaacgtggccgtggcataggataagcatataaatcaatggagaggaattgagagtccagaaataaacatttacatttttggtccattgatttttggaagagctgctaagacaaatagagaaagggttattttttcaacaaatggtgctggaaaaattggatatcatatacaaaaattaacttcctcacaataacaatacacaaaaattagctgacaatgaattaggggcctaaatgtaagagctaaaattataaaacttctaaaagaaagcatagaagaaactttatgaccttggattaggcagagttgttaggtatgacaccagaagcatgagccataagataaaaaattgatgaatttgacttaattaaaattaacatttttatgctacaaaagacattgggaagaaactgaaaagataggctgcagactgggagaaaatatttgcaaatcatgtgtgataaaggacttgtatccaaaacatgtaaagaattataagtaaataataaggcaaacaacccaacttaacagtgagcaaaagaacagaatagacacttcatctgaaaagacatgagagtgattaatagccacatgtaagcacagtgagcatcattagtcattaggaagatacacattaaaaacacaatgagataccacaatgagattacatcccctaggatggctgtaataaaaaagacagtatatagtgtctaggatgtggagaaacaggaactctcatattatacattgttggtaggaatgtaaattgttataaccactttggaaaatagtttggctatttcttttaaagttaaaccaacttaccatatgtagtaaggttctccagagagacagaatgaatcaggtatgtgtgtgtgtgtgaagaaatttatttattgagacggagtctggctctgtcacccaggctggagtgcagtggtgcgatctcggctcattacaagctccgcctcccgggttcacgccattctcctgcctcagcctcctgagtagctgggactacaggcacctgccaacacgcccggctaattttttttttttttttgtatttttagtagagacggggtttcaccgtgttagccaggatggtctcaatctcctgacctcgtgatccgcccacctcggccttccaaagtgctgggattacaggtgtgagccaccgcgcccggccaaaatttattttaaggaattaattggctcagaaagagttgcagtttgagtctaaaggcagtcagctggaaaaccagaagagccaatgttgcagatgaagtctgaagggagtctgctggggacttcccttttgcccagggaggtcatccttttgttctattcaggccatcaactcattagatgaagctcccccatataatggagaaccatctgctctactcaaagtctaacagtctaaatgcagatcttgtccaaaattactcttgcagaaatgtcgagaataatgtttgaccaaatatctgagtgctgtggtccagccaaactgatacataatttttaatcattgtgccatataaactcagcaattccacttcttggaatctgcccaagagaaatgaaaacatatgttcacacaaagacttgtatgtaattgctcttggcaacattatttgtaatagatattaataaaaacaagaaaaaatgcaatgtccataacctggtaaatggataaacaaaatgaggcatatctatacattggaatactattcagcaatgaaaaaggaagaaaatattgatatatgctgcagcatggatgaaactaaaaaatatagtgttgagtgaaaggaactagactcaatagactacatattatatgatttcacttatgaaatttctagaaaagggaaactgattgagttagcaaggagattagaggggaactaggggttggagcaggaattgactgcatatgaactcaagggaattgggagagataatggaaaactggattgtagtgatgattgcatccatttagtacattctggtcctctataaatggactaaaacgtcattgaactgtcccctgttcaatggacaatgattaattttatggcatataaattgcacttcaatccatatcaaaattataaaagtagtacaaatggagtaaggatgggacacacattatatcttataaaagctcctatattttgcttgaggtggatcatggattttgctctaagctctctaagaagacatctctcaatatgaaatttcttttctgttgttcacaagatcaaaatttatcaatattttaggagaagcctaataattatattcaaaggaaaatgtattctttttgttatagtgcagtgtaatcaagtctgtccttaaataacatcctcatagtaaataactgaagactctcttctgaagacctgtttcttgagccccctttctatacagtctggtagcctaacatcaaaggcacattgataaatacagccctgttgagtgaatagggaggagatcagcaaaagtacaaggccaggaatgctattctttggtcgtatgactcagtcccaaaaatggaactacaaaagacctcgagtagccaaagcaacattgggaaaaagaacaaagctggaggcatcacactacctgacttcaaattatactacaaagcatttccaaacctcaagaaaaatataaatatccaggcacaggaaggtcaaaggtcatacagcctaccaagaccaaatcataatggaatagaacacctgagtacagcaataatgagtcacaaaattgaatcagtaataagaattagtccatcaaagaacagcccaaaccctgatgcttttcctgttgaacatttaaaatagtaataatgtcaattctcctcaaaatatcccaaagaatattaaccaatagtaaccaaaacagcatggtacacacataaaaacagacacataggacagtggtacagaatagagaacccagaaatccatgtatttacagccagctgattgatgaacatgctaagagcacacattggggaaaggacatcctctgaaataaatggggctaggaaaactggacatccatgtgcagaaactagatacctgtttcttaccaacatcaactcaaaatggattaaagacagactatgaaactattagaatacacaggagaaacacttcatgacattggtctagataaggtttgtatgggtaagacttcaaaagcacagacaaggaaagaaaaaataaacaaatgggattacatcaaacttaaagctctatacagcaaaggaaacaacagagtgaagagacaatctgtagaatgggagaaaatattagctaactacacatctgacaaggggttaacatccagaatgtgtaaggaatctgaacaactcaatagcaaaaagcaagcaaacaatctgaatgctaaagtgggaaaagatctgaatagatatttctcaaaagaagacatgcaaatggcaacagacatatgaaaaaatgttcaacatcactacatcagggaaacgcaaatcaaaacagtaatgagattatcatcttaccccagttagaatggctattaccaaaaagacaataacaagtcctggcaaggatgtggagaaaagggaactgttaatttacactgttggtgggaatgtaaattagtacagccataataaaaaacagcatggaagttctttaaaatattaataacagaactaccatatgatctaacagtttcactgtacggcttatatatccaaaataagtgaaatcagtatgttgttgaagagatacctgccctcctatgtttattgcagcactagttacaatagccaagatatggaatcaacctaagtgtttattagtgtatgaatggataaataaaatatgtcatatatacacaatggaatactattcagccatagaaaagaatgaaattctatcatttgcagtgaacatggatgaacccagaggtcattatattaagtgaaataagccaggcatctcatttatatgtggaatctaaaaacgtttatctcatagaagtagaaagtagaatagtggttaccactgggtggggaagagataggagagatgaagagaggttggtcaacaagtgcaaacctacagtcacataggaggaataagttctggtgttctatggtacagtagggtgactttagttaataataacatatttcaaaatacaagagaagctttgaatgttctcattaaaaaatgacaagtatcagaataccacactgtattccataaatatatacaattattatgtgtcaaaaataaaataaaactttaaaaagatgtcagtttggtcacacacatatttacgtaaacatagtttatcatttcactaacagtctctcttttatatttcatcacttatctcacattggtattttttatgttgtgtttgaaaatcactgctgtagagtaccataaagggtcttaattttctatttgtaatcccactcttgcttcaatcatgagaaagtgactgaataactgtgttaaatgaactgaaggagagcctgagcatgaatcctttggcttgattatctatgtacaatagtttatttagtaagacgaaaatggttataattgcagtgatttagttggagtatattgtgtttgaaaaattgtttgttttagaatatcttagagaaaattggcctctcagaaataattttaccttataatgaactttgcaaattgcttctgcaaaatcactaggttcaggtttctgctttcagttaggttgtagaaggtggtaatgggacattgtggcttctggaacaactaaaaaaaataataataagttacaaaaatcaacgttgtaataatatgttactacctaataaaatgccccaatattcagtggtgtgaaacagcaagtctcatttagctcatcgttctatgggttgaaaattcaggcaggtcccagcttggtgatttttggttgcatgtttcgttgactgagatcactgggtggtattctgctggtggatggaattctctggaggattcaagatacatatatacagggtgcctgggcagaggtggaaggctaagtctacatgacctttctagcatggtagtcttagcatagtcagacttattattgtggcttccggcttctagagagaattttcgtggagatagaaagtggacgctgccagcgtcttaaagcctaaaactgaaaaatggtaccatatcacttccactatattctgttggtcaaaggagtcacagagttcttccagttttagtgagagaagacataggcatgaccttccagtggaagaagtatcaaaacatttgtggccatctttaatccaccacagtccactatctggtcacaaatgattcagtctcttcctatgttccttatttactcacccacctccaagaatcccaaaattattttccaactcttctttaccctgagtcttaaagttcaagaacttgttatttacaacaagtacactgttcaggaatcttctcaggtgtagctgaagagacaactacccaacaatataatgaagaggcagtcatagaatagctgcagtaaacattcccattcacaaatagggaaacaggaaacatacagctttactggtccatagaaattttgatatactgatgttagttcttttattaggctattcttgcctcctgataatgattctccctggctcgaggttttgctctctcaatttagagtcatcctttttctgtaagaaatggtcattttttgcaactgagtagccttttcagcctttctgcctgtagaaatttgagagtccaaaagcctgttttcattttgcactatctctgtccctttcagtgcaagctgatataatgttttttaaaactttgtgggcttcctgtgtatcaaattgtagcccgctccattaatcagaggcccacccacatttattttagagaggcattttttttctttcatactgagtcaaggtattttgaaacaacacccataatattcctatgagcttttctgtctatttaagagtccaaagtgcacatcatcaagattcttagaggccttttgccttagaacagaatctaagtgtcatactcttaagattcttagaactgaactagatacgattttagtctttcagtctcaacaaggtgttttacagccatgctgtagagatttttatcctgaaaccacgctttactggtagtaggccccaagccttaatagtaattctgtaactctgaagctttttcttacatttctctctagagataatggggatgagaaactgtttagttttgaaaagatcaagtcctggttctttaaaaattttcctctaacttctacttgaaaatgaaacagttctttcatcagtttgtgtatccataacttatagatagctaaaggagaccaccactttcaacctttcgcctagaaatcttcttagccaaatttaccactttatgggggtatattttgtctttttttttaaacagtctcgcactgtcgcctgggctggagtgcagtggtgcgatcttggctcaatgcaacctccacatcccgggttcaagtgattctcctgcctcagccttctgagtagctgggattacaggtgcccgccaccacatccagctaattttttgtattttcagtagagaagggattacaccatgttggccaggctggtcttgaactcctgacctcatgatccatccgcattggcctcccaaagtgttgggagtacaggtgtgagccactgtgcccggcctattttgtcttttctatttcatgtgaggaacagtgttacaaacttcccactgcataagaagagttattcatctatccaccataaggttttcattaatgttgttcaaaccttcactaacagtcttcttaagtcacttccagcttctgctcacctctggtcccaaagccaatgccacatgtttgttttttttttgtgtgtgtgtgtgtgtatgtttttttttttattattatattttaagttttagggtacatgtgcacgttgtgcaggttagttacatatgtataattgattcttacatcattatgaaatatttctcaatactgctagtattatctcatgttttgaagtttattttattggctagtaatatagctccctccagttttcttaatgattagtatctgcatggtatctctttggattcttttacttttttttttaattttttaaattttttttattatactttaagttttagggtacatgtgcacattgtgcaggttagttacatatgtatacatgtgccacgctggtgcgctgcacccactaactcgtcatctagcattaggtatatctcccaatgttatccctcccctctacccccaccacacaacagtccccagagtgtgatattccccttcctgtgtccatgtgatctcattgttcaattcccacctatgagtgagaatatgcggtgtttggttttttgttcttgcgacagtttactgagaatgatgatttccaatttcatccatgtccctacaaaggacgtgaactcatcattttttatggctgcatagtattccatggtgtatatgtgccacattttcttaatccagtctatcattgttggacatttgggttggttccaagtctttgctattgtgaataatgccacaataaacatacgtgtgcatgtgtctttatagcagcatgatttatagtcctttgggtatatacccagtaatgggatggctgggtcaaatggtatttctagttctagatccctgaggaatcgccacactgacttccacaatggttgaactagtttacagtcccaccaacagtgtaaaagtgttcctatttctccacatcttctccagcacctgttgtttcctgactttttaatgattgccattctaactggtgtgagatggtatctcattgtggttttgatttgcatttctctgatggccagtgatgatgagcattttttcatgtgttttttggctgcataaatgtcttcttttgagaagtgtctgttcatgtccttcgcccactttttgatggggttgtttgtttttttcttgtaaatttgtttgagtttattgtagattctggatattagccctttgtcagatgagtaggttgcgaaaattttctcccattttgtaggttgcctgttcactctgatggtagtttctcttgctgttcagaagctctttaatttaattagatcccatttgtcagttttggcttttgttgccattgcttttggtgttttagacatgaagtccttgcccatgcctatgtcctgaatggtaatgcctaggttttcttctagggtttttatggttttaggtctaacgtttaagtctttaatccatcttgaattgatttttgtataaggtgtaaggaagggatccagtttcagctttctacatatgtctagccagttttcccagcaccatttattaaatagggaatcctttccccattgcttgtttttgtcaggtttgtcaaagatcagatagttgtagataggcagcgttatttctgagggctctgttcagttccattgatctatatctctgttttggtaccagtaccatgctgttttggttactgtagccttgtagtatagtttgaagtcaggtagtgtgatgcctccagctttgttcttttggcttaggattgacttggcaatgcgggctcttttttggttccatatgaactttaaagtagtttttttccaattctgtgaagaaaggcattggtagcttgatggggatggcattgaatctgtaaattaccttgggcagtatggccattttcatggtattgattcttcctacacatgagcatggaatgttcttccatttgtttgtatcctcttttatttcattgagcagtggtttatagttatccttgaagaggtccttcacatcccttgtaagttggattcctaggtattttattctctttgaagcaattgtgaatgggcgttcactcatgatttggctctctgtttgtctgttgctggtatataagaatgcttgtgatttttgtacattgattttgtatcctgagactttgctgaagttgcttatcagcttaaggagattttgggctgagacaatggggttttctggatatacaatcatgtcgtctgcaaacaggtacaatttgacttcctcttttcctaattgaataccctttatttccttctcctgcctaattgccctggccagaacttccaacactatgttgaataggagtggtgagagagggcatccctgtcttgtgccagttttcaaagggaatgcttccagtttttgcccattcagtatgatattggctgtgggtttgtcatagatagctcttattattttgaaatacgttccatcaatacctaatttattgagagtttttagtatgaaagtttgttgaattttgtcaaaggctttttctgcatctattgagataatcatgtggtttttgtctttggctctgtttatatgctggattacatttattgatttgcgtatattgaaccagccttgcatcccagggatgaagcccacttgatcctggtggataagctttttgatgtgctgctggattcgttttgccagtattttattgaggatttttgcatcaatgttcatcaaggatattggtctaaaattctctttttttgttgtgtctctgcccggctttggtatcagaatgatgctgacctcataaaatgagttagggaggattccctctttttctattgattggaataatttcagaaggaatggtaccagttcctccttgtacctctggtagaattcagctgtgaatccatctggtcctggactctttttggttggtaagctattgattattgccacagtatcagatcctgttattggtctattcagagattcaacttcttcctggtttagtcttgggagagtgtatgtgtcaaggaatttatccatttcttctagattttctagtttatttgcatagaggtgtttgtagtattctctgatggtagtttgtatttctgtgggatcggtggtgatatcccctttatcattttttattgcatctattgattcttctctctttttttctttattagtcttgctagcagtctatcaattttgttgatcctttcaaaaaaccagctcctggattcattaattttttgaagggttttttgtgtctctatttccttcagttctgctctgattttagttatttcttgccttctgctagcttttgaatgtgtttgctcttgcttttctagttcttttaattgtgatgttagggtgtcaattttggatgtttcctgctttctcttgtgggcatttagtgctataaatttccctttacacgctgctttgaatgcgtcccagagattctggtatgttgtgtctttgttctcgttggtttcaaagaacatctttatttctgccttcatttcgttatgtacccagtagtcattcaggagcaggttgttcagtttccatgtagttgagcggttttgagtgagattcttaatcctgagttctagtttgattgcactgtggtctgagagatagtttgttataatttctgttcttttacatttgttgaggagagctttactaccaagtatgtggtcaattttggaataggtgtggtgtggtgctgaaaaaaaatgtatattctgttgatttggggtagagagttctgtagatgtctattaggtccgcttggtgcagagctgagttcaattcctggatatccttgttgactttctgtctcgttgatctgtctaatgttgacagtggggtgttaaagtctcccattattaatgtgtgggagtctaagtctctttgtaggtcactcaggacttgctttatgaatctgggtgctcctgtattgggtgcatatatatttaggatagttagctcttcttgttgaattgatccctttaccattatgtaatggccttgtctcttttgatctttgttggtttaaagtctgttttatcagagactagtattacaacccctgcctttttttgttttccatttgcttggtagatcttcctccatccttttattttgagcctatatgtgtctctgcacatgagatgggtttcctgaatacagcacactgatgggtcttgaccctttgtccaatttgccagtctgtgtcttttaattggagcatttagtccatttacatttaaagttaatattgttacatgtgaatttgatcctgtcatgatgatgttagctggttattttgctcgttagttgatgcagtttcttcgtagtcttgatggtctttacattttggcatgattttgcagtggctggtaccggtttttcctttccatgtttagcgcttccttcaggagctcttttagggcaggcctggtggtgacaaaatctctcagcatttgtttgtctgtaaaggattttatttctccttcgcttatgaagcttagtttggctggatatgaaattctgggttgaaaattgttgtctttaagaatgttgaatattggcccccactctcttctggcttgtagggtttctgccgagagatccgctgttagtctgatgggcttccctttgagggtaacccgacctttctctctggctgccgttaacattttttccttcatttcaactctggtgaatctgacaattatgtgtcttggagttgctcttcttgaggagtatctttgtggcgttctctgtatttcctgaatctgaacgttggcctgccttgctagattggggaagttctcctggataatatcctgcagagtgttttccaacttggttccattctccccatcactttcaggtacaccaatcagatgtagatttggtcttttcacatagtcccatatttcttggaggctttgctcatttctttttattcttttttgtctaaacttcccttctcgcttcatttcattcatttcatcttccatcgctgataccctttcttccagttgatcgcatcggctcctgaggcttctgcattcttcacgtagttctcgagccttggttttcagctccatcagctcctttaagcacttctctgtattggttattctagttatacgttcgtctaaatttttttcaaagttttcaacttctttgcctttggtttgaatgtcctcccgtagctcagagtaatttgatcgtctgaagccttcttctctcagctcgtcgaagtcattctccatccagctttgttccgttgctggtgaggaactgcgttcctttggaggaggagaggtgctctgctttttagagtttccagtttttctgttctgttttttccccatctttgtggttttatctacttttggtctttgatgatggtgatgtacagatgggtttttggtggggatgtcttttctgtttgttagttttccttctaacagacaggacccctcagctgcaggtctgttggaataccctgccgtgtgagatgtcggtgtgcccctgctggggggtgcctcccagttaggctgctcaggggtcaggggtcagggacccacttgaggaggcagtctgcccgtactgagatctccagctgcggaggagccaagatggccgaataggaacagctccggtctacagctcccagcgtgagcgatgcagaagacggtgatttctgcatttccatctgaggtactgggttcatctcactagggagtgccagacagtgggcgcaggtcagtgggtgcgcgagccgaagcagggcgaggcattgcctcacttgggaagcgcaaggggtcagggagttccctttccgagtcaaagaaaggggtgacagatggcacctggaaaatcgggttactccctcccgaatactgcgcttttccgacgggcttaaaaaatggtgcaccacgagattatatcccacacctggctcggagggtcctacacccacggagtctcgctgattgctagcacagcagtctgagatcaaactgcaaggcggcagtgaggctgggagaggggcacccgccattgcccaggcttgattaggtaaacaaagcagccgggaagctccaactgggcggagcccaccacagctcaaggaggcctgcctccctctgtaggctccacctctgggggcagggcacagacaaacaaaaagacagcagtaacctctgcagacttaaatgtccctgtctgacagctttgaagagagcaatgttttaagattttattacagaattccacttccctttactagattctgttatggttctctaattctgtgtaagaaaatacctaaacacatcccctgaagacacagccattttattgtacctcacaatttgtgggccagagaaaagggcaggttcagctgatggttattctttttcatgtagcatcacctgaggtcacttggtggccttcaactcgagaatgagctcaatgcggtctggaggataaaagacagctgtaatcacatttctgtcactttggcaaagataacccaaaacctagttttatctgggactgtctaccagaggacttgcatgtagcttctctagtataacagtcctacagtagttagattatgatgacagtagcacaaaagacaggaaggaggaaatagataaattttattacaaagtttttatattttgtatgtgacgtggtataatatttgaagttatgttgtggcaggttaaatgtgcatattttaaacacgagcacaatcactaaagctacaaagatacaagtatatttataataggccagtagtggagataaaatggaaaactaaaaagtattcaatttcaaatatggcaggaaaaaaagggaaaagggaacaagaacagattgggagaaataggaaataacaagataattcattcagatccaaccatataaataattacattaagtttaaatgatctaaatattctaaagacagcaatcatcaggctggataaagtagcaagacctaactatactgtctacaaaatattcccttcaaatatatacaaagtggttaaaagtaaaagagtcatgtgttttttggctgcatagatgtcttcttttgagaagtgtctgttcatgtccttcgcccactttttgatggggttgtttgtttttttcttgtaaatttgtttgagttcattgtagattctggatattagccctttgtcagatgagtaggttgcgaaaattttctccccttttgtaggttgcctgttcactctgatggtagtttcttttgctgtgcagaagctgtttagtttaattagatcccatttgtcaactttgtcttttgttgccattgcttttggtgttttagacatgaagtccttgcccatgcctatgtcctgaatggtaatgcctaggttttcttctagggtttttatggttttaggtctaatgtttaagtctttaatccgtcttgaattgatttttgtataaggtgtaaaaaatgctcatcatcactggccatcagagaaatgcaaatcaaaaccacaatgagataccatctcacaccagttagaatggcaatcattaaaaagtcaggaaacaacaggtgctggagaggatgtggagaaataggaacacttttacactgttggtgggactgtaaactagttcaaccattgtggaagtcagtgtggcgattcctcagggatctagaactagaaataccatttgacccagccatcccattactgggtatatacccaaaggactataaatcatgctgctataaagacacatgcacacgtatgtttattgtggcattattcacaatagcaaagacttggaaccaacccaaatgtccaacaatgatagactggattaagaaaatgtggcacatatacaccatggaatactatgcagccataaaaaatgatgagttcacgtcctttgtagggacatggatgaaattggaaatcatcattctcagtaaactgtcgcaagaacaaaaaaccaaacaccgcatattctcactcataggtgggaattgaacaatgagatcacatggacacaggaaggggaatatcacactctggggactgttgtgtggtgggggtagaggggagggataacattgggagatatacctaatgctagatgatgagttagtgggtgcagcgcaccagcgtggcacatgtatacgtatgtaactaacctgcacaatgtgcacctaaaacttaaagtataataaaaaaaagtaaaaaaaaataaaaaaaaaaaaagtaaaagaatccaaagagataccatgcagatactaatcattaagaaaactggagggagctatattactagccaataaaataaacttcaaaacatgagataatactagcagtattgagaaatatttcataatgatgtaagaatcaattaattaaagagacataattttaaatgtctgtaagcctgatactaacagagccttaaaatacttgaagcaataatggacagaacagaaaagagaaatagataaagctattacagttagttttctcaacacttctctttctcacttttctttcagttgctagaacaagtaggcagaatatcagtaaaaaaaaaaaaaatctggaagagtactgtaaagtagaaaaaaatcaacaaaaccacaaaaccaaaagttgtttctttgaaaagaataacaaaactgataaacccctactaagaaaaaaaaagaaagttcaaattaacaatataagaataaacaggaaacattaatagagatccaggaaatatataagggataagaaaatatgatgaacaattttgtgtcaatacattcgacagtttaatgaaataaacagattccttgaaacaaccgtttctcctctttgacatgactaactgcactaacgttcttgttccatcttctcttgaatttgttccattatttagtactctcccttgaaaaatacagcataaaaatgactcaaaagaagtaaaaaatctgaatgctgctatatctgttagaggtatcaactccttaattagaaatctccccacctctagtggcattcgtcaactgaactgggtctcattattaagtccttgaatgtgtctagaaattcaaaaccactgtagctggcgagttctcccctcaacccaacccccatatagttttcttcatactactttctatttatttactttacatccctgttggtggagtttgaagggaccaattaattatatcacttttttattcttacctctgaactctttaagaagtagacttaagataagaacgaaaatgtcagttttgtttatagagaaactaggtaaaagagtacacctagctttgcatctagtcttcctaccccttcaaattggattgacttaacttgccctgtagtgtttactatgtagatgactggacaatgaatttgcatttggacaagcaagttctgagagtcagagactgttgacacatgtggccagtcttttgccgaaacagatgtgtcagaaagagggagagagattggtgttttgtcacctacaacttaggtgacgccctactcttatgctctctttttccaagcagtcgtgctcccagttcagatggaacccacaattagtccactgctgacttactttcagttccttatgtcatttggaccttatgctctattgtgaacaagttattagaactttgatcttctctcataactcttttcccttcacttccctagaaatttaaacctggcattcaaaggccgcaatttgtttgtttgtttgtttgtttgtttgtttgttttaccatctcaagaaaaagcatggcatttaaaaaatctaggttttaaaggaggcttgatgtgtacctttgctcaccagtatcaattcaaggctcagcatgccacctttgttccttagttccttttcttataactctttcactaccatctcccttttctaattcctgttactggttgacttccaggacactgctccaaattcttcaatgatgtcaccaccaggcttgaaagtaatgtcaacccacactatgtgactataatctgtttctccaaattcatattttgagtttctgatactcagaactcatagtgttttaactgtctcagttatgccaaccagaattgttccaatatcttaaatactaaaagcccctcttttctgttttcttcttctctggcaatttttttctcttaaaactcttaaattcaagtattttttccattcatatgctttctcttcatctctttttctcccttcttctctcctcctccctttccctctgtctcaatagatggtcttgccattgggtctgaattccctcaactttactcccttacacacaaatgtttgtattcatcacccatcctttcctctatttctaaccatagagaaacaactgtttcttctctttaacatgactaactgcactaaagttcttgttcccatcttctcttgaatttgttccattatttagcactctcccttgtatttcttcctgttactagcattaaaaatgaaaaaaaaacagcaccaatgacaaaaaccttgttaaagattcagcttcactttcaaagtataccagacttcttagaagactaaaatttattggttaattccactttttctccttaaattggaagtctttgtttacttttattgcctttctgaaacgtattccaaaggtcactagtgattggtaagttctcagttcttctgccttgaaaaggcaggacagggcgctctcttcttttgctcttctttcgtgacttcagtattttgtggaaggcctcttctaaaataaaccttttaggagatgtgcaaactgttctattgacttagtgcagcaaacaagactacacagatgattctgaaatgatgcctccttagagaaaatttgtataagatttttattataggttggagatacgaaattctaggacaggatatcagaaatgacgcaagtcatcggattgattgatttcttaagttcatggttcatgtaaacaatgcatgattctgattggaaagaaaggtctattgtggtctaagaatcctatgtttgtaaccatatcactgaatgttggtgatggtttcacgtctcagtcttgcataattgtttaggctgttattctgcttctcactttcaagtatatttcagagaattttaaactttttacttttattgcagttactctgatttcttctcatcttgactaccgtagtaacaaaatagatctcactgctttttgaattttctcatggtaacttacacttgaaaaccagagccatcttttaaaatacaaatttgaatgtgttttctgccaaacacccttggtgcctctttatgtataaaataaagccccatgtactgaatctagcattcaacctcttacagtataatctcagccccaaatcctagtccttatcgatctccctccccatttctctctttctctttgtattcagtccataaggcagagccttcccacattttccctgtagtaattatcgtgctccaaaatcccgtagcgccttgtgtcacttgtagcacttactacatcgcctcgatacagagtttttcatgtttgcctgttattgtggtttgtatttcttaagaacaaaaactgtctcttattcaatttcatagctccctgttccccatgatactgagtagggcacaaatgccagctaaattttaaataattcagtttaaatcaggcttaaatatctaataatatattttctagaatttttagcaggttgacataaaaatatgtgaagacaatatatctcctattttagaagtctttgagcacagcttgagatttttattttaggttcttaaattatacgtggtataagaactgtaaattttacagaacttcgtagaactcttttatggtctttcaggtgcagtcatctaattggctcctataaggtacctagaaattctttataattttgttatttccactacatttgttttcagataaaaatgaatgccatttcccatccagtactgaagtgttaaagttagaagacatttgctaagtcaaatcacttcaggtaagtctgctcacatctagcttggtaccagcttaagatttatttaaaatgcaaagaattaagtttactaacttggacatctcaactctcaaatttctcagcatatcttctagtcaccttgtatattgaatcactggtcttgggaaatagtggaaagatgatttcttattaaatttcacatgcttataaaaataaaatgttctggccaggcatggtggctcatgcctgtaatgccagcactttgggaggccgagatgggtggatcacctgagatcaggatttcgagaccagcctgaccaacaaggtgaaacctcttctctactaaaactacaaaaattagttgggcatggtggcaggcgcctgtagtcccagctacttgggaggctgagacaggagagttgcttcaaccctggaggccgaggttgcaatgagctgagatcacgctactgcagtccagcctgggcaacagaacgagactccatgtcaaaataaaataaaataaaataaaataaaatgttcagttttaaactcttggtgttatttgtctaagtgagactaacaccttaaaatcatccttgtatttgtatcaagtctagtcgttaagtcctaagtgccaaacaatgcttttgcgttgtagctaatatatatatatagttttttaaggctttatacaacttttctaagttatttatatgttcttatttaaagaaatattttgttaattaactagcacttgaaccttaaatgtttattaactgtttgtgtaaaaaatctttgaaaggtcatcttaatcaccctcaactcttatagtgatctcctaataatctttctgtattcattctctcttcccctgtcctgtgttcattgttagataaacctgcatatagaaccacttttagtaattttaaaacgctttaatggcttccaactccctcttggatggaatccatgttcgtttgcctagcattcaaagcctcccacgaagatcctgaaaatgtaccccacttgagccaactgggcttttcctattctctgaactctcattgttcttcatgcatctgtcttaacttgtactggttttcctgcctgtgatgtcccctgctgccctgacactatttcctctgcacgttgaaaccctgtgcaagcctctctatgacacgttctctgattactccagctagaagcactagctctttctctctctgccagtgtcatctaatgttttgtttgtatcaccgttgtggcatattttaccgtgtagctttattgtttgtgtttatgtttgtcttatctcccaccctagattgtaaggactataaaatccaagatcttgtctgatttttgtttcctacagctttcaccatagcctttaatagtgcttagtaaatatttatgtaataaattaagagtgtgctggctttttctctcatcatttcctttgtctttcatccttataaatgcatatgttccatattcttggcaaccatttttgttctgcactcctggttgccatcttctcctaggaaaatactgaccttagtgcagttaacaagatacagtcagttcctgacccaagaaatgcactgtattccaaaagttcatgtctagttctgttgtttggaatgcagaatatatttttccacaaaaacaatgttataaatagtggttaggttctcagccagccctcccaagactatttaactcactggtaccagcaccactttcactatgggcagccatggtgtacaatgctgttttgtggagagattgtagctctggatatggagatatatctcccatgctctagaaataggacagaaagtttctgggcaggttgaacagtaggagagtctgagctggacctctgacagcattggatactctcccatcagaagcttcttggttttcagtagttacaggagagacttttacctgtaggttgctgatactctcatgtcacctaaattgagggcaaagggacacttgctcttctgatctttcccacagttgattaggatggtaaatggggttttctctatcctttcacatgggtgggttgtttttaagtcaggtattgaaagatcagggactgtttcactaattcctccttttggatgctatacaaacttatgggaattgaatatataaacatggaaaatacttctatctatagggagaaaaacacatttacaggtatcacccctgtatttgacatcacatcagtttttgtggacaagggattatcatttacataggcataatgatgcttctagtgagaaacacgtcagtatgcacataaacaaccctcaaggttgacgattgaggttgtcatgctgtaagaaaaaacacttcataaatttcagagaatttaatttattcagtcataagtattgagcacatgagtgtctactttatgcttaatactgtggtcaatgctaagggctaggaagtgggaacaaaagatgttatagtttgccttcaggccaggagcagtggctcatgcctctaatcccagcactttgggaggccgaggtgggtagatcacaagatcaggagattgagaccatcctggctaacacggtgaaaccccgtctctactaaaaatacaaaaaattagccgggtgtggtggtgcatgcctgtagtcccagctactcaggaggctgaggcatgagaatcacttgaacctgggaggcagaggttgcactgagccaagatcgtgccactgcactccagcctggcaacagagtgagactccatctcaaaataaataaataaataaataaataaataaataaagtttgcttccctgggaagtctgaaatatagggagcaaaatattaaacattcacattgaaaacaatatatgattaattgccataaaatgcttcataaacataaaaaatgccttttggattatcagaatggaatatcatatccccatggttgtaaggatactggtgggatttcacttagctttagaagaatagtgctagagctaggccaggcatggtggctcacgcctgtaatcccagcactttgggaggccaaggcgggcagatcacctgaggtcaggagtttgagaccagcctgaccaatatgatgaaaccccatctctactaaaaatacacaaattagccaggcatggtggcgtgcacctgtaatcccagctacttgggaggctgagacaggagaatcgcttgaatccgggaggcagaggttgcagtgagctgattgtgccattgcactccagcctgggcaacaagagagaaactccatctaaaaaaaaaaaaaagagctatagaggaaatgatattccaggttggattaaccgcatgaatagagaactggcaacacaagcaaacaaagcattactgagcggagcagagtggttaattcatgttggctgaaacaatgggggtgcggggcagggaattagaccgctggttcaaccctggcagtagataagagtcatccatagatatttttaaagatattaagtccctagatcttagcccagaactagtaaatagagtttcaggggcatggaacataaacctgtttgttttttaaagctcccctcgtggttctgatatcatccagggttgaaaatccttgaattagaagaatgggccaaatttaggagaaccatgaatgccctcctgaggagttgagcctctgtccctcaagcactgggaagactatagaggtttctgagacaggtgacatgatcaaattggtgtttgccaagataaatgatttgtcagctacatgtgaatggaagagaaataagaaacagcttgaattagagcagtggtcgtggtaataaagagaagagccacctttttaagtgtagttagatgtgtgggagctggtgatgtcagccttgacctcagcatgatctgttttataaactgattatacagtttcaccctcattaatttgatctctttactcattcagcctggcaacttaaatagtaatttcagccagtttgcatttaatggaaggagaccattgtctactcatgtacccgtctaactcataatagtaagtgaagttatgtgtatgaggaatatgacctttaacataatcattataaagcatttaataacctcccacatatgcaataacacaaccccagtcctgtatgattgtgccaagagccagaatcacatgtataaagtagttattagcacacagttccctagcattaagttgaaatttgaagaaatgttctaaatcatgttatgcattttaatatttttagcattaaatttgataattacataattttctgatgttagacccaagcatgcctcctgactacagcacctgttcttactctgaatttatgcttctctttggcaaggaatgcagcccctcaccctccatttgggcccatcccctgctggtgtcaatccattagcacccctgccctaggctcatccaaagggataactgggccagcagagaggagttgtaaaggagtcagaatttcttttgtggcacagacacacaaaggatcttggtggttcttttgcttctggtccaagaggaacacgatagctgctaaggtacacacactgaggagtcccaagtctcaccacaggtgagaaacatttcatatctctttgatgtgtttaaaatttttttatgtttggaggcaatgaaccacattaattagagagcagagaataagttcaaagcataaaggtttgacgtgacctgcctccttttaaaaaaaagctcaacatcataaaatatttaaaaacagtgacttttttggcaattctttaatagtacacatgtgacaacagtttctaccatggtcttcgtccatgacaatacgtttattgttgttttattaatatctccacatcctatgaattacatttttttttgagacgatgtcttgctcctcccctaggctggagtgcgatggcgcaatctcagctcattgtaacctccgcctcccaggttcaagcgattctcctgcctcagcctcttgagtagctgggattacaggcacctgccaccatgcctggctaatttttgtatttttagtagagacggggtttcaccatcttggccaggctggtcttgaactcctgacctcaggtgatctgcctgccttggcctcccaaagtgctgggattacaggcattagccaccatgcctggctgagttacatttctaatagctatttagatttctgctaatcacccaaatgcttaaccagaaagtggatggtttgtttagatttgagggattctgtagtagagagggaagagaaagggggtaacatttatcaagtgcccactttgtgccatgttctttacatgtatttttccactttaactccattttgcaaatgagcaaatcgggctttagaggtttaaaaaaaccgaagtcataagtcgagttggcaatagaaactggatttgattacaggtctggctgtctgactgtctcatcatcctggtcttagaaatcttcatggcttttatttgtgaggtaagatcagtgaactcagaattaggaggtttgagtaccggcttcacctcttctatagtttggatgtttgtcccctctgatatggtttggctgtgtccccacccaaatctcatcttgaattgtaatactcgtaatttccacatgtctaaggagagacctggtgggaggtgattggatcatggggcagttcccccatgctgttctcatgatagtgagtgagttctcacaagatctgatggttttataaggggctctcccctcctcactcctcatgctttctcttgcctgccaccatgtaagacgtgcctgcttccttttgccatgattgtaagtttcctgaggcctctccagctacatggaactgtgaatcaattcaaccttttttctttataaattaaccagtctctggtatttctttatagcaatgtgagaacagactaatacactctccaaatctcatgttaaaatttgatccccatgtttgaggtgagacctaatgggaggtgtttgagtcatgggcgcagatccctcatgaatgtcttggcaccctccttgctctgttcgtttccaccaagagctgttaaaaagagcgtggcacctcctcccctcttgcttcctctcttgctatgtgatctctgcacatgcagctctcccttttgcctccagccattagtggaaacagcctgaggccctcaccagaagccaaacagatgctggaactatatgccttctgtacagcctgcagaaccatgagccaaagaaggctgtttttctttataaatcacccagcctgacatatttatagcaacactaaatggactgagacaacctctgtcactaacaaccttgaacaagttatttaacaccactgagcttgagtttcctcatctgtaatatggagataaaacctgctttaccaaccatttggtgttgtggtgagaataataagctagggagtttccaaatgatttcataggtatgaaaaccaatagaactttcagagatgtttaattcaagcaaaatacaacaataacaacaataaagattaaatgagatgatttggacatattttatggtattttacttcctagcattgctctacaaacttactaaaagtaatgttggtcagatttgtaagttccaaacactgtggtattccaagctgtctcactgtgcatttaatacctcagtgtagtagataatgtcctggcaacatatcaagtacctgttttcacttgccagaagcaatcattagtttctataccatagcaaataggtctgaactctgatagatactgaagaaatgtttgtagccaatgagactactaactagagatatggcttattggattagagttgatattaacattctcagaacaatttttcttacatttttgaagttttagaacacacctgaggaataaagacatttcgtgaaactgtttttacaaaactgcttttcaaaaatgtttacaagtttctgaacaagttttataggttacaatatggtgagtactgcaagacagttatgagctattaatatcaacttacaaatgcttcaaatatatgtatacaagaggtaagaagtttggggaactcaataaattgtaaggatagtgctgtgaatgaagtgacagtgagcctgagaaatgttaaagtcattttcctagccttacacaaaacctttacccagttaaagctctaagtcttttctacatgggacaccaaataacgagtagaggagcagtattatgcttcagatacacagatacggatcaaggagagtgcacccatttgggcttggattcctgagtgcgtgcaactcttctgcatctgccaactcggtacatcccaaagagggttccccagtcctcaagtgctgatttctttttttttttttctttttctttttttgagatggagtctcactctgtcgcccaggctggagtatagtggcgcgatctcggctcactgcaatctccgcctcccgggttcacaccattctcttgcctcagcctcccgagtagctgggactacaggcacccgccaccacacccggctaattttttgtatttttagtagagacggggtttcaccatgttagccaggatggtctcgatctcctgacctcgtgattcacccacctcggtctcccaaagtgttgggattacaggcgtgagccaccgcgcctgtcctcaagcgctgatttcagtgtggctcccagtgcccccactgtgcctgctttctatatctggtagatgggtagctgcaattggggccaggtcaagtgaagtgtaaggggcagtagacatggaaaacaaagaaaacatacaacagagattgcaaaaatctggacctcttgacaagtttggtttataaatgtgttttctgtagcctgcatagcctgcgtaatgttttttattttaattattattaattttacagacagggtctcactctgtcacccaagatgaagtacagtggccttatcataactcacagtagccttgaactgctaggctcaagcgaccctcccacctcagcctcctgagttactggaattacaggtgcaagtcatgatgcctggctcttttgtttttaaagcataaattgcttgttaacaagtattattttgactagtaactgatataatttgttgttaaataatttaatgcacaaatccatatttccacattctcttggaaactggcaactttggtcctgctcttgcatgtggcagtaaccagctagagctaagtagaagctgcctctattagatgggaggctgtgcttttacattataggttgtaacctataacacccctggctgttgtttttctttgaacagaatttagaggaaggtttaaatgttacttataccaccatctgtgttaaaattggaaatagcaaattgattggatgacatatttcaatataagtgagagatggtattaattttctaggactacataagcaagtactacaaactgggtggctttaaataacagaaatttattctcttatagttctaaaggctagaaatctaaagtcaaggtgctggcaggaccatgttccctcagaggctcatggggaggattctgccttgcctcttctggcttctggtagccccaggcattccttgccttgtggtagcatgatgccaatctgattccatcttatgagtgtcttccctctgtgtctgtctacatccaaattttcctcctcttgtgaggataccagtacattggattagggcacaccctaacctggtatgaactcattttaacctgattatatctgcagagaccctatttccaaataaggtcatattcacaggtactgggggttaggacttcaacatatcattttggggtcataattcaacccataactgatggcatatttctttgtagagtgcagagtaatggttaagggcagggttccttgaggcagagtgctgcattcaacttcacaacttatttgctatgtgatcttgggtaagctgattacccactgcctcagtgctctcatctatgcaatgggatagtggcacaatcctgtaaggttattataggattgcagtaaggacaaaataagttaacatatataaagcacttagtacattgcctggcacatactatatgctcaataaactgaactattgttattattagctcttattcatatgtaatttaaatgtatacaaggagtaccagtgccaaaaactattatttaagatagcattatgaaaccatggaaaaaccagggatagtaggtagaattgttgcatgaaaaaataaaaagagagagactagaattttaataagtttttttttaatgcatacaactgtaatactttaaaaatgttagcctgctcactcttttagattacctgcctggcccctatatgcacttgaagctaactgaagacccaaagaacttcaaacccagaagcttagatattgcctgttgggttgctgagcacaatggcctgtaggtaataatgaaggaagttactccagggagagtgtccaaggaacactgacttctaagtcttcctacttgtctccttgggagcacgttattaccctctaccttctccttataaatctttagattaaaattatcctggtccccagtctctgggtcagagattgagactgaataattctttgaatttaaattatacgtttcctcccaagggaacaaatattttgagatatattatttcatttttccacatagactttacataaaataattacacaacttgatctttattaacaatctgagagctctgatagagaaggtgtaaagaattggcaagaatgtttgacgtacctggaagaaaactgttcagtaggttagtggctattgggtttttcgtactatagagtatacatacacttcattctcaaagatactgctaccttgaagacgtgaatattcaactaaagtcaaaggatttgacctaaatggtgaaagggacacatgcaaacgttatttctgatttgcgattttattggaataaaagaagttagggtatttaatttggggcaaaaaaaagtgttatttctgttgttcaagtattagtaattggaacatttagattcaatgatgtgttcatcaggactgcttcagttgcaaatgaaagaaagccagctcaaaccagtttatgaaaataaaggaaacttaattgtttctgtaactatggtttccagaggtgcatctggcttcaggcatggtttcagccaaaaactcaaatgatctcatttggactccttttcctctgctggtttcattatttgtcatttttcagacaggcatggtcagtaagatgaccactagcagctcaagatggttgtccatccaatttagcaatctcaacagaaagagaacctgtcacaccaaatgtctacctacctgcctcagagaagatgtggattgactctctttgacctcatgtgtcactgtggcctgggaatggggtaaactggtgggccacccttggtatgttttcccagtgctccagtagaggggcatagcccagtgactgcaagccccgtgagggtctcacagagtaggagaggctttctccaaaggaaccagaagaaaaatgggaatgtgtgcttagcagaccaaaactgtcctgacttcaaaccattaaaaatggtatgtgaaatcattcagatggcagtttctggttttaggaaagaaccatttgctttttttttttttttttttttttttttttttgactgagtttctctctgtcgccaggctggagtgcagtggcatgatctcggcttactacgacctctgcctcctggattcaagcttttcgcctgcctcagcctcctgagtaactgggactacaggcactcaccaccatggccggctaatttttgtgtgtgtgtgtattttagtagagatggggtttcaccatgttggtcaggagggtcttgagaggtgacaacatgccagcagccctcgcttgctctcggcacctcctcaggccatggcgtccactctggccacgcttgaggagcccttcagcccactgctgcactgtgggagcccctctctgggctggctgaggccagagccggctccctctgcttgtggggagatgtggagggagatgcgcgggtgggaaccggggctgcgcactgcactcgcaggccagtgtgagttccaggtgagcccaggagtgtcggccctgggcagtgaggggcttagcacctgggccaacagctgcggagggtgcaccgggtcccccaacactgccagcccacccacgtcgtgcttgaattcttgccgggtctcagccaccttcccgccaggcagggctcgggacctgcaacccaccatgcctgagccccgcactccccccccacccccgcccccaccaaatgggctcctgccaggcctgagcctcccctacgggcaccgccccctgctctgcggcacctgctcccatcaactgcccaagggctgaggagtgtgggcgcgggactggctgcagctccacctgcggccctggcgagggatccactaggtgaagccagatgggctcctgagtcagttggggacttggagaacttttatatctagctggaggattgtaaatgcaccaatcagcactctgtgtctagcttggggtttgtaaatgcaccaattagcactctgtgtctagctaaaggtttgtaaatgcaccaatcagtgatctgtgtctagctaatctggtggggacttggagaacttttatgtctagctggaggattgtaaatgcaccaatcagcactctgtgtctagctcagggattgtaaacacaccaatcagcaccctgtcaaaatggatcagtcagccctctgtaaaatggaccaatcatcaggatgtgggtgaggccagataagggaataaaagcaggctaccgcagccagcagcagcaacctgcttgcatccccttccgtactttgtttgtgaaagctttgttctttcactctttgcaataaatcttgctgctgctcactctttgggtccacactgcctttatgagctgtaacaatcaccgcgaagatctgcagcttcacttctgaggccagcgagaccacgaacccaccaggaggaatgaacaactccagacacaccgccttaagagctgtaacactcactgcgaaggtctgcagcttcactcctgaaaccagccagaccacgaacccaccagaaggaagtccgaacacatctgaacatcagaaggaacaaactccgaacacacgacctgtaagaactgtaacactcactgcgagggtccatggcttcatcttgaagtcagtgagaccaagaacccaccaatttcagacacagtcttgatttgccgaccttgtgatctgcccaccttggcctcccaaagtgctgggattgcaggcataagccactgtgcctggccaccacctgctttcttctattaaaatcttagcataaaacaaaggaaatagaaacaaaaattccaactctttttgtcagaggtagatctcatcagttaccttaaaccataaaatctgaaacagaaagcatatgatacagtaacttagtaccagaagggcaaaaccaaagcacctgcagaggagacgacagtgatatcaggaggttgaaggaggaagggaggcatggtgctaaaaacagatgttcagctgaaagtctgtgaaaggaccagctgaactcccaggtcttcacctcactccagctggacagcaatgttccccaactccacgagatgaggggtttgttctctgaaaaaattggaactacagagaatctagaccaggactcggggacagtggagggtagagttaactgaatgtctggtctgatcttagagcagcaggcaaaacaaatgtcaaaaaaaaagtgctttgaataagaacaaataagacttttaaatatcagtactcaaattgatagcagggtttgcagaatgtttgctttttttttttttgtccaaacgttgtgatttgaagtgacaaagtttgggtcctattctctttgaatgtttggcccttatatttatatttataaataagtgtaccactggatcatgataaataacaaagtttcaatgtagagtattagtttttgtcttccctttcgtcagtgaagaagacagaatcctgaatgttattttcttctgaaagttagaggagacatcaaaagttgaaatttagcaggcatatttttcagattttaattactagaaaaaatattatttttaggattcaatgactattattgactatgtaactaataaatgttattatggtacttttagattaaaagtctattccaaattgcattttgatttttcagatgttctaaattctagtgtgtaaatattataaaagtattgacattttgaagtgggtggagttccgtcgcctctctttggattagcttctaaaacttaatgaaatagaaagtaagtgtcttttcccactgaaaaaaaggttacattttattccttattgtacggagacccaaataaaatagacaaatcagaaataagagtgccagaattttttcttgccaatgtaacttcttagaattatgctgaattgcttttgctgtaaaaactggaccaactagtctattatggatattttgtagagaatttctgtacttttttttggctcagtgaggtcaagaattttaagttagaattaaagaactggaaggcatcctcttattcatttcgcaaatgaaagaactgaagtcctgagaagtcatgatttatccaggatcacacaattaatagtgaaggttggatgaaataagagcctcctggccatcagttcagtgatctttgtaaaagacccttcgggtttattttcaccatcactttacgtgcaatgtctgtaatttactgcattaggccagttagcacattataagtttgtgtttaatctgctaaaactaagggaacatctaggattaggaatactgacagtgacaaaaatcatggatggcaggaagcatattgaagaatctttagctagggtgggaaatgttccttcattagcttctgatcctgctgtctgggaggaacttctttgtttattgttctcaggacctgattctgccttctggaaggttcttccttgcccattttcctccaaggtcatatatatgtggacattggggaacatgccctttgtggagactatatagcctttgtttccttctttctgttcttgcaattcagggagcttgagcattgttttaagggtcaaacagtcaaaggcttataggtatcacttgtgggggttttggcaatgccattcctccaaaactgagatggcttttgacctatcttgtagttagtaacatgtgctagcattggagtgactgtgtggatcaggctggcaaggcagccttggctgaaatctcttgtcttggcacgttaagtgataatactctcttctactctcaaaactaccccagtttagacaacgtgtattatggtcactctagtcaataagcacaccaaaaattcccaagtctaatatatttctttgtttccttatttttattctcttctctctcaacttaccggagactcttgtatggccatcggaaaattaacctacttaacttgatttgcaacaaggctgagtccctctgtttgcctgagaaaatataatgggccagtttttttcagtcttcttttttaccatgtgaattccagaagcagtcagctcttataatcctaggagctccccaaatttctgaattttctatttccattcatttctgccctcaaatctgtcagtgcttgcctgtgcacatttcttatttataatctttgataagtgcaacaagtagtactttgttgttcctttttttttttttccaccctgtcgctcaggctggagtgcagtggcacaatcttggctcactgcaacctctgccttccgggttcaagtgattctcctgtctcagcctccccagtagctggaactacaggcacccgccaccacgcctggctaatttttgtatttttagtagagatggggtttcaccatattggccaggctagtctcgaactcctgactttgtgatccactcgcctcggcctcccaaagtgctgggattacagatgtgagcgactgcgcctagccgtactttgttattctaatattgttcatctcttttctccatagacatggacttggtagacacttgttctgcttttgaagttgtatcaggcatttttaaaaattgagctataacttacatacagtaaactcacagctcttgtgttgagttcagcgagttttgacaattatgtacatccgtgtaactactacccaaaatatgatatcagacattccattgcccaagatggatgtccatttctagttaattgcctactttaaacctctggaggcaaccactttttcacttcaatcaccaaagattagttttggcaagcagtatttttagtaagtgttttatgactgtgtgacataagtacctttctatccttttctcagtttcttcatctcctgctgtttggctgctaagcagtcaccatatgttttagtttttttaatgtcagcatccccctcaaaaataccatttttcttgtattagggaaagccagctattatgataaatgtacccaaattgtataacagcttaaatccagttaaagtgcatttattgctaatgaagcagtgcattgaaggcattcttgatcatttggtgaccttccataatgtgggccttggagtcctctagcagctggggaaagagcatgaacataccttacctgctgcttctgaggaaccttaacctggaagttggcattcagtcattctcactgacattctattggggagaactactcacaaggccacatgtgatacaaggttggaaaggcttggaaagggaaaattttgactgggcaaccacttcccagtgacagctcccacactgtgaaggggatagcaaattttggacaggttaatgcgataacttttattttgttttaataacataatactatattgcatctcttttttgtcttcatgttatttctttgtctttgtattatacattcttttatactttctggataaacattttcagtatttgaaactttaaaaaatagtattgttatctctgtagtagaaatgttcaaagcaaaagcaagtaatcttccccagattattcagtgaaattaaaattagttctgggcatcaacagatataatctaactcttaaaagacaaagctgcccagtatcaccatttctgttcaatattgtgtcagagatcctagccagcagagtaagtcagggtcgggggtgaggggtgggggacaactacaagaaaagatgtaggaatggaaaaggagaaaaacactgtcattattggcaaatgacttaattgtctatatagaaagctcctaggactcaacagctaaattcttaaaattagagagttgagcaaagtttttaaatgtaaagtcaatatagggaacccaattgcgtttctatagacgagcagcaacaacaaaacagaaaatttaaaaaccactttattttgaaataattaacatcctacatagccgtagtatatttatcaaaactaagaaattaacatttatatactaatattaactaaactacagcttttattttgatttttccagtttttctactgatactttcttttcattgcaggatctaacccaggataccacattgcattcaatagccatatctcttaaccaatttaaggcagtttcttgatcttttcttgtctttcagggatttgatacttttgaagaatagtggtcaagtcttttgtagaaaggatatcaatttgagtttggtgttttctcattattatatcacatcatgtcaggcagtaaatgttatcaatattgaaacccacccaattatcccatagatagttttttggataaacagaaattgaccattctggtcttaaagctggaaactttattttatctgagttcctttctcaggaaatgaccttcaggcctctcaaaataagtatcaaagaactgaatctcaccagatcaccacatccaaacaaggaaatgccgcacccctcattcatcatgattgcctccttgcctctctagagttcctattttctcacacatcgttacatttcttccctggtatgtaagcccctagttttagtcggtcagggagatggattttagactgagctcccatctcctcggctgcagcacctgattaaagccttcttccttggcaacattcatcgtctcagtcattggctttctgtgcagtgcaacatcaggacctagaccaaacctctggtgtttcagtaacaatatgacttgttactggtcatgttaaccttgatcagttggttaagatggtatctgcaagatttttccacagtaaagttactacagaaatgtaatttttaaaagatataatttacatagcaacatactacaaataacttttgtagaaatttaacaagttatgtctaagtcctttattgagaagttacaaacttttattgaaagacattaatggattagaagatttaatgttgcaaagatgttaattctctcttattacacatagaatcaaatccctaacagattttgagattgtatgattactattaatattattatttggatgatacttgacattgtaattctgaacttaaatggaagagcaatcatcccaaaatcacatacagattcctaaagaaggtgtttttcctcctatcaaggaagtgcttttgctgcctttatataatgacaatataaaaccatagtagttaagccagcatatggtatgaggatatacaaattggcagatgaaaataatagaaaatttacaaacagatccacctatatgtggaagcatgattcatgacacaacaggtgttgaagatcattgggggaaagggtgcgcgtaacagctttcagtatatggtgctgaggcaatagagtgtccatatgaaaaagatggaaagtggattcttacctcatcatacacaaaatgggaaaagttaaaatgttatgttagtaattatagtttaattataaaatctaaaattatgcatttagaagcagagctcgggaaagaaattgaagaagaaaatgaaactgtcaaatgaaaacaacattggaaggagtacaagagaaaaagatgatacaggaaaaacagtgaggtcatggaaattagacatgagagaggtgagcaaagtcaaatatacatttaaaagagtgacataacacctgagctttaaaatgtcagtgtttacaatatgacagaaacactgcatcacctattaactttgctcatcctgctgagttacatgccagaaatcataatgtgatctacagattatttaataatgtttctactgacaattcaattatgccatcatttgtagaaagcaaaggactggaaatcacttaacttggagggggatgtgctatcactttctcagtttggagaaatttatcaaaaaggcttaactaagacttatcaaatgagtgttacacttattattcttttacttaggggcaccctgtttaacctaacatacttagaaagggttgtttaaaatattattaattccattgtgtacttggcaatgtacaatttttagacaatggtttttctttttctttttttttttttgagacaaagtttctctcttgttgcccaggctggagtgcagtggcacaatcttggcacactgcaacttccacctctctggttcaagtgatcctcctgcctcagactcccaagtagctaggattataggcatcctccaccattcccagctaattttttgtatttttactagagaaggggtttcaccatgttgtccaggctggtcccaaactcctgacctcaggtgatctgcccgcctcagcctcccaaagtgctgggattacaggcgtgagccaccgcttctggctgacaatggtttttcttaatttatacctcaaatatatttttatcaaaaccttgaagctataaatgtagatcactcaatttagggaaaatggttgccatttaatctaattgacaaagctggtatttattttcaaacttatcttttaaatcagacatccttctgtcagtaaaagtcccacttgatttttcatctcaaataaatatgttaatatatgcctccatgacaaccatcacatggctgaattctaattctaatatagattaagtagataaggcacagagccttaccatgtgttgcctggatacaataaggtactgctgccttcagtgtttctttgctttgcgctcactgaaatctccagagagatacgtctttaacactaataagagtatagaagaggtaatccctgtaagtaaaatgtcctcactgtgtattgtggaactgcttcattctacaatacactcaatttatcatataataatatgggccaagtactccatttcttaataaaatctgtatgagacatggaaagaacaaggccttactatagtgctttgattaaaggaggtttcatagatagcattgttataatttttccccgtttttggaaccctggaggtttttacatcccaggaggtatgcatttcttttgtgaagtgagaagagaggccgcatgatgccttagctgccagtacactctcagaaagatcggtattgggaagaatgagagttgaggacctggaaatagattgccttaaaactatctaggcctacatatctcttaagaagcattagagcagcctcggatgttcctcagttttaagaccatgggtgtagatgacaggccaagtagatccatcatacgcataatcatagacccaacaaaaagtccaaacttaatgaaagaaaaccagtgtttagagcataaacttttctgaaataagtgacaacttgaatctaaacattgaaaggacactgtgtgcctgggtctggtaaagttgctggacctcagagataaaattttgggagggagccagaaaaataggtcaagatatttataaaggagaaaattatgttggcctcagatttcattcagtgcaagaaaataggccatacttaaaagacttttaagaaaaggataggtaacttacagatttttatatctgtccaaatagtccttcaactataagtcaataggcaaatagctttaaatttaaaataatataaaaatgatttatttgagactttattgaggcaacactggaggacagatcttttttacttgacgttgaaaggtaaagatgtacttgaacctgctaatcaaccacataaatacacttgtttgcatacaggttcaacttctttagcacaaagataaagcaataagttatcatgatacccatctccaaaggttagttcattgatgaagtaaatagaatcttgggcatggtgtttgcttgataccgtgaatgctgttaccaaaaatcttcccaagaaacattaactttgcctctttctaggtaaaacaaattaaatctgtaaaagatcttatatgcttgagttagaaaaaccctgaatatatttgggttggtgacaaaagtgaaatataacacccctgccactttgaacaaaactacattgattgtgaactgtagtaaaatatgtcatataatcctttttgagaagccatctgagaaagagtattatgtttttcttcagtggtaaagagttgcagtatctaaaccaagttttctactggctacactcggctatttctattcttgacctctatggttgacagcagcagatgagaaaaatgaagtctgtaataagtttgtctgtaagagagctgcagtgctctttataactgatcctgcagccagggtgcaggatacccaggtcatgatttgggttctttagttcgattgcccagaggataccaactcatattcccagggagatcaaactgccaagtaaaatgaggatggcgaagctgtatcaattttacttctctcaggagaagaaaaggatggtgtagctacctctcaagaagaggatacctatgaaagaaggaaaaattaatccagaaaaacttagggacatccagaaaataccagagccctttttagcccaagatcaaccattaaaaggaagacctcaaaggtatttcatttcctatgtacgttagtgtatctgataagtatttgaacaagttacctctacctgaatatgctgtgtctctttgtcttgctgtgacactttggataaggtctctgcagaaaatatagaaacaactgaccaaagagttgttaatgagaatacagctcttatctctcaccaatgactacatggaagaatttagagcctatttcaataacaatatgttgttcatccttcagtcagatggaaagagaccagaagcaggagagagagagtacatgcgggccaatgatgttagtaatgaagaaggagaggaagagaaagaaagagacagatgagatggaaaatggaaaagaaagtgttgaaaacagaggagcctcaaactcagtctgcccctaatactgatgaggcacagaaaaccaaggacatttctataaagttcatgaacacagatgaggaggctgaagatggcccagatgctgatttctttaaggagaaatagtactgtatgcttgggttggttggatctcgaagagaattcattgtaaaataaaaatttgtcagccgggcgcggtggctcacgcctttaaaaacaatacaaaaattagccgggcatggtggcgtgcgtctatagtactaggtactccagaggctgaggcaggagaatcgcttgaacctgggaggcagaggttgtggtgacccaagatcttgccactgcactccagcctgagcaacaaagcgagactctgtctctaaataaataaataaatataaaataaaaaattgtctgaatccagtgacaagaaaaaagtgaccaaaatcacacgcaaaagaaatgagaaattttaagtgaataagaacataattcttactgacgaagggaagtaggttcagcgctggccaccgatgcagaagtgcatcttaaaggatgctaaggaagaggattgtagtggtataaaccttgaaaaatcaaaagaaaggcttcaggaagtggaaaaatttgacaaagaagagtagaggaaaaaagttaagacaaagcatatggagaaaatacttcaaaggggaagcaaaaagagaggccagcaaggccaaagatgaagggaatgtcttttaggatctcagtggtaataatgggaaattcgattaattcactcttagatcctcgtacatacagatgtctgaagaatcagatagtgaagatacggaaaataaaattagtagttcaggaaaacccatagaaggaagaaaaggagccacagtaaagtggacaatgtgaaactactattataacaagttgcaaatgaaagaaggccaagtaggaatcctcagagtctctggatacagttctgtctctagcagaagacaaagagcttaaattttatctaagagcttaaactatatctgctcaaaatgaaagctaaatacttgctgctcttctcctctccttgaaacctgtgctcatgactgcgtgggtcagatgtcaaaaaagctttggagtagttaggtagcaaaagtcccatacctaaaagatcgatgcaactgcagactgaggtaatggtatgtctgacacctttcttccccatcagataatctacttaaaatgtgtgtggattataaaaattccccagcctgatttccagcatgtatattgttagactttagtccattcctttattttactgccaacttgtagaatctccattcatttttagaaattcttgtcttgtttaccatacagaatatagtatgtactatttaatattaaactttctcacgattttcatgtttttaatgtttccaaggagtgaaaatgcgatggaggcaccctgagaaatgagtatttttgaattgagatgatcattaatagaacctatttcctatttctaataaaagtagaacatttaggaataaattcaacaaaagacatgcaaaatctgtaagaacaacaaaactatactgagaaaaattaaagatagaaataaatgaagagagatgccatatggttggaaaactcaattaaatgacatttccctcaaaattgatctgtagattcaacataatccctagcataaatccacgggcctttttgtaaaattagcaagctaattctaaaagttacatagaaatgtaaaagactgagaaaatctgacgaatcttaaaaacataggtggaagacttgaatttgtaccataactataaagctgcagtaatccagatagcatggtgctgccataaggataaactaataaattaatgcaattgaacagaggccatagacccatttatatagtcctttgatttcaaacaaatccaaagcaaccaagtagggaaaggaaagtgttgcagtaaatggtgctgggtcaactagatatccacaagcaaaaatataaatctcaatttctgtcttgcatcatgcatataaatctatttgagatgaatcatactactaaatataaaaagctaaagccatacgaatttaagaaaacatcagagaatatccttatgacttgggggtaggcaaagatttcttaggatgtagaaagcaatcactgtaagagaaaagctttaaagaatagacttcattgaaaaaaccaaacttgtgtttatcaaaagataccactaagaaaacaaaaaacaagccacagactgagaaaaatatttgctaaatgtatatttgtcaaaggaatatatagctaatttatacagctccataacaaaaagcggaacaaccagaaactaaaaaggaatagggaacaaatgatttgaaaagacactttgtaacacagacactgcacaacggaagatattcaaatgattagtaagcatgtgatcagcgtcatttgtcatctgggaaatgcaggttaaaatgagaatgagaaacccaccatactgtctaaaatcagataggatctagagcaactggcattcttatacattaggtataccacttgaggaaaaagatctggcagtttcttatgaagttaaatacacttacccaatgattcagcagttctcctagatatttgcctaagagaaatgaaaataaaaatcgaccaaaaagattcttatgagaagtacatacataatatatgtgcataatatagcttcaatcatactagccagaaactggaatagcccagcttcccatcagtaagagaatggataaacagactgtggttattcataaaatgaaacactggcaaattatctgtgaggggaaaggatgagaaaagtcgttgcttctaggggatgggacgggaactgactgggaaggattttgaaggaacaaactttgggtagtggtaatgatttgggttacaaggtatatgcatttgtaaaaaaacttatggaatggtacacttaagattggtgcatttcattttatataaattttgcctcaagaaataaaaaagagctttaaaaatcacaaggaagtacttttttatgtccattagattggcaaaaatgttggagcatcctgaacttatcttgccctgctagtggttatacaaattgaatcaaccatataatacatttgcattaactaataagttgtgcatatatcaaccaagcaactccactctgaggcatagaaactcttggtaatctacatagagaaatacataatatgttccagaaagctgggaacaactcagatatccatcaataagagaagacacaaattgtgccacattcaaacatatcatcatggataagtctcatgaacagaataaaaccaagaaacttaagaatacttccaatatgattccaaccaatataactccatccaaaatcttgcaaaattaagcaagatattagggatacatatggtaacactataaaggaaagcaaaaacaacaacaacaaaaaaggatagctggagagaaggcatgggaaaaaggattggaattggaatgggaaaggccataaaggggacttcaaagttataagtaatgtattctctaaactggctagtgggaaaacaggtgttcattttactatttataacttgcacatttgttgaaaatactatttggtatgtattcagcatttaatttcttgagaaattagaggtacacttaaataatctttaaggatacttcttagcaataatacgatatgcaaaatatgagaagtaggctttctgctgtcactaattcagtcattcaagtgtttatcaaatgcctatacagcttgatatggatgtgacattagtggccttatttggaggccacagttttggtggctgtatcttaaaagcgaattagaagaactactgaaatctaaaatgattgggatttatattggtacagtataaatcttctgagactgtttctcagaagttccgccattattgcttcaagaagggaaagaaaattatggattttcacttatgtgatgggtaaatgaaaccatcagaaaagacagaagtaatttttttggcctttggaatgaatctcctccaacagaattcttttaaaataggatgggccagataactgagagggcccggctttgacctctttccactaatgctggttcagctgacttctcaaagcacacttttatgagttgaactgattattgacccatcaatgaatttaccttaaaaccaggtcatggagaatgactcccataatatattttcttgcaacttcactgtgataaaaattctcaggatgctgtggctaatatctagatcttaatgttatgttgaatcctaaacattttcaagatatttatagattttttcatctctgcacttcctgaaaaatctgtgaatatttttcattaaattaacttgccgagaaaattaaggttggacactgtggcttcctatatagtcctacatttgtagctttaaatgttaagggcttaccccaaccctttactctttataagtattcaaacattcctttggataacaaataataaattcatagtgctagatatccagcaagatgacagtctggttgcttatatgaagtacctaaatatacacaattgcaattccaaagccttattgcttcatttatcacaggaagtgccagagttctgcaatatcttgtaagaaaagctactcgacttgcatgaattctcataggaatgaccatgaatattatgccaatttcatcctaagtattgaagttaaggttctaaatgacatttaatagtatgatttattttctatcttaaacttcatagggcacaaagcaagatcctatcctttcatattgcttttttatttttaaagagtctgactgatgataaaaatctaagcttaaaaactgtcaaatgatttatgatatttcatttatttttcaaaggattggggtgtcaccagtaagcctattagaattgtaggtttaaagttccttgattttaaaaaagaccagctgcctaaacaagttttgagctttgtaatttaattctatgtgattttttttaatacttcaaagtaccaaagtaggcatttcttcttaggtcataaatagttgtttatgtcattatgatttcaaactttcaagtacattttaagatctactttttaaaaatattgatttttttttattgtgttcattacaacctcaagacatttctttctgtctacctaaatctccctttcttcatgggctgacagcaacaaaggtagaacatgaagaaactggaggaagcctccttttaaaaaattggaattctgtagtcgagtatatataatccagtgtctttgagaaatgctgtgaaaccactttaaagctgttttttaatgacacttttaagtttgggataattgtaaatttgcatgcagttacaagagataatatatgttccatgcaccgcttacacaatccccccagtggtaacatccaggatattaacactgatgcattctagatcttattcagattttcctagtttttctcgaactcatttgtgtgtgtatttatttagttctatctaatttttatcacatgtgtagcttcttgtatctactacagtcaagatgaacatttccatcacaaagattccatcatgttggccttttataatcacactcatctaccttcccacttcccacccctgtccctaacccctggcaaccactaatctgccccctgttgccataatttttccattttaaaaatgttatttaaatggatccttagatttaacttttttgatttaacttttttaatttaactttttcattctcttgagattgtctcgaaattaatattatttccttgagattcatccaacttgtgtttattaataacttgttcatttcgattactaagtggtattccattaaaatcaattttgatttttagtttatacgcacacataaaatgtgaagcaataatgcaaaatatcagtttaaaacgtgtttaggacattgttgaaattaacctattaaaattacatattttttgtcattttagtcatttggattggatttgtctatggcttaatatgctaagactggatgaatcatcacctgtataccgaacatatagttccagtgggaacattctattccctaactcattttaataaaaactgtgaggttggagatacaagagaagttccttgttcttattccagaagatttgctatttagttttttctttccttttacagcctgtgattacccacgtaattctcttcatataacctattgttacctaagtaattcttcttccccttgtgcctgtgcttgcttttccaactaaatgattaagtgtcttaatttctaggctgactaagatacttctttcctccttcctccctaaattcacttactctttctctaacctgaaagaaaggggtaagatgatgagtaccaagaataaaagtatttggcttcatctgggaggccagagaaggcttccctaaggaggatacatttaagcaaaaatctgatggatgaataagagtcaactaggagaagaggaggaagaaatagcattttaaacagagaaaagaaagggcatgggcaaagaccctgtggtgggaaggagcaaagcaagcaggaagaattggaatcaagccaagtggagaatgggctgagagaaccaagggaatatatggtatgaaattggactggagagggaggcagagttcagaccttatagagctttttaggtcatatttaataaagatcagtgcttattctaagaccaatgagaaacaaataaagggttttaagcatgaagttgacttgtccagatttgcaatctgtaaagatccttttggctgcagcgtggatggtgctttggggtaaagggtggaagtgtctcgactggttacaggccattttagtggggtacactggagaggatggaccttggggtaaagttatagtggtgcagttatagaaaagataacagatttaatccttaaatcccaacagatatgttgtattagaaatgggagaggaaagagaactgtattaaaaataactactagatttctgattacagcatttagacagcgagggaattccagcagcagatcacattttgggaacatcatgcatttcaaaggcagaacatttcagatggctttgagacacacaagaggaaaggtcaaatagtaataatgataatagccaatatttttgagcatttacagttattacagcattttttaagctgaggacatggaaacacagaaatgttaagagacttgtccaatgtcagacagtaagtggaagaaacaggatttaaatctacgtagttcacctccagagcccatgcaccttatcattctgtatgctgcctgtgtagacagatatggacctacagatatgtaggtgtggagctcatagaaggggtctggactagagattaaaagtacagaacaaaaaagttcatttttatttacatctctgtgaaatggatgagatatcctagggagagaatataaagtgagacatgatgtttaccttgaggctcttcagcattcagtggccaaggatggcaagataggcagaaggaaagacgagggacttctggttgatataaaagaagagaaaggggatgttaaggagataatgaacaatggtggttttactgctaacatgtccagtaagatgaagactgaatggtgtctgtggacaactttgacagaagggtcttggaggagtggtgtagtggggctcaagcacatatgaggagtgaataggagatgaggacatgaagtcagaacatttaggcaactctgtagagaagtttatttgaagcaggaagtgtctagataggcctgtgagctatagctggagggagatgtggggccaaatggttttgttttgctgttattttaaaggaagagactagggtttgtttaaaaaccagtgcaaaaagatctgcgtaagaagaagaggttgaatatataaacaagagaaggaataatattttcatgttgttgggaaaatgggagagaatgggattaggcataggcagagggtctggcatttggaaggaggaggggcaccactttggtgtgtcaagtccagagtaggaaggactggagccactttggtaggttgtatgtgataccaggaaggagagtgactttccatcagataacttctgtttcctttggaaaatgaaggtgaaatgatctagagagagcatgaagaggagaatagtactgaaggtttgaggagttaaggagagcaggtttagtgtcaggcatcaaagaggctggctcttgtgtttccaaaaataatctgggcagtgagtttcctagttgaccacaaacatcgttttctgagcagttgcagagtttgaggagatgagaatttgtaggacacagagacttaggctgttctaaatgtggtttttgtattgtatgtgtccatttctcctgagaagtgaggtcagtattaaagctgagaaggagacgggaggcatgagatgttctgtggaaatttttaaacacatttttttaaagcaaacatctgtagtgatttaaattattttattgaaagcgtcttctgacacatcacatgttatcttacattttacttattttagagaacagtttattcaccagcaaggctcttcaactggctttttaaagacagggcccctatctcactaagcaagctgctgagtgtgtcccacaggtattcactaaataaatggtgagagaagtgctagatattgcaactctgctggtactgtggctacattttatttggccaagggatttttttgctttatatttttttgtaaaccttactaaatagatgttctcatttgaaattataatgatctccatttttttaatgtgccaagagagtgattttcccttacccaattaaaagtttgattcatttaatgtaactgagaagtgtgaatcataaacgaaacattatatgtatttatttttcatatgttttaagttatgaaaatgtatttgcttgaactaccatattctaagattttgatacattttgtagtgactcttctggatgttttctattccagaaaatatgaaattttagtttcgatttttcataaaaagatatattgaatatgatagctttaattttaactgtattaatttagattggcctaggaaccacagaatgcttacacaaaaattctaaagaacatactaagaaatagtttatttttaccataggtaaaaagatgatgagtttctctaaatataggcggctttttttttttttttttttggccaatatacaaataaagattcgtctaaagcagtggttctttaaaggggtgctatatcaatactaacatataaagttgctttctgcccctttgcaagattgtgtctccgttcttcatgctaccatgcccctgctgagactctcttcatactgaccagattgttttctgcttcagtcaggttttgaagtgttcgcattttttttctactgtatctttgcctccttgtccatctatggctataggaagctcatcctgggagtggaggaacagatgttctgtcattgccacattcttctggacacagactggagaactataggaatgtaagcatttgctgaaacatagtactcttttctgtttctaagcacctattcattattgctgtcattgacccttatgttctccatctttcccagggttccttgcttccttcaatctatgatcactttaagtatggtctttcctcttcccttcacctatagtctcaggtgaatcttcttccccctttaccaagtacacaaggtaattgtactctaacaccctaggaaaacctgaagtctttgtgcagccagcctgtcctggacaagggcagagagcttcaggagcttgcttttcaagaagtgcccagttgaacctagggagcttcagtcctcaagaacaaatgtgaaagaagatctagctagacaaactgtgaaaagaatatatttacctgccatgacctttacgttggttatgaggatagctcagaagtctctttgcatcactctatgtaccctacttgtgtggatattttgtgatatggtcttcaaaactggaacaaggcatggcataccagcttgaaagaatatttttagattcaggctccatggtggttaccatatgactgcttaaggcacagctgcttctaaaacacctttgccatacttaactttttctgatttaattagatcatatagttagtgtcattaatttgggatggaagcacccttctgtcatgactactgtccctcacaagtttgaaaatgattcaccatgcagtattaaaaagtaaaatgcttttattactttcatcaagaggccatatgatacaaaggttcaggataaagatgaaaaagtgagtaggaaaagaaaattaaagttaaaaagttatttcctgagatttattatttctggcactatttttggattttgggttctatattttagaaggtaaaatctcagtcgagaatcaggagttctgtgttttattcagttagaaagttttgatgtatttggaaagtcatgtaattttcctattgtccaagtaaaaatggccatgattccatagtagaagcttatggagaatatgtgtgaaggtgctgaatgatgattacataataatcagaaacaaaagttaagcatttctttggttttgtaacttcatataattcaagagatagtatttaagtcatattcatgtatatatttaaaaaaatcttagtactttactaaagtggtaaactttcatattacacagtttgataaggcaaatatctttatgacttttgtgtaagatcctaaatactgttattttttcaaaaaatatagatgtggccttaatgatatgctaataatactgttttgtagttttctcttaaaagtttgtaaatccagttttctttttttaggtatgttgaagaaagtacgcacatcttatcttctgaacattttgatggaattaaccacaaacttcatgcaagaacagtaaaaggtattttgttaaataatttttgcatattgatgtagtgctcttaatttctagatttgcttcacaaaggcctaccttaaatcaactgcaaatggatactacttcacagagtagattttgtaagagaagtttcttaatcataaaatatatttcttctttaccaagtcatatgatatttctttcagaaagcgcttgtacagactaaatttcagtattagtagtttgaaataacatcatttattttcactgtgcacttgtatatatttttatatgcagcgtacattgtagtcatgtatttaaaacatgcccatgagatagatatgaaattaatcaggaaagataggacagctgcattcatttcctaccttgctctccttggagttcttcagaatagatgtgtttaagagcaaatccaaagcaagcaccttactgtgcatacctcctaccattaggatgatattaaatggcatggtgagcccttaaaaaggtaagcaccctcttgaaaacaccagaatagcttgagctccattcccagatccaacattataagccacatacacctaacagacatctgtagaatactccacttaaagaacagaacacacattcaagtgcatatggaacactcttcaggatagattattaggacataaaattagcctcaatacatgtaaaaaggattgaaatgatactaaagtatgttctctgaccactatagaatacaattaggaataagtaacaaaaggaaatttgggaaatgcacaaatatgtagaaattaaatgatatactcctaatttgggaaatgcacagatatgtggaaattaaataatatacttctaaataatcagagtcaaagaggaaatcacaagggaaattagaaaatatcttgagataaattaacctaaagcactacataccaaaatttatgggctgcaactttaaaaagcagtgtttagagagaaatttatagctataaatccttattgttttcaaaaaaagaaagatctcaaattgataacccaacttttcaccttaagaacctagaaaaagaagagcaaactaaacctaaacaagcagaaggaagaaaataataaagatgaaagtgcaaatgaatgaaataaagaataaaaacaatagagaaaatcaataaaagcaaaagttggttctttgaaagatcagcaaaattaatgaacctttggctagactaaccaggataaaagaataatcaacaaagaaagaggggatatcactactgactctacagaaatttaaaaaaggtaattatatgtcaaaatatttggtgacttagatgaaatggataaattcctaaaaaacaaaaactaccaaaacggagtcaagaagacagagaaaatatgaacctataacaagttaagtgattgaattataattttaaaaatttcccccttcacacacacaaaacccaggcccatatgtcctcactgtgaattctaccaaaaatttagaaaagaattaataccaatcctttacaaacttctccaaaaaatacaagaggagagaatacttcctgactgattctgtgaggccagtgtattaccatgataaaaatggacaagacaacaacaacacaagaaaactatagaccagtatctttggtctatagttctgatgtaaaaattcttgccaggtgtggtggctcacagttgtaatcccagcactttgggaggctaaggcaggtgggtcacctgagttgaggagtttgaggccagcctagccaccatggtgaaaccgcgtctctactaaaaatacaaaaattagctgggcgtggtggcgaatgcctgtgatcccagctactctggaggctgaggcaggtgaatagcttgaacccaggagacggaggttgcagtgagccaaaattacaccattgcactccagcctgggcgacaagagcaagactatgtcttaaactaacaaagaaaaattctcaacaaaatactggaaaattaaatctagtgacatatgaaaagcatagaaaccaagaccaaatgggatatatgtaaggaatgcaagattggtttgacatatgaaaaatcagtgttgacaccacattaatagaatagagaacagaagtcacatgataatagacacagaaaaagcacttgacaaaatctaagtcccttttatcatacaaacactgaacaaactaggaatagaagtgaacttcctcaccctgataaagagaatctacaaaaactacacagctaacatcatacttaatggtgaaaaactgaaagtgtgccctctaagatcaggaacaagacaaggatgagttatcttactgtttctatttaactttgtactggaggttctaagcaggacagttaggtaagaaaaagaaaagcatccagattggaaagccagaagaaaaacgttctctatttgtagatgacatcttgtatgtaaaaaaatcttaaggaatccactaaaaaattcttagaactaattaatgaattcagcaaggttgaaagatacaagatcaatataaagatcaattgtatttatatacactaccaaggaacaatctggaaattgagaaataaaactgagaaattaagaaaacaatgacgttggcagtagcattaaacagaatacgcaggaataaatatttacaaataagcaaaagaagtgcaagacttgcacaccaaaaactacaaaatattgttgtgaaaaattaaatacctaaataagtggaaagacatctgtgtctttgaattagaaaactcacattgttaagatagtaatacaccccaaattgttctagtttcaatgcagtctctatgaaaatttcagctgccccttttgtagaaattgacaagctgaccctaaaattaatatggaaatacaaggaatccataatagccaaaatagtattgaaaaagaaaagcaaagtttgaaaactccccattctcaatttcaagacttactacaaagctataataaataacagtgtggtagtggcgtaaggatagacatacagatcaatggaatagaattaagggtctaaaaataaactgttacatctatggtacactgataatcaacaagggtaccaagaattatccaatagtcttttcagccagtagtcttgggacaagtggatatcctcacacaatatataaaaattaattcaaaatggatcaaagacctaaatgtaagagataaaaacaatatgaaactcttagaggaaaacatagactgaaatctttataaccttgtgataggcagtggtttcttagattgataccaaaagtataaacaacaaaagaaaactatgtaagatggactacactaaaattaaaaacttttgtacttcaaaggataccatcaagaaagtgaaaagacagcccacaaaatgggagaaaatatttgcaaatcttatatctgataaagaacctgcatccaacatatataaagaactgttacaactcaacaataaaaataacccaattaaaactggtcaaagaaattgaatagacatttttccgaagaagatctgcaaattgccaatgagcacatgaaaagatgtgcaacgtcgttagtcattagggaatagccacaatgaaacactgcttcatgcctcgtgggatggctataatttaaatatggacaaaaacaagtattagtgaggatttgttgacattggaaaccctatacattactggtggggatgtaaatggaaaatttgttcggaaaacaatctggaaaatcctcaaaaggttaaacatagagttactctaagacacagccagtatttatattgtaaacctcttcccttcctatgtgtaacactgtaaaggggtaaatgttacagtatgtgaagtatatcacaaatagctcctcctagatggtctgttactgtgccaaattcttagggtaccatatgaacacaaaggggtgtgaaccctaccctctagagcttcttgtctgttaggagtatgaggcattacaattgtggtaagtaccatcagggaaagatacaggggccactaagattattaacagggatatctgaacctaggtcagggacagttctcttaaggaggtgattttcctttgcgatccaaaggatgaatccgagttatctaggcaaaaagggcataagataagagggattacaggaaatggggggccaacaggtgtaaagactctgttgagagagtcatggggtgttcaggaaatggaaggaaggtcagtgtgaatgagacaaagaaagtgagggggtgaggagtgcagggtgcgtccgagaagaaggtccagaccagagtgtggacaacctcatcaatgtgttatggctttgaaaggttttcagtctggggtgacacattctaatttgtcttttgaaaacatcactctggctgtgtcagttagaaaaggggcagaagtggaagtgggagggaacagtgaagagtactcatggtctaggcagggactgatagagcaacttgcaccagacagttggcagtggagacgaggaaaaggggacatatctgaaggctttttgcaagataaaattgatactatttggtggaagccaagataggggaggtaagggagagaggtgtaaggcatggctcccagacactggactttggaaagtgaatgagttggagggctgtttctaagccagagattttccttcatgataaactttgttatgaacaacttcaagtaacatgaatggattttgttctgttgataagtatctctttcttaccaaggcagtcacatataatacagaattatgtgatttgctgatagcaaatatttggggagagtacaaattttggaaaattagacaatgttttttatttgccagatgaattttgctctgagagtctctgttgttctagtctgtctcctgtgtcttttttttttttttaactgtggcatgaattgttttcaatttgttgtgctgttactaaagttctgagggctgcagttaaaacattccaatttctcctttccatctttattgattctcaagattttgcaacagaaaactctttgggggctagaacagcagtaattgcatcacactgttttcaagaattcaagtttcaaaagcaaatcattaaaaaacaaaaatacagttcctgatttgagttagatacagggacaaaaaagtagcacatacttgaaggttacatggtctacaaatgttggctatattttccttgggagagtagttctgttggtatatattttttaaatactcaaaaggctcaacctcaagcagtaataaacacaagcaaaagtcccgtgtcttcttataatgtgtttggccttgctgatcctcccccagtgctgtagagatcatctgtcatgtgagcgtcctcatttttaggtaagtaatgaaagtagactctgaaataattttctggcaagtaactcccttccaatgagaaatatctggactgaatgtagttttagaaatttcttatttccttggccagccaaagtcttaaaatgccaagttctttggggatgcttttattctccagttatgtagaagtgatggtgttttcttataacttctaaaagctgagaggtgacagtgtgctggcagccctcactcgctctcggtgcctcctcggccttggcatccattctggccgtgcttgaggagtccttcagcccgccgctgcaccgtgggagcccttctctgggctggctgagtccggagccggctcccttggcttgcggggaggtgtggagggagaggcacgggcagaaccggggctgcatgcagcgcttgtgggccagctagagttccgggtgggcgtgggcttggcgggccccgcactgggagcggctggctggccggccctgccagcccaggcagtgaggggattaggacctgggccagcagctgcggagggtgcatccggtcccccagcagtgcggcgctgcgctcgatttctccccggtccttagctgcctccccgcagggaaggcctacctgcagcccgacatgcctgagtctccccgctctgccatgggctcctgcaccacctgagcctccccaaggagcaccacccgctgctgcacggcgcctggtcccatctaccacccaagggctgaggagtgcgggcacactgcgggactggcaggcagctccacctgcggcccggtgggagatccactgggtgaggccagctgggctcctgagtctagtgaggacttggaaaacttttgtgtctagctaagggattgtgagtgcaccagtcagcactctgtgtctagctcaaggtttgtaaatgcaccaatcagcgctctgtgtctagctaatctggtgggtacttggagaatctttatgtctagctaagggattgtgaatgcaccaatcggcactctatgtctagctcaaagtttgtaaatgcaccagtcagtgctctgtgtctagctaatctggtggggacttggagaatctttatgtctagttaagggattgtgaatgcaccaattggcactctgtatctagctcaaggtttgtaaatgcatgaatcagcactctgtctagctcaagttttgtaaatacaccaatcgacactctgtatctaggtaatctagtggggacgtggagaatttttgtgtctagctcagggattgtaaacacaccaatcagcaccctgtcaaaatggaccaatcagctctctgtgaaacagaccaatcagctctctgtaaaatggaccaatcagcaggatttaggtggggccagataagagaataaaagcaggctgccagtcccagccatggcaaccctctcaggtagtcttccacactgtggaagctttgttctttcgctctatgcaataaatcttgctgctgcccactctttgggtccacactgcctttatgagctgtaacactcactgcgaaggtctgcagcttcactcctaaagccagccagatcacgaacccaccaggagaaactaacaactccagacgcgccaccttaagagctgtaacactcacagcgaaagtctgtagcttcactcctgagccagcaagatcatgaacccaccagaaagaagaaactctgaacacatctgaacatcagaaggaacaaactccagacacaccgcctttaagaactgtaacactcaccgtgagggtccgcggcttcattcttgaagtcagtgagaccaagaacccaccaattgcggacacattttggcgaccacgaagggaccatcgcctatcgccaagcggtgagactatcgccgagcggtgagaccatcgcctattgccaagcgacgagacaattgcctatcgccaagcagtgagtaccatcagaccccttttggttgctattctgtcctatttttccttagaattcgggggccaaataccgggcacctgtcggccagttaaaagtgactagcatggcccccggactaaagacagaggtgtcaggctttctgggaaagggctagctaacaacccccgactcagcggaacatcagaaggaacaaactccggacgtgccgcctttaagaactgtaacactcagcgcgagggtccgcggcttcattcttgaagtcagtgagaccaagaacccaccaattccggacacaaagccacattggcaacttaatgctacactgaaataaattttaatttataccctaaaatcgttttcatatgatccctgaagagttccacttgcatttaggatgccagcacacagaaccaactgaccgctaaagatctcatgggaaagagtgtgcaaatgggttgtgatttcagttataactgttataagaaaggcgacttcctgattattagtgtttattgctaatgtatcagtaatgggcaaatactataaatctgcaaataccaaacagcaaagctagaggcaaatttgtattaggagaatcaggacagtcatttagagaaaatcatagtgaactgccttttgcatttttctcctggggtatttttactaacatttgttctcctgaaccagcacacacaggaaggaatcagggattactgttcctaatttttcactgagaatactgatgcttgcatctatttgaatcaagtttccatttttcttactgcagtataggccatttaaaaattagctttttattattgatgagcattaactatcattatttttcatgtgtacttaccttctgttgtgcattttaatttctgaggatactgagggcagaacccagtacgtgtcttcaaacctcagctccacattttactagctgggtgagcgtaaataagttacttaatctctctctgcctgaatttccttgtatgtaaaatggggatcataaaatatccatcccaaggctgtgatgagaattaaagaaattagcgtatacttaatgcttagaacactgtttggagccatagtaatctcaaaataaatgttagttgctgctgctgttgtaccaataaaatagctctctaactcccacctgctaattaagaggttaattcagttatggttattggtggtggtggttttctttgttatttgggctattttggtggagtgaggtcaagtttacatagctagtaagtggtataaaccaggtttactaagtcactggtttagagtagggattagcaaaccaaattgggcctggttttgtgtggcctgcaagctaagaatgatttttatatttctaaattgttgaaaaaaaacaaaggatgatattttgtgatcaatgaaaatgatataaaatttagtttcagtatccatacatagtttttattggaactttgtaaataatcttatatattgcttgtagctgttttcttactacactagtagaatagagtagttatgacacagatggtagggtccacaaaactgaaaatatttaccatgtaaccctttacagaaaaagttttccagcacctgctttgtggagttatcagttatgtcgattagagtgaatgcctactttttatactgccctactttgacaaaagattgttgcataagaaagtatataattttaattagctatccttgtggccagaaaactttggtttgttttgttttgttttcaaaaggataattttctacgttggttaaaattttcttgaaactcacatacaagttcaggagtagagttaattaaactctagtagattgtgtaagtatatacatgccaaaaactatacatattcactagagtattaagatttggattagtctaagagttgtcaaaacaaaagtctgactctgtgtgccctgtgtgtgggggggtggggaggaggttcagtacgtttgctattctgtatttcttttttaaaagattattgaaatataatgaattctgaaacagcctgttaataaggtgaatttttcaatgataatgtaccttaagagtatagtattataatcccattttggaagttacttgtggttatttctttaaagcctttgtttttgtgactgaaagcctgatacttataaggtggccaaactctggaggcttttagcagttgtacttggagagcatgtgctttaattttgtcacacgaatcatttaggcaaataaccttttcttctgtctatgtgctgtttctaagtatgatgtggatctttcttatttggttagttatataatctttatttagcatcttctttccccttgaatatctacaaaatcttgtaactccttttttttaaagtttataccattcaaagttaactcatcaaatatttttgaaagactttgtccaaggtcctgaagctaagaatgtgacagacttgcaccctgcccctgtagagttttgagtctggtgaggaagatagatgtgaagttaatgtaagtttggtcagtgttgggaaaggagaattaaattgtgcaaagaaaagatagaataacgggaccttaactaatctgaagaaggtggagaatattctttggatttttaaaaaaatttgtgatgattttgaagatccatccttaactaaagatctgttactaagttgaaattattttgagtttagaaaaagtattgagtgagaattataggaaattacgtatggtgtccctcttattgatacaggtgcaatctactaaattgctatactggatgatggatgattgatggatggactttacacatttgattttgccaggaaattatatattgagtgtaatggtcaccatgaaattggaatgcggaaaataccaaaagtgaaaaaaagactacttgaaaatcaaaatatctgttcttaaacagaaatatatttttaaagtggaatctaactaagcgttcccccccttttagaacggttattatttttagtataaaaatagatggttatgtagttatgtatgtattatataaatatatacaatatagttatatatgtgtgtgtatatgcacacacatacatgtattatacccaattaaaggtggaagtgccaccaagtcaagccccaaaagtaaccactgttgataatttgatgtttctctgtgagaatacaactttttttcctttaagggcaaaggagatcagaatatacctactgttccacagcttgcttcacttaagatgatgttatggacatctttccctggcagtgttgattgagaaccacctctctccctagatctactttattcttgttgttctcattgttgatactgctgttttaagttgtattctgtaaggtagaacattcaaaaggttacaaaaaagtatacatagaaagtcatttttctttccaattcttccttttccagaggctaccacccttagcaatttcttacctcttgaaatcatccagttactattatatgcctttacttagactaaagttaaccccccaaactaatcattcatgaggaaaccaaatgcttagtgaatttacagcagcaaccaattgattttgtaatattatatttaatatagtatttaattgtatttaagattgtataccaaaatggtaacagatttcccatttgttgtatttcagtttcaagtttaatgctgtgtgattgttgttagaggatgcagtctggaggtgaacaatctctgtcagcggtttagatctttcaagtaactgtttcaggagcaaccccacaaggccctgtgtgccccagagcactgcccccacatgtcctcaccactgtctgcttgtctcactgtcagtgttgtgagtacagacccaggtcttgaagatcccaggaggaaatgaccttgctgctttaatctgaaagttaatttaggggtttacagctcatctctgtgatgtcatattttcatctgatgattgtaatctggaaccactgggttaacctgctgttttcaggccagctttgttaatgccagagcctggggagtggaggtggctgggtggtgatagatttaagggaggtcaggaatctcctctgctgggaccaatctggagctgagaagatgttatttgttgaagcacttgctctatagcactggatcttttgtcagctgctaatactaagatggccttctgaacaagattacctgaaactccctgcctttctaataaactcaccagagaacatggggtgatagtattggggggaatatagaaagaagttaaccagatccaatcttcagagtggctgtgttgatatcctatggcctgaagagccctaggctagtacttccctttttataggcagtatttacttttgtataaaatatgttcctcaaaaaactacccagatatacagtgtgtaaaagtaaaacaaacaaaaagacatatgctaagaagatattcctttaccagagtactagtaaaacattatacaattcaaaaagaatatgtcattctttctgacatagatgtatgtctagtatgaatattgtatactttgtaaatattctttagttttatcatttttctttacagttgagcacatgcctggcttaagtcaagtatgcttccagtaaaagttaaaagacttgccacataaaacaccctgagtgattgccatttttgcctaaacttaatattgtttacaaggcctatgcttcatgtcagtactatgatcacatttactttttttattgtggtaaaaaacacataacttaaaatttaccttcttaaccctttttaagtgtacatttcagtagtgttaattacattcacattgtcgtgcagccaaactctagaatttttcatcttgtaaaactggaaccgtatacccatcaaacaactcccaatttctccctggtttcttctcttccggcctcccctcctccccacaaccccatatcccccagaaaccactattctgctgtctatctttgaatttaattactctagatacctgatatatatggaatcatacaatgtttgcccttttctgacgggcttatttcatttaacatagtctcctcaaggttcattcatattatagcatgtgtcagaatttcctttctttttaaagttgaataatccattgtatgtatatatcacattttgttgatccatctatctgtcaatgggcagttgagttgtttcacttcttggctactatgaaaaatgctgctatgaacatggatgtgcatatatctctttgagatcttgctttcagttttttgttttttttttttttttttttgagatggagtctcactcagttgcccaggctggagtgccgtggcgcggtctcggctcactgcaagctctgcctcccaggttcatgccgttctcctgcctcagcctcccaagtatctgggactacaggtgcccgtcactatgcccagctaatttttttgtatttttagtagagatggggtttcaccgtgttagccaggatggtcttgatctgacatgatctgcccctctcggcctcccaaagtactgggattacaggcgtgaggcaccgtgcctggcctcagttctttttgacattcacacagatgtggaattgctagaccatatggtaattctatttttaattttttgaggtactgctatacagtattccatagttgctgcaccattttacatttccaatggtaaataagagtttcaattcctccatatcctcaccaacatttgttattttctcagttttgttttttaaatagtagccatcctaatgagtgtgaggtgttatttcattgtggttttgatttgcatttttctaattagtgatcatcttttaatatgcttgttggccatttgtacatcatctttagagaaatgtctatacaaatgcttcgctctgtttaagttgggttatttgggttttgttgagtcataggagttctttatatattctggatattaatcccttatcagataattatttgcaaatattttctttcattctataagttgccttttcactctgttgattgtatctgttgatacatggaagttttaaattttggtatagtccagtttatctatttttacctttgctgcctatgtttttggtgtcatctcagtcacatttactttccatcttttcatctccaaacacccaaactaatttttctaaagaacaaaatgtaatgaaatatttaaataattataaaataactactgcaagacaaagatgactactcctgaaagtgaactcttggctagcaccatcatgccctaactcgaagtgttgcttcatccactaatgtgaaaatgtacacatttggagtacaaaatgcagttggaggagtggatctagaaatagattgtggggacatgggcaaatataggaaaacaaaggaagaggaaagcacacctagttgtatccttttaattaggatccttgagtatccacaagtaaactatttaacaaatccttgcaagaaaaaaatggtcctctagggccttctgcgttctgatttttctcatctttcctatgtgttaatgcctcatagtctgctaacacctctaaacagagacgagttagaaatttttgttgtaaggttaactttcaaatttagagaaataaagatgctcttcaaatatttaactttatcccaacctaaattttaataaactattgaagttgactagcaacatggccatttataccaattagtagttatagactatcaagactgtcagccgtgcacacaaaagtactataagcatcttttctaactgcaagagtgtatgaaccagtgcttgaatggttttctgagatatttaaagaaactggaatttaagtgattttttttcttcaaatgctctttctccttgtataataatgttgccattgttccttttttcttcctactttttctttcttttgtgattgctacttactcatctttctcttgatcgttagttctacacagatgttgatagttctccttgcctaatttttcttccccacccacccagactcattattcactgtcctcagccctgatcgctgtcctccagcatttacaaggattaaaatgagcctgccagagtctgtgtggctatgattctcgtttcagggcactagaggacacacacattaatacttcccaggtgctgggtcagcggcttcctctcccacctggtgctcaggccaggtgttggtaagacggtaggaacctgaactggcaggaaattattaagcctagatgttgcctctggactgtctagtcctccaaacacccgaagcagtttgattcttaaaaacttactcagaaaaagaagctactgagatattttccctttttattttcttttgggtttaaataaatagtaatggttattctacccatgtgaagtttttacttcttaaataaacccctgtaacaagtagagcatcttctgcaaagagagtccatggatgcttattaatacattaaatgttccagttaagctctaggttaatgaaaattcaagtttttgagtggttactttgttctagtcctctgatgtaccattttgctgtgtgcaacagtacagtattatttgagtggttttattcattaacaaaatgtaccaaaataaatttagctagggtcacagtgtttaatttaatagtattacaataataactaccataattagtttcagatttgccttccttcccagaggataagacttttttagttttgaatgcgttctgaaggtatgataatgacagcaaaattaatgtcatgacctttatagcctgtttatagtttttccatgttgtaccctaaaggatttagggagcagtgtacatctaaaataaaccacttagtatggacaagttaaaaattgggttaattgggttcacatatcctcagctggtagcacctcagtcaagacaccatttcatcttacataaaggagcatgatttttacactataaaatcatcttaaaactgtacctgtaatgttttaaaaagaaaaacattttaaaaggctactttttcaaatatgtaacaatgttttctctaattatgttatgtggtttgactttttcaattaggaaatcaagttgttttcatagcaagaaaatgttgatacaaactaatgtgtcatgctgcatgaacactaatgctcacttccttttggtgatgttgggcagcagcactgtctcttgcaacggactccttttcccatttgtagtttgttggtgggacttcccataaacaatcacccttctaagtcctggagatgggaaacttggttttcattgtttatatatttcagtaaaatacagtgtttgcatattcagctaaagttgagacaattacataggcatgttagaatccttaaacgttttgagtatttgattgaaaaattcctatggcaatttttgcaagtgatggttttgaggcactttcatgcgttgttagataaatcagtgcaacttctttgaaggacagtttggcaaaatctagaaaaatattaagtcaacccagaaatttcttactgtgacttcctgcagatagacttcccacgtgttagcaaagatgtacatgcaagggtgcacactgtatgtagctttgtaagagcagaaggctaagaacaatctaattgtcaaccagtgggttaaaaaataatggttccacacaatcaaatactatgcagtctttaaaaagaatgaagatgctttataagtgctgagatagcaaactctcaaaaatatattaagtgaaaaaagaacagcatgtataatctgcttcagtatggaaatacggacaggggacagagcttatttctatgtgttagtttctgtaaacataaaaccatttctgaaagggtgcccagaaaggtgcaaagagctgttgagccgttgcctctgaggaggggaattgggggaatagaatgagaaggagacttatttttcaatttattctcttttttttagtgcttgaactttttttttttggactggtattcatatttttaatcaatatacaaacagaatgttaaaaaaaagtttttgaagactgtagcaatgtaagtaaattcttaatatataaatgcaatggtcttcccttatttgtgatttctcttctcatttcagttacctgagatacagtacaataagatagagttttgatagagaccacattcacataacctttgtatgttgttacatatgtgttcacattcacacattatatgttgttacaattgttgtattttcttattagttattgttaatttcttcctgtgcctaatttataaattaaacttcatcataggtatgtatgtataggaaaaaatacagtatatatagggtttcgtactatccacagttttagacatccactggggatcttggaatgtatccccagcaaaaatggtggaaatgtgatcatttcaaaagcagtgaattaaatccaaactgatcaaagccctgccagccagattgattgaggaaaacaaaataaagaacaatttcacaatacatgtctatattatggaagtgtaaatgacagcctctttattttatggtttttattttgctgctaagtatcagttattagcaaataatgcaattcttttttgaaaagcgttcatctttgttgtgttggtaacttcactggcctgaatgccttctgaacattctgttagcattggaaatccaggctagaaattccaaggatgttctgcttgatgtagaaagactcaaatctttttcttatatctgtatcctagacatttgaacaaataagaaaacggaggataggcctgtttgttaaaatttgccacaaacgtgagtctttctagacttaactaaaatgcactatggcagcatagtcactgtattgcatttatagataatattggaaatcagtgtttcctaggacttgttgtctttagttagtgaaacttaatattgatacatctgaaaggcccccaaacctgatgttagataaattcaagagactaggacaatttttacttttacataaaataaatttgttaaattattttaagagtgctgcagtccttctaaaaacagaaccaagcaatctatacaaatcaaataaacttaattatctgtcacttttagttacggaaaagtttattaatggcagaattaataagacattgcttcaaattttaaaaatcacagatggaacacatttttaacactgggaggtaaagttaaggaatttttccagaaagagcaaaaattaataaatagaaagcaaaacataataaagaggagaaaagcataaccagccagggaagcccaacatttcaataataggaattcaagggggaaaaaaagagagcagagcaaagtaaatgaggaaatcttagaaaaataattgaagaaaatatcccaggaattgaaatgcacaaattttctgattaagaggccccaccaaacacttggaaagtggaagaaaatagactgagacacttcactgtgaagtttataaacattgtttccacaataaaagcaaattatatacaaagaactactcacagtggctttggatttcttcacaccgacattggaaaccagaatacagtggaatattgcctttaattttcaacctggaattgcgtacccacaaaaattatccgacatttttattgatgagagagaaagtaaatcttcatcctccattgtgggacatcagttgataatgcctaaaattgaacaatcaagaagtgaaattataagcatgttattaacgataatggaggtctaaatgctggaagaatcaactctaagaattgagagtgcatgtctctgaggaagaggacatgattgcattttcaaaataataagctgtgtagaaatgtttacttgacttgaatttttttagattgcaaagtaaaaatggaaagattattctagttgcatcagagagaatagattggactggaggcaggaagacaatttaggagctattgtaatacaggcaacaagcagtgaggacctgacctaaggcagtaaaggtgcccatagagcaaagacaatggctttagaaaatagagaaggagcacatttggaggcaggagctgccttgagtttggaggtagccatttagagatatgtaggaaggagagaacatttcaccctggaacctgggaattaaaaatataaatttgcaattgtagttagaaccagatgagttggaagaaaatgaatagaaaacctatgaaggaaaaataaggatctaggctagaacatattttcctaatagatttttattgaggcagaaaaatgccctcttaaacattcttaatctaccaagttcagtcatatgtgcaacacatgttaaggaacacaggtgcctgtatgtgcatgcattttataacagtcaatgattagatcatacaattggaaataatgttttttggacttctaagtatattctagtacatttctttttttttcttttttttttttttttttttggaaatgccaaagataataaaacctttctttgtaaagaattctggagaactttattaacatgtaatgtaatatgctgttttttgagtaatttttttacaaagtattttcagcatgtagtatccagtttaatcctttctccagcaaaaagagttaagtattttatctctaaccttctatgagcagaaactgaaatggaaaaaaagattaaatgatttgtccaagatcatacagtaagaagtttcagttagaaatgtacatctccccactcagttccccaggtttttaactcattgcatacctgagattgggcaggaacatgatcctgaaaattaagggtgagtctagttcaatgactgacattcagaaatatgtgttgatgccggacacggtggctcacacctataatcctagcacttcgggaggccgaggtgggcagatcacttcaggtcaggagttcaagaccagcctggccaacatggtgaaaccccatctctactaaaaacacaaacaggagccgcatgtggtggcacacgcctgtaatcccagctactggggaggctgagacaggagaatcacttgaattcgggaggtggaggttgcagtgagccaagatggtgccactccatccagggtgacagagtgagactcaggagacgagagaagagaggagggaagaggggaggggagtattttttaatcaaacccgttagcagcatgcagccatttagggaaggaaggtgattgccaaacattgatacattgtattaatgcaagtatcaatataagcattaagaatttactatgtggattaaaatttattctgtagattaagttttagctcctctaaagctttagtaacattttgagaattttgtttttatttgtttctgaaatgggacagattgagataagaataagcattacagttgagccaatgaagaatactgttattacaattgagcaaatgatgagtactattattagtcaggatttatgtactattagcttctattagatattattgtatatatatgtgtgtgcatgttagatgctgacaaggttgaagagaaaaggaaatggcttatacactgttggtgggagtataaattagtttggtcactgtggaaagcagtgtggtgattcctcaaagacctaaaaatagaactacaattggatccagcaatcccatcactgggtataaacccaaaggaatataaataattttactgcaaagacatatgcagacatatgttcattgcagcactattcacaatagcaaagacatagaatcaacctaaaatgcccatcagtggtactggatgaagaaattgtggtacatatacaccatggaatacgatgcagccataaaaaagaatgagatcatgccctttataggaacatggatggagctggaggccatcatccttagcaaactaatgcaggaacagcaaaccaaatactgcatgttctcacttataagtgggagctaaatgatgagaacacgtggacacaagggaacaacagaccctggagcctacttgagggtagagggtggagggtgggaggagggagaggagcagaaaaaataactattgggtattaggtttagtacctgggtaacaaaataatctgtacagcagactcccatgacatgagtttacctatatatcaaactcgcacatgtactcctgaacctaaaataaaagctaaatgtgtgtgtttgtgtgtgtgtgtgtgtttataatattatataactaaagtgggcctgaaggtatttgggttctcttgctcttgagaaacataaattccatcattgcttagaagaggtagtttttttaaataaatgaaatatagtacaaccactatggagaacaagcaattgcttctaaagttaagtggtccgtgcttaatagaccacttaataattccactcccaggtttttacccaagagatattaaaacatttatctatacagaaacttggacacacacatttatatttatattaattcatgataaccaaaaactggcagcaactcaaatgcatatcagttaatggattaaaaattgtgttatattcatataatggaatatgattcagcaacagaaaggaatggtctactgatacacataataagtgaatagttactgtctgatgtatatgaaatgacaggaaattctaggacaagcaaaactaatttatagtgacagaaaacatcagtgattgcctggggccataggtgagggtggaaatttattacagaagagcacaaggggacttttgagatgatattatatattttcaatagggtgattgttttaaaatgtacttgggtttgttttagtcaggtatggtaaagtgacaggagacaactgcctttgaaagaggagtttaggccgggcgcggtggctcacgcctgtaatcccagcactttgggaggccgagatgggcagatcaggaggtcaggagttcgagaccagcctggccaacatggtgaaaccccgtctctactaaaaatacaaaaaattagctggacgtgatggctggcatctgtaatcccagctactcaggagcctgaggcaggagaatcgcttgaacccgggagccggaggaggaatctgggctggagtacagtgagccgagacctcaccactgcactccagcctgggcaacagtgtgagactccgtctcaaaaaaaaagagtttattacttacagtcccttagaggagggggcgcagcataccattcaaagccacagggagaagcacctgggtcagtcaggaggcagaaggagccaggggaaagcatggcccagagcctttgttgtagtttccccaggaaagacaaggtaggatatgaaaagctgtttaacattggctagcttgaataatttcagtggtccctggcctataaggtagtccatctcactccagtgatttaggctggagaaatattggcttggtgtgttagttagataaaggatgtgattgaggatatgggctttggattggttggtttgcgtatgaaagacacgctcacaggggagtcatttgcaatatataggaattagctagccctggaaggggcagtatcttcccctctctagcaagtcctctaagatgtcaaatcatcataaaatttaacaaaaagccatgattaatacagtgatcactgtaaaggtatatacatttgtcaaagctcatcttaaagtggggtgcattttgttgaatgtaaattatccttcaataacgttactttaaaagtaaaaaaacaaaaaaagttaatgaaatggaccaacagtccctgatgtaccttagttcaactcaagatttttcaactttacaatggtgcgaaagccatgtgcattcagtagaaactgtactttgactagccatacagccattctgtttatcacttttagcacagtattcaataaattacatgagatattcaacactttattataaaacaggctttgtgttagatgattttgcctaactataggctaatttaagtattctgagcatgtttaaggtaggctaagttacgacgtttggtaggttaggtgtattcaacacatttttgaattatgctattttcaagacttaggatgggtttatcagtatatagccccatcataagttgaaggggcatctgtaaatgggtacatgaaattacttaaaacaagccaggaaaattcatcctcaagtgcattaaaaattttcaaacaacacctaagtatataaaggcaaagagcagcattgaatacttaagaattacaagttcatccaggcagttcctatttttcttccatatgtcataaccattttcatgttatggcaaaagaaaaaggtggcattttcagttatatggtgtctgagtttatacaacattttggagttctttcctgccatattcctaaggaatactaatatgtatttattttgatagttaacaataaaaggcttcactcagcttcttcaggtttttcagtgatgaagttatatagcatccagtccatagttgagtatcagtaatcatgagaaagctctttcttatatccagttgaaatttgcctccttgtaactttgtcttccttactggtcctagtcctgtccactggagttacgtaggattcctctaatcctgcttctaaaataacagttcttcagatatttgaagatggctagcatctccccttgaatttttttatttcccaggttcgttcctttcccagctttttataaaactcacttttccctattactttgtccttgccattctttgttttactgactttcctttatttttaatagttgcacagagacattctacattgatttccatcagaacacccttgtctataggtacatgtatgcatgggaaagggatgaggggcagagggagagggagaagctgcactcaggagagcatgaggagtgtatatatggaaatgacacacaccttgggaatgaattctggcccatctgagtgaccttgagcaagatgcttaattttctttgagcacctcagtttcttaacttgatgataacagtgcagatcctcatatgtggatgaggtatttgtgaattacctagtggtaggtctagcacatagtagcatttgttgcaaaagagctacagtgtagaatacaatctaggtgaagctgtcatccatggcttcactgactggttctaggctgaaaataagatcttgtgtgattatcaacctgttacattttaaaatcaagaggcacagcctaacagtagaatcaaaactggaagacggcctgtcaaaagagcagctgcccaatcaaagtaggttagtaacattatcttaatgtataaagaaaagcctgttatgaattacctaaagctctgagacattaaaagactcattaccttttttatatttgcatgttttaagttatcctggccaaatttattatattatggcatttatctgaatgacagtatgtcagtgtgatgatatatgacatgtttattccctaggaaatagtttcctagaaataataatctagattgacatctacatcgcaactctgtgactggtggccacatacacatacaagagcatgcacttatacatgtactcacaacatgggttaaagttaatcagcatgttgagcatggagcaaattattttctgttattctcttatgtttctttatctacatttatttttaggaaccttaacaaagcagcataacaaagacaaagcagtgtctgccttagatttcttcaacaaggaataaatggaaaaattttcatttacatcaggctgtcactttgtcaagtaaccaattcacctaattttcatttttaatcaactctctttaaatatggcttattaactaaaataaaaagtaatcatgtaactggtttataaagcacattgtattagatcttgctatcattgattgtatttgctgtttgcattctttaattttattcctttctgatagatttttctatttaatatacttttcagcaatttaagaaaagtcaggttataattttcagaggtttttccttataaactatgaaggatgcagtggctgttagtgctatactatgattccttgagtaaaaatgcacacttactcaaggaatcgtataaggtttattaaatactgttagattttatgtaactatttaatgcatattttcctctagcatatttatattattatccagtcaaatcagaggatcaaatcagaggatgcaatattgtaactatccaaaaattttttaataagtgttaggtatatttattatataacttattcatgtttaataattataatagaattaaatgcagcaatgctttgtgtcacagcaaaaaacaatacagcttcatttgagtgggtgtcctacatgaaataccaagatattaggaatacagttaaaattattttgatggcactcctcttctaacatagtatttcaaaacaatgaaaataaaaacatttttttctgattgcaaaagcagtatttattcattggggaaactttgtaatatcactttataagcataaaaaggaagattatgtagcactttaatgccccgctgagagatgcatacttttaatattgggtaatttttctcatgagttatgaaaaaaataactgaaccatactgatctgtaactaacacttttttttggagtgaaaacagagtctcagtctgtcacttagtctggagtgcgtgcagtggcacagtcagggctcactgcaacctcaacctcctgtcgtcaagggatcctcccacctcagcttccagagtatctggactatggatacgcacctggccaatttttgtattttttgtagagatgggttttttgtattttttgtagagatgggtttcactgtgttgctcaggctggtctcaaactctgggcttaggcgatgcttccacctctgcccccaaaagtgttgggattacaggcgtgagccacagcatatggcaataaccagcccctttatacaaaaacatgtcataagcaatttttatatttcttaatattttaagaaacatttttaaaaatggctttattataaaaatataccctaattctaagttttacattttttgtgtattttaaatagcacccttaacatttctttaaaggtaatgaggatgatgataatgatgatggctttacacattacaatgatgattttttgagcaaaattcctgcatgtggaaggaaggaaggtctgggccaaaaggaatgcagaattataaagctcaggatgcacattgccagagagtttgtaccaactataatacaggaagtaaatgagcatacccctttcctcagacttcccccaaagtttgtattatcatttttctgccaatttagaggcaaaaaagtagtattattttagaaatttgcaattctttgatttttagtaagtcttaacattctttctgatgattacttgttaaatgttgtcttctataaattttttaagtccttactcatttttatagtagagcattatctcattgttatttcttttatattagacaagaatacaagaaccatgtccagtatatcttttccagagtgcatagtaatactgcaaacaacatctgttaaatgaataaatgtatgtctgtatgtctattagaatttttaaattttttcccaatatttaccttttaatttttaacagctatattaggatacgattggcatacagtcaattgcatatatttaaagtacaatgagataaattttgatatacgtatatacccttggaaccttaatcataatcaagataatgaatatattcttcacctcgatggatgggtatatgttgtttctcaggtctgcttatagagtctgtccccccaaccttctctgtctcccctgtccccaggcaaccattgatctgctttctgccactatagtttatagtctctaaaatcttatgcaagtagaatcatagagtattgctctttaatgtctatcttctttcgtatagcatcatgtttcttcatttctattgtgatgtaggtcaacagttcctttaaaatgctgagtaatgttccattgtatgtttatatattccatctgttggtgaacatttgggttgtttctggcttggaactactacaaatatagctgctgtgaacattctttgtacaagtttttgtatagacatttgcttttgtttctcttgggttggtaggaagggattagctggatcctaaggcaggtgtatcttttcttaataaccagtgatgttgaacatcttcttatgttcttatttgcaggccagttatcttttttggagaagtgtatgttcacctctttagcccattgtaaattgggagatttgttttcttatttagttttgagagtttttatatacaatttctttatcagattattttcaaatagtttctcccatttatggctcgtcttttcattgtcttattgatatcttttgaagagcagaattttgcaattttgatgaagtttagcatattagtttgttattttatggattatgtttcagatgccatgtccaagatacctttgcctgactaaagggcacagtattttcttttagaagttttatatttcagaagttttgtgttttacatttgggtatatgatgcatttcaaattttgtatatggtgtgaggtgtggctcaaagttcttttttgttttttgcatacagagaaagcatcatcctttgttgaagggactattcatgttccacagctttccctttggactctcatgaaaatacatatctgtgtagatttatttatggactctctattttgttgcattgatctatatatctctttcttgaaactaaagtagcattagtctgatttctttcttcttttttaagaaaattttgattattctgagctctattttcatgtgaattttaaaaattaaattggttaatttctacaaaaagtctactgggattttgattaggatcacattgaatttatatatttatttgaagagaattgccattttaacaacatcgagtcttccaacctttgaatgtggtatatatctcttcatttgtttagatcttttaaaatttctctctatgagtgttttttagttttcagtgtataggtctttcacatactttgccaggcttatccttaattatttcatttttatgctgttataaatggtgtctcaatttctgatttattgtctcaatttctgattatttctaggatacaaaaatataatttatttttgcatattgattttgtattgtgtaaccttgctaaactcagttattagaagagctttttttgtagattctattgaattttctaattagacaatcatgtcatctgcagataaagaccattttaagtcttgcttcacaatctgaatacattttatttatttttgctctattgcactggctagaacttccaatacagggttgaatagaagtggtgagaatagatatccttctcttgtttgtgaacttggagggaaagcattcagtctttcattatttagcatgattttagctttaggtttctcataagatgtgtttcaccagagtgaggagttcctttctattcttaatttataaagggttgtttttttttaatcagtaatggatgttggattttatcacatacaatttttgtgtctgtttaaataatcatgtagttttcttttataacattaagatggtaaattgcatttattttgaatgttaaaccagttgtgtattcctggatatctctacttggtcatgacgtattctcatattgttggatttgatttactagtagtttgtttattacttttgcatctgtgcttatgagggatattgggacataggaatcttttctatgtctggatttgtctggttttgatatctagataatccggcctttttagatagtaaacatttcctccttttcaattttctggaaggatttatatataattggtataatttcctccttaaatattcagtagaagtcaccagagaagacatcagggcctagaggtctaagaattctagattacagttgttattattgtttattgtcttcagacttgcattatttttgtttttgtttttttctttttctttttttttttttttttagatagaattttgctcttgttgcccaggctggagtgcaatagcacaatctcggctcactgcagcctccgcctcctgggttcaagcgattctcctgcctcagcctcccgagtacctggaattacaggcatgcaccaccatgcccagctaatttttgtatttttagtagagacagggtttctccatgttggtcaggctggtctcaaactcccaacctgaggtgatctgcccgccttggtctcccaaagtgctgggattccaggtgtgagcctccgcgtccagccagacttgcatcattttattaatagtaagaaatctgttgttatccttatcattgttcctttatatgcaatgtgtctttttctctgggtgctttaaaaacttttttttttcaccagttttgagcagtttggcaatgatataccttaatatgttttcatgtttctcgtgaatcagtgttttgagatgtttggatctgtgtgttcacagcttcatcaaatttggaaaatgttctgccattctttcttaaaataatttttttgcccttccatctctcccctcttcaaatactggtatgttaatcttcttaaagttggcctgcagctcactgatgctctcaattctgatttttgttttttgtttttttaattttactgtcttctccattctgtgtagtctcaatagctgtgccttcagatttgctaatattttcttctgacgtgtctaatgtgccattaatttcatgcagtatatttttcatcttatacattatagtttttatctctagaaattttatttgaattttttcatgtcttttctacctgtacttaacattttgagcacatgaaatctagttacacacttaatgtccttgtctgctaattctaatatatgtcagtcctgctcagttttgattgttttctaaattatggatcatatttttctgcgtttctgcatgcttgataatttttattagatgtcagtcattatgaattttactttattgggtggtagatatttttgtatttctataaatattttgtgattttttctggtacatagttaaaatagtttgaaacagtttgattctttcatgtcttgctttaagatttacgtgaaaccagagaaatgcacagtttagaattaagtattcccccctactaaggcaagacccttctgtgtactctacccattcctttgtggattatgagtttttttaccctagctaatgggaacaggcaatattcccgttcttctgtgactgtagtgtaccttggacctttccctggtcttggggtgtttcctcacttgcctgtgctgatcattacaaaggtaaataacccagcgaggaccctctctgttgtgctgtgtctgtgtgtagctctcttttccagtattctggaaatctctgcaaggatctgtcctcacatagagctcatcgcagttgtttcaatagggctcattgcaattgtttcctggctctcggggatcagtttttcttgacctgatgatgcaggatttttctcgacccctttgtcagatttgcaatgggggtgccctgtttactcagcctgccacactcaaccccttgcaggagggagcacgtgagcaagcgagtgggttcaggctggctgctttgggtgccggcaggagcaagctccatgcacaccctgtggcggtgcccaggtgggagtgcctgtgatccccagaatcccagagggcatgctacaatgccctcttagcttagctttaccgtttatggacagcagtgttatcagctcagtgggccccttgtcttgtcatgtggggtgtctacactccaccagcaagggcaaagggctagtgtgacagccttttttgggtacctgcatccagtgggtcccaagcccttgtgtggtgtccaagaagaacgaggtcatgctgacacttgaaggatggtggaggcagataattttatttagcgatggatgtctctcagtggagagaggagctggaaagggggatgggatggtcaggtaatcttccctgaagtcagagcgtccctctgaagttaagctatctttcctctgaagtccagctgtccctctgaagtcaagttgcttctctccagtcaagctgcttctctcctctactgactgagtccagggtctttagaggcacagaatgggggtgcagggcaagccatgggtagttttggaaaaggcaacattcgattggtaaaaagacattattcagaaagaaccaatcaggagagaacaggcaaacagggatagaagttctcaccttgggcagcaggtttcaggctactttgacttgaaggtgctgtttcactggggacccgcccctgtctgcctagaatttctctgcctcctgcttccatcgctgatgttcagtgttttgaagacattgtttcatatgttctgtctgtgttttggttgtttcaggcagaagcatgaatctggtctctgttactccatcttggctagaagtaggaatcatgccttttaattttgtccaattttcttactttaaaaatatttaaaattttaaatagaaaaattcatcagtctttaccttaatgggctctgtacttggtgtcatgcttaggaacatttttttgtttaagaacttataaaaaaatttacttctatttttcaaatatttgaattgtcttattcagatattttattaatatggaacactacattatacacaatttggaaaatagctaaaatatggggaatgggggagaacacctgtaattccatcaccaaacacactgtaaatttatatattgacatattttcttccatgtgttttcctgtgcctttattttttgtgtatttgtaatgctggtgtccatcatttagcatgttcatccatgtttatccagtgcatcgcatcattaacattttttatgttgctacataatcttcacagttgcattttaatgactgagttatatttcatcaaatgattatattacaattatattacctttatactgttaagcatgttagctatttcttcttaaagtatatgaagcaattatcagagagtacattttcagagaatcctaactttgcctacttacacatgaccccatgagagcagaagtgtgactaaggcccctgatgtgtcattgcatctgtctctaagcccattctagtacattcaataaaatcctatttgtagaaaaatgagaagaaaataaaaacatcaattcttaatagctcaatccatttcttattactcatatagttataaaacaaactttaaaaaacagcttagaatttctatatttagtatgcattaacatgctctctcaattactttctaatacttatttgtgcttgcttatttttaggaaagatactattcaagtccagtacatcataatgcagaattctgtatcagtaccaccaaaagatgaaggtaagttaaactgctgaggaaaatggtgatgagtctgttatagttttaatttgatacattgaatgtcattgacctctaatcataaggtaacttatttcctagaattaaaaataaaaattataattatatatgaaaactcatttcttttggtaaataatttgagtgtatatggattcctgagttttaaggacctgtctcctttataggctatagcgccttgagagcccagccatctcattccacccaaaactcacagagccctgcttattcactggcagttaactggcactaacagatatcagtaaaattaaaaagtgttggctttattgaagcaaaataacacaagtattttagtgagtagaagaatatatgcatatatattcacacacacatctgtagacatacacttagaggatatagaatttgtgtatacatttctttgcctgtttcccctgatatccatttaaaaagaaatagaaaaactattttactttttgcaatgtataaaaaataaaataatgattttttaacaggcacttctggaccttccagaagaacctgtacctccagatggaggtagagtcctttcttcatcaagagtaattaaattaccctcaccataaagggtacactctaaccccggggagaaataccagtctttccctgccccatctagtctcttccacacagaagagaagttctgacatgtatgagaaaaaagacatatctttaatgaggcaaaattaggttgccttagtggaacatgtagcttttagtgaaaggagggaatttgttatgaaggacccttaaatagagcaaacaccctttgatctctctaccagtgagaaaggtagtatcataactcttgagcacatggaatctggatttgaaactcagtcctaccacttaactgtaaaactttaggtgtatcacttgacctcagcttccacatctgtaaatctataaaatgaagataataagttccactctataggatatgtggagactaaaggaaatagcatatgtaaatcacctagcatattgttgtttgcatagtaggcacttatatgatgataaaactaccattctcaatggctattattaatatctgggacatcctcatctttgagactggtcagtgagatggccatgaggccgcctcttgcctgggatgcctaatggccttggaaggccaaacatgctccaaggggacccatggggagtaagcaggaattagaccgcttggtttgattcttacccaggagttgatccgaagagagagtgagagtccttgagactcacacaaaatccagccgggaacactagggcaagaaaggagatgggcaaaccccaactagaaataaagagcatgtgtttttcttgagtgttctctggtatatatcctctggaagatttgtgcagcacttggtagctgatgaagggtttgaaattcagtgtcctagctggtattacctttttttatccaagcaagcaaggagaagcttaggagaaaaaataatggaacaagtatcaggaaagctggactccattccatacctgcctccaaccagctgtggaaccccaggcaaagttattttgcccctgagcctcagttttctcattgaaaaatcgagaatgactaggtgttcctttcaggctctaaaaaggtgagtctatgtgagtaactaagcaacaagctgcttggctctggctgatacagagggagaaagcactcacacctcttggctgctttgcttctcatcacagtttgttttgttctgatgcctacctctctgggctatcacataagcttggatacttccattgaccggaaagtaagaccccttggccctacccagagctcaagtaaacctccttacccagtcttttctgggactaaagatgcttaagcccaatcctggaatttgacagaggatatataatagcttaaaaaaacctcaatcatgtgcctccattgtgataatcattctacctacaactttacatcctttatttaatcttcacaataagttagacgtaaaccttattttacaacttcaagattaggtactttttgccaagaccaccaaccagtaagtgactgatccaagatttgaactcagatctatcataaaatttataaagaatatttatataaattatagagaatatatatttataaagaatatttaatttataaagatatttctataagaatttacaatttataaagaatatttctaataatttttgatcatctcctttttctctcatcaaacatactatgcttaattacacatatgaatgcttaaagccattttaaaccaaagtgagcagaaattataacttaaattatggaaaattacatcaataaggaaaaataatatatgtgaatacatgtaagtcctatgaattgcccagttattcattaatttactcattcattcattcaaatgctttctgtatgtcttagattaatattaatattttttaacaaaagcatcagatgtattaattatgattctgtttatgatcaaatataatttatggctaggtacagcagctcccacctgtaatcccagcactttgggaggctgaggtgggaggataacttgaggccaggagttagagaccagcctgggcaacatagcaagactccatctctacaaaaaaatttcaaaattagctaggcgtgatggctcatgcctatagtcccagctacttggaaggctgagctaggaggattgcttgagcataggagtttgaggctgcagtgagctatgatcatgccatggcattccagcctggacaacagaacaagaccttgtctctaaatatatatatatatatatatatatatatatatatatatatatatatatacacacacacacccccacacacccacacgtaatatattacatatatatttgtttaattgcatgtacataatttgtgtgacatgagaagtttgctgggcacatgctatttattaattaaatgcagattgatttatttaacaaaccattgatggctagctataaattatgatacctttgaatttccaacttataaacacatacacacgtattatatgcatttctgtataaaattcagataagacatcaccaacagagttgtgaggcttaaattaaggaaaatatgctgtactaacatactgtccccaaacaaagttcatatggtagaagcaggtttaatgatcaccaaggtaattcatacgaggaactatcagatgctatgaagaatccaaaggtaaatcatacagagcctgagcttttaggctctaaaatcctgttggaacagcatatgtgcatgtccttaattagaataaagcatgactaatgctgtactagaagtgagtatgacatactttgaaaatcagaatgaaaggacagttggctaagccagagattttgaggctggtcaggaaacaaaatggaggagatgacatttgttcaggatattaacatatatgtacaagtcaagcaagtggaatttaagccaggggtttaaagctaggaagagctggcagcattattaatggagaaaacaaatttgaaattctggtttcttctatttaaatgttatctaatttcagataaagagatttaacattgtactgtcactctaacgataagttatactatattacagatttttctattataaactagtgtcaccgttattcctttctgtgtgagaatataatttatagaattttgagatgttcatgagacttattttgttacaattttctatatcattctttcaggatttagggatagaatttagttttccataacctcctttttttgtctgttattttcaaatgatgagctaaactgtgtttttcaaaaaagaggcatgaaaacaacataataaggccaactatttagatttggtgaaagaaagacaaagtcaccacactgattaaaaatgcaagtgaatttatttacttcccatataagaaaactcatacaggtgagcagtatcaccaaatgattctctgacagggacaatgtatgtgtcttatgtgctaagaagtagttcactgtgattatgccaattgaccattgaagtttgtatcttgggtagtcagaatgaattttaagttcctacacagttggttaatgcaagtctcattgttcattggtcaggaaggaatcttcatttaagtcaagtgagagtctgttttactggagtcaattcttttttttttttttttttgagacagagtctcactctgtcacccaggctggagtgcagtggtgcgatcttggctcactgcaagctccgcctcccaggttcatgccattctcctgcctcagcctcccaagtagctgggactacaggtgcctgcccccacccccggctaattttttgtatttttagtcaagacggggtttcaccatgttagccaggttggtctcaatctcctgacctcgtgatctgtccgcctcggcctcccaaagtgctgggattacaggtgtcagccactgcgcctgacctctttttttttttttttttttttttttttttttttttttttttgagacagagtcttgttctgtcacccaggctagagtgcagtggtgcaatctcggctcactgcaatctccacctcccgggttcaagtgattcttctgcctcagcctcccgaatagctgggactacaggagcgcaccaccacacgtggctaatttttgtatttttagtagagaggggattttaccatgttggccagactgatcttgaatttaaccccctggcttaaattccacttgcttgacttgtaccttgtaatccgcccacctcagcctcccaaggtgctgggattacaggcctgagccaccgtgcctggccgagtctctcaattcttagtcacttgtcagccttacagttaagtttgccatttcctagacaagtcttctgcaagtagaaaagttttcttatacagttcttctaccacttttctcaactctgtcataacatttgtgttatttaaaggtagttttcaaattgtgagtgttatttctatttcataaaagtaagaagtcggggtggagagagcaaatggtttgacgcagacacacaggcggccccctctggacccactgcagttagctggacatgtgctgtacagctactactaatttcccaaatctttacatgatttgactgcacaaccacagccattactgtctatcatgtgaattcatatttgaatcttttttaaaaacccctagattttctgattcaataaaaaatggttatgatactgtctaaaaaatgtattctatgtcttgcagacataaaagtgtatacttacagcttacagacctaacattttggtatttgtgaataagaatattagaactcaagtaaggcatacttagggaggagctagttaatactcatatcattcttaaagtttgaggaaaagaccttacttattttggacttagtatcaattaggtcttttataaagttcttgatgaattttctatctttagtaggatttaaagcgtcctggcatgtagtaggctctcaaaatgcatattaaattatgtataaaatgctttaaactctcaaacagtttttataaatcaatcacacctgttgctgtgaaaatattgtcatctttttttttaatgaaacaccaaagtggatggaattctaaggccaatgaaagcaaatgttcatttaacaagtatttattgcctttgaagagacaatgagcaaaagaagcaaaggggggaaaataaaaccaaactaagctcctctcttgcagctgttgtaattaataacactgggctgcctatccaagcaggggtttccttttatggggatttaacctgaaagtggtttattcttgttatctaatcgtagtttcactctttcgaacatggtatgaaagctattttcttaagctctctatttttttcttttcctccttggccatatctcccctttcctctccatctggtgaaggaacactgatctggacagctgagctctggtcattgttacatgcttctttttaggctctgtgatcttggccaaataagtaaacctcagtcccttcatctttccaatggagatagtaattctcatcctgtaacagtcaaatgcagtaggtatggttgattctcattatttgtagtgtttatattctagaaggctattaggaacactgaattagcaaatactgagccatttgttcctaggcgatattcaaggataggttcttgtgagcctctagtcacaacatttttgtcaacagctgatacatgaccttgttataagtgtatttctgttaaaagatactttatttaatagacagggttaattttttaacattgaactcagagacacagcactataactcatgccccaacaaagcttctctaatacaagtgttttctccgtagagcacatcccagttctcttgtgttaggagcactagacagcacccagcactatgctggagaccgtaagtaaacagtaaaatcaccaagaaaaagaagcacaaaaaatgcaaaaaaaaaaaagtgacagtttttgaaatgtaaaaaggatgcgtgtttacagtatgagagctgaaagaagaaggcaggacatcaccttgttctgcctaacctgggaatttgcgtgtcaagtggctcaaactttttttttctccacacatgtccatgaatgaccgtgaaagcaccacaagtattgattttggggttaaaaataaattttagcaagtaggcaaattcacaaatacagaatctacaaataatgagaatcaactgtatatgaatacaccttgtaaaaactttgaaagcacagtagaagcctcaggataatttacagaataaaagctattttttatgacgtttttctcagataaaatgactttgtgcattataaatttcaagttaataaagtaacatattatttgaaggtgaccataaattcttagttcagtaaagctacaaagaaaactactattgcaagatctgtgactctccagccctcacattgaacacacagtagcaaggagtaccactgtaatttgatgctttgcatttagtgcttaacattgctttatgacctcactattgggggaaaatatcattccctatgtattaccaaaatattatgtttccaaatatgtgatattcatatggaaacattttgatcttaacaagtggtgtaaatgctgttcttggacttttggtaccattttatgctgcagagcaagtacagattgacatttgcaagctggttttggttaactacttaatgttggaaattggaactttctgatgtaataacttctacaaaataccattgtgcattattagtatgttatactgttgacagaagaacaaatggaaaacacacacatgcctgtagaaatatccttttagaataaatggaaatgacctgggtggcctaaaaccataaagtagaccagccatatatggaagttgaaataaaatattagagtttaaaatattagtaaatttagattatgagtatttttgttgtttaaaatagctgtatttctttctttcctctttcttttcttttcttttttgttttgtttttgagacggagtttagctcttgttgtccaggctggagtgcaatggtgtgatcttggctcactgcaacctccgcctccctggttcaagcgattctcctgcctcagcctcccaagtacctgggatcacaggcacgcaccaccacacctggctaattttttgtatttttagtagaaacagggtttcaccgtgttagccaggctggtctcaaactcctgacctcaggtgatctgcctgccttggcctcccaaagtgctgggattacaggcgtgagccactgtggccggccgaaatagctgtatttctgttgcctgaaaaacaggctggtaatcggataatttacttgggtatgtatcattgtcagtgtggccgtttggcagcagagtctctcagaaattccaattaaccatgtaaatatatttcatagcatcacatctcactttgtcagaacccctgctgcctttatatcattaacataaatgcaggtgcaaatagcatttatgtactttgatagaaagcagttggagacatttcactgtgggacacaacacttccagattgtgtacatctgttcaaataatgtatccagccccagtgacatgaacacaaggatggaaacatctgcccctgagaccatttgcaatatagcagatgcttgcatctttatttatgcagatggttagtgtgatggcttgagcagggataaaagcaaagtagtttgacaggggtatttaggattttatgcaagccaaaaataaaggataggcattttctgtttttaaaaatctaatagcaataggaatagaaattcataaatctagtaatgctttttaatagagtaaacatattgttcttgtctttaaattaatgggcaacaaaatcctaaaaacatttatagaattccagcatctaacttgtattaattaggaagagcaacttatgattacttttgtttggataaaataattttaaatgactttgaatactttttgtttaaaaaaatccttcaggccgggcacggtggttcacacctgtaatcccagcactttgggaggctgaggcgggcggatcacctgcggtcaggagttcaaaaccagcctatccaacatagtgaaaccccatctctactaaaaatgcaaaacattagctgggtggggtggcgggcacctgtaatcccagctacttgggaggctgaggcaaaagaattgcttgaactggggagacggaagttgcagtgagttgagatcgtgccattgcactccagcctgggcaacaaaagcgaaactccgtctcaaaaaaaaaaaaattctttaaaaacactgctctgttttttgaaaagattatatactaccaagagtatcttgtgatgatatttcttaaaattgggggaaaaatataaatgtcatttgaatataacttatactccataaatataaatttaagtaagataagtttttgaaacattatataagatttttgtcaagcattttatttggttcatattctaatgttgacagctagtgatattttaattataattaatatttgtgttaggatgacttaccttttaatactttattatcaaaactctctcctattgatctgccatgttatattctcaaggaaacaaaggtgaagggaataaaacctaacaacaaaaagtaaaacatttctagatgtgattttctattctcattcacacaaacctgcccactcgtactcatcaacacacacaattatagaatctcaaaagacataggaagttagatttcatctaattcagttgttctcagactttgtagcttcaggaccctttacactctcaaaaattattgaggactctaaagagcatttgcttgtatgggttgtatctgtcaatatttaccatattgggtgattataaaaaatattgaaatatttatgtcattttgaaataacagctcattacatcttaacaaaaataacctagtttaacgaaattgactatactataaaactaatgacaaaaaccacaattacttttgcaccaacctaaatatttttctaaagcaaaaaaaataatgagaagactggcattgatttacattttctgcaaatatctttaaattctggcttcattgaagatagtttgagtctcatatctagtcctgcattcagtcagttgtgatgttgtatatgttgacatatttttttaaaagccagctttccagtagtcagaaaggaaggggatattttggtaggcttttcagataatcatggatatttttctttgatactatgccaaagtttgtcagatggaaacttctttcagtttaattgtactgtgaaatttgaaaccctgtccatgtacttttgtattctattagattttgagtctcatacttaagtgattcttttatccacgcatgtaacgttaaactaaactggtcatttagaaaacactagttaagtgagttaagcaaatcttccatatacttcattgtgcgatattttaaaaatcattcattaacgtaagcaccagttttcgtttttggttttttttttttgagacagagtctcgctctgtcgctcaggctggagtgcagtggcgcgatctcggctcactgcaagctccacctcccaggttcatgccattctcctgcctcagcctcccgagtagctgggactacaggtgcctgtcaccacgctcggctaattttttgtatttttagtagaggaggggtttcaccgtgttagccaggatggtctcgatctcctgacctcgtgatctgccttccttggcctcccaaagtgctgggattacaggcgtgagccaccgcgcctgacccataagcaccagttttacctgaaaagtaactactgggaaacttcaagttcctggtggtgaattcaaattttccaaaattccaattgccacttgaaagaaaatgacttttatcattggcaacaaatactgttagaagttctttcttgtaatgccaagttccattcattcacttttgagaaaatgtctgccagatacccaagtcttaatatgttcattcaacatatttcagcatatgtctgtcagccattttattcaagtaaaaattgtattccatgaaaaaagtagccaggtcagctttacggctgaattgagtgcttgtcctcagaacaacagtcctatttccatatgcagcagacatgtactctgactgtgaacgatttcatcacagaatattaaaaaggcatgtactcaaggatcaaaattttataaaactaaaattttgtactgcttttttgttgttccactgtgagagtaccacagtgaagaatatgactgcttgaacagtttgtgggcactaccttacttggctaagttgctagagaagttttaccccatcagcgcaacaagtgcaaatgtcgacacaaggcaaatgacatcttgatatgagtatgaaaagagtattcgggacccttcctgaggttctgcaaaccctactttgagaaacactaatctaatctaatcccctcttgctaaagagaggaaactacggccaggaaggccgaaggattattatcttgctcaaattcattccagcagtataataaatagaaacaccaaagccagacgtctactctctatcatacacgaaatgcagtttgtcttgttttctctgaggaactcctcccccagccttccgcaaaaagaaaattcctcagatccaaatcattacaccatagcactgatatattatcaagtttagtaaaggagcaggacttgccacataaggaatttagaaattgttttagcattttagacttttctttcagtcctagtgttctttagtgtcatcagttttagaagaaggtggtgtaagattaagaagtatctaagaaatgtatattatttttaaaattataaaagacctttgtcattttttttcttcatttttactcattgaagaattactttgtcgctgcttaaaagtgtcattaaatgtattgtgtaattgttgcttcagaaaagtcagattctggtgtgagcctgatttggtcaccagaagttctgttaaaagaaggccatagatacagtgctgtagggtattgcgcattgctatgtgtgagttcattaactacctctccagtgaccatgctgtagatgtctcttagaagaaagacatgttctctctctcctaacagttgcactgtgattggaaaaaggttgttcaaaaagatctttcttttctcaacattgagatggattatgtggcactcaccggtcactggaagagactgacatgtaaacagataaattgctaaacaacttagttctaagttcagcgtgttggaatggagggagaacagctttggtgccagacagtcctgggttaaaatccaagtctcaatacctgctttgtgatcttgcaagaagtgttgttttcacatctatggactggaggtgttaataccaagaattggtgaaggacttgagatagtagattaagcattcagtctaacttctgactgaggggcattttagttgttcaaaatagaacttcaggattctaggggttcgagggaagaatagaaatagatgagtagaggcggtgtatatgtacacatctaccatagattgtctcaggaagaaaaggaaggagatggggcctaacgactctttcttgttgctgttgtttttctgtttttgtgttcagcagtagcatagcagaaggaagccatgtcaatatggttgagagttaatagttcgttccttcagtaaaaattatgttgtacaactgctagctgctgatctggagactgagaccctgtcagtaacaaaacaaacccctgctcttttggagctcacattttagcgaggagacagataatgtaatatcatcgtgaaggtaagtacctcgaaggacagtgaagcagaaaaagaaaatagcaagtgatcacatggagctgagcagctccttttagacaggatggtcacaggccagcctccctgagagctggggagctcaccaatggtgcagtatccccgaggcacaaggggcctggaaggaagggtagcctccagaccagggttgggaatactccatttccttattttcagatgcacctttttgtacattttaatatatcaggatttgagcattgtatatttagagttatagtacttctcctttcccccatcacagaaaaggtttttataaatttatttgtgtggcataatcaaagacaaaaagggagtttacaaataaaagggacagtgaatgagttcccacataatagcctctcttttttccacgaagtcaatgtcaaaaaacattggcaagagagagatggccctggggatagggcaggggtgggacagagggagagtgcctcagaagagcagaggaaggaatgtgggccgccaagagtctcttagggacaagtaaatagactgtggaatcggttttgaactagaaactttaaacttagaacactgtccagcgttcacaatggttggatttctccagcaccaaataacaggcggtggaagtggagagcacaaggtggggccagctaggcaaggttctgtaggaagacagcaagggggcgaacctacaatatgaggggagtgcgtgtggatgctcagccaggaggccggctctggaatgggaggatctacctaaggagaccactcacaggcacacatagcctcggggcaaggagaagcagtgggctgtgtcatcactccatctccagggaggtgggaaagttaactctgacatactcttcatctgtggatgagaatagatattcccttcaacccaggtttcatagtcatcactaaaagacaataaacatattgatggagaagaaggatggcagaattcaaaggcaaaggaatccaaagtagtcaccacagctttcaaactctgccgccttcactcttggtactggctcaggtcagaatctgatggcatcagtcacacgacaggatctgtagatgccagctaactcatagacaactaacctggtcagctcctcaaaggtgaccagcacaaaccagtcacctcagtacccaccagtgcctgggacttcatgttcttttttattattttcttcaaagtgtcagtattgtagatggtctctctatgttaaggaaaggtgtgtcttcattaaagaaataaggaacagtcaagacttaccagcagaaatgttagggaataattatcagcataacaggggaatacttgacttcttaaagatccgtggctgtccacccttgtgcatttgtacttacaaatcatgaactatttgacataaaagctgaggtatagaaaaacgtgcagcaaaaaaatgttataaatcactgtgagttaaagataaatcagcagtgaagataaagcatctgtaaaactctactataaaacagtgaaacaattcattttttaaaatgtagtttgcacattcctcaaaaatacctcttttagataaagtgaacttacttttgaaattatagtataaaagcgatatctttgtaattttggttccctgcattttgaaacattgtgatctttaccactttagtttcataatcatagtgttttgaccaaaggcaagaaacttccagccttttgcatgtgtcctagtttaattgttccaactgacttcacattctgatgttgaaaccttatctttctgtttatcccactgaggaaaaggttttcttcaccaactgtcatcttgttagtcatcaaagatacttaactgttgcaactgctattgaaaactaaaagtaggccgggtgcaatggcttatgcttgtaattccaacacttagggaactgaggtaggaggacctcttgagcccaggagtttgaggccagcctgggaaacatggtgagacttcaactctacaaaaaaatgtttaaaaactagccacacagggtggtgtgcatgtgttgttccagctacttgggaggctgaggcaggaggatcacttgaacccaggagtttgaggctgcgggtgagctatgatcataccattgccctccagcctgggtgatagagcgagtccctgtctcaaaagaaaaagaaaatataaagaaaaagggcccatttttagtttgttggtggaagatttcttgccatgccatatctgtgcagctcactaaacctcttttgtggatgtttccatgttcaccagccccattgagaaacagctgactcggcaaatgtcagaatgttctggaaggacagcgtgcacaggtatttgtgatggtgatagaaggtcaaatgaaatgacctgctgcttttcaccatgttggagttcagttgtcaaggtccaaatttcaactgtaggactcaactgagtattaacaattttagtgataataacaacaaaaagaatattgagagaatggggttaacaaagcatttcagaagtttccatttgcctggcttagtgtccttggaaggtcattagctcttagttaacttcttatgctcctcggtcattcttagatttgagtaaagatactggcttggatgttttgtaataatgaataaaatcttttgcgtgctacaaattatttttgccaaaaaataaacaactttatctttctaaatgtattaaaaacaaacataatttcatatggctttcaaccattttttatcagaagcattccaaatcaaaaacaattccttccagaaataactaataaaagcttcataattagaatgaagaagaaattcattgaaattgagaatcattaaaatatattttaagtggtaaagctttttaaatgtacttttcccttgggacattaactatatggccctgaaagaataattagttacttcagtttatcaaccacattgtgttattttttttaattgccactagtattctaggtaattggcttttaaattctttcacaaagaatgcttgtttcctcttgcagcatgatatagccagccctccacatcctgttctgcatctgtgggttctgcatccatggattcaactaaccagagattgaaaaaaaatttcgaactgcatctatattgaatatgtatagacatttttttccttgtcatcattccctaaataatacagtaaaacaactatttacatagtatttacattgcactaggtattaaaagcagtctaaaggtgatttggggtatacaggaggaggtatgcataggttatgtgcaaacactgtgccattttacatcagggttttgagcatctatggatttgcgtgtctaaaggaggtcattgtcctgtggaggaaccaatcccccacagatggtaagggacaactgtatttatatatctcatttagtccattttaggggctatagttcctctttcagtgcctaacttttctttctgtactcaggctgtcttaaaacttataataatttattcggcaaaatactaaagtctgcaaggcaagtgtccctaaccccactctgggccccatcccccatcacagggccactgagatctgtacttaccccactttcttgaacaactactagggtagttgctttcttccctgctaggtttaagaccaacagttggcctcactacttactaggtataaacaaaagtgggaaggagtgtctccataaagtagctctttaaaatgcatgtatgttaaccctattcgcattgaattgttaatccaattagcactttatcaactgggatacaaaaatttacagaagggcaagtgggagtgggttctggacagggaatcaaagagcctggcaagacggattggattagatgttaggaaagattgagctaccagcgtgagtgtcaaaagagaggcacaagatttaaaatacagtttcattatttacaagcatagaggcaaaggaaaacttcctcttcacccctctgaaggttcactgataatgagctgacagatcagcagattaattggagaaaaggtatatacattgaatcagctgtgttacatgacacgagagctttcagaatgcagacccaaagatgggaaactgtccgttttcatgctgaggttcaacaaaacatggatagttgtggagaaatataattgaacaaaagggatgtcatctaatgctaatagagtgagtgaggaaacccagcaaggcttgtctgttttggattgctattgacctctctgtggaacatcccttccttctgggtatgaggcaggaccctctctggaatgcgggtccgatgacctacaatcaaacaagtaggtcagatcatttctttatggccaaggttagagtaataatttcaggttttatggttggctttggggaaaagtggttctggtttctatgactcaccttggggaagagggattctagattctatggctaatctcggggggaaaatgaagggccagggacagaagggcagagagatttttgcttctgaggtcttcattttgggaagctatcttttgaggccagcacaagtaatagccatttcttttctctttccttcatttacgtttcaaaatagaaacactactttaaggattcagaactacttccatatgctgatcattcaagatttgtgccttttttttcccaacaaaaataaatgtcaacaacctgatagtctctagcaagagaaagtggaaaactagtatatctgctgagcatctaacatgtagcaggaactacttgcaccatcatgggtatttttctcatttaatcctgacagggacctttgtaggcagatattattatgcccatttcatagatcctaacatttaggcacagagagtgaagtgccaaagccacaggtacatgacagagccaggagttgaaaccaaatctgtctaaaccccaaaacacacagtctttctactgaagatcagatgctggccataaccacacatagtagcttacagtcagcatgcagaggtagaaagagcctttggaataaaatgggctaggatttgagttccagcactgttacttatgagcttagaaatccttgtaaaacagacttggctgggcacagtggctcacgcctgtaatcacagcactttgggaggctgaggcaggtggattgcttaagtccaggagttcaagaccagcctggaaatatggcaaaacaatatataaaaaaatacaaaaattagcccagcatgttggtgtgcgcctgtagtcccagctacttgggaggctgacgtgggaggatcagctgagcctggggagtttgaagctgcagtgagccgtgattacaccactgcagtccagcctgagtgacagagtgagaccctgtctcaaaaacaaacagatacaacagtggttcctaattcaggttttttgggtattaagtgagataatgcatgttatatattttgcacagtacctaacccataaaatctgcttatcattgggataatattaaagaaacagtattgataaagaagctcagctcctcagaaaatgagaatttccttccctgcgaagtgaggtgatggatgcactgtttgacaagacaaatctcaaaggcctgtgctgagtggaagttgccctgcatgtcactggtggtgttaaggagggagaggggagttagctaagagcaataattgagcagaacacacaagtatgtcaaggagaatggactaaactagattcaggatacaagatctccagttaggaatgtgcttgtttcctttgcattgtctcaaatttcctgaaacttaggtctgagacatgatgactctaggaggtctccatgctgcagatatgtggactagaaatgcatttggcatcctgagtccttagaaacaaaagaacacttgtgcctattgccggcacgttttacagtgcatgctccatagtcagtgctcaataaattcctgttgactctgactgctgctgcagaccctggacagtagcttggggagagggtaggcaatggctaaaggtgtttataggtttttcaacaaaattaagttgcactcccttgtgttatgagacattgcttttatcccagacctctccagggttttaccatatttattttaactagagaccatcttgggaaacagtttgaaccccaagtggaatttattatttgaaagccaagtggcagggaaaacagggataacaacgaatgaaattgaaaatagagtatttcagtttaataaaattaaaaccagaacaacacctaaaatttttggctctttagtgaccaagacttggcagaactttcctcgtgagcctggatccagggggcctgtttcaagagcagggacacgcctctctttctctgcctgctcccttctgcactcttagcagtaggcctgtgggccccagcagatggaataatggaactttgcccaaaccagcgaccagaagaggttgaacaactttattcagaagcaacagagcaggctttggttctgccaatggacatcaggaagtgagctgtttgtagctatctagagaattgcctcatgtgcttgtctcttaatactatttgtggtagctgcattgtgaaacagtttaataaagctgggtaagacattggcacctagtgctattgagccctcattctttcctccactgcctttaacatgtaaatgatatccatcagatccaatcctttgatggcaatggaggaggaggaggacacacgttgcacattctccaaatatccaacagcctttctggatttctcagagtcctatggatagtaagtggcaaattcaaatataaaaatatgcttttgctttcaaatgactattaattttctgtgagttatctctaataagtgggctttcagaaagttagtataatttaatggtaatagaaattttaggccagatggggtggctcatacctgtaatcccaacactttgggaggccaaggcgggtggatcactttaggtcaggagttcaagaccagcctggccaacatggtgaaaccccgcctctactaaaaatagaaaaattagctgggcatggtggcacatgcctgtgatcccagctactcgggaggctaaggcaggagaatcacttgaacctgggaggtagaggttgcagtgagccaagatctcaccactgcattccagcctgggtgacagcaagactgtgtctcaaaaaaaaaaaaaaaagaaattttagaatatgacaagccatttctatttcaaaatttattttttctatttaaaatttagatatggtattatattttgtgataaattcagacaactttacatataatccccctgccctttgaaggaaaatgaagaaaaaggtcattgcttcaaattggagtgggacagctctgggttatgtggactttggcagattatttaacttcctcaaacctcatttttcttaatctgtgtaaggggaacagtaatacttattcgcagagtttggatgaagatttaattaaaagacctagcattaattctagaccataataagggctcaacacttcctagtttccctttaatcccagctagatcaatttctcaccaactgtaaatgtcacttttcaaaattgttattttagtatgcttaacatattaaaaacagcccatatttaagatcctaatattaagtattcctgttgaataattgtacacaattaattttactgagcgacacttttatgtcttcagttaataaaagtccatgtttagtacctgagagtcctgtgagtctctttaactgtgttacgggtagttgtgcaggatttccagaaattatgaatgtcagtggaaatttttacttctcattatttagtgcacagttctgtaagatctgtaatttagtgggtgcaggtgagagtttttagatcacaccatctgtgaaaggccttgtaaatgtgtagtggaataaaccactgttgtataactatattgccaagaaagactctgcagacatactatcttagtatgttagagtttttgaaaacttaatggcattttcagcttctgtaaggactcctgttgttcagactactaaaaaacaaaacaaaacaaaacaaaaaaacacgagttattctagcataactggcctttattgcaaattgccttattttatcttaaagagcaaatgtttggaggaataatttgtacaactccacttgtccttgggaggtaatgagctctaatacttctcagtgcttaactttggtggatagttatgcactgcctgtcggattacttactagattacttccctgatcgttagcaattcttgtcattaagtagtcaaggaaaataaaagacatgagccattctctgtgtgtacatctagacagtcatttatgcatagacacacactcatcacaaatatcccaaaagatactgctttttaaaactgattcaactagggaaactttcgttttcctttcattcattaaacaaatatgtctaagcacctcctgtgtgccaggcacagagcgtattcggtgggaagttagcacttatcccattcctgacttcttagttcctccaggtccctccacccaacaaaggccaccataatcctgatttcttttgtttcatttcagagatattctgcacatataaaggatatatttgtgtgtgtatcttctcatttttgttaatccaagtgatagcatactgtacatctcccatcttggagagtattccagatcaccctgattcattctttgtttttattactgcgtggtattacattgtatggttggatgattatcttattagcaccctgttggtggacacttaagtaattacgagggttttttctcttctgtttctgtggccttgctgtctttctcctgccttgcatttctactaacacattggtttagttatttatccataatgattctgagaaattggattcaacaccaccttcatggagacccttaaccttgtatgtacttcctgatagatccagacaagcataagtatgttaaatgtactcaacaagaccttatcttttcaccccacaaactctttgtgattagcttgtgatattgatcatgaaccacctgataagactttcaaccccagcatccacttctttaaatcgcagggaccttgaggagcacggactcagtttggcagacatcataccagtcgtctgggcctctgtcacttcaggttgcccacactgctcacactgatcggtgctctcgcagccaggacagagctcaggagtgtcctgttgttcccaggccacagtggcctccttttcctttgaatgcccttgctcttcctatgtgattttatttccactataatgtggagacatttgaagatccgttgaagcacatttacttcaaatatatcataattagctcactcccttttggtatggctctatgaagtatatctggtttcatttctggaaaccttaactgtcagaaggttgctttctcacacttggtcataaaaaataggaagccccttcccaacttaagtctttagagacttcgaggtgaccttgaccactgttgttgcttcagctgcatcttttgctgtctgttatttctgcctttcttcttgttgacattaccatgctctgcctccgaggttcagtttccctttctattgttcctctgtcttcgctctaatccccccactcttcctctctgtgtgtctgttttctgtagagcttgcttgtttcgttgactatttcagtttatgccccagcagcataatttaccattctcttttgttatttcctcaggtaggtagttgattattagctccttattctggcaataaataaaattacattttaagatgtctcagagaaatatcctctgtttcttttttaattttcaaaatatggaaatgttaaaggtcatttttaaattgtgttctttttttccccactgtttacaaaatttccaaggctcaacctctaaattatttatttttctcattgatcactctattaccactttaaaaattcaacaaatatttagtaaatctctgtcacgtactggacactgtaggccctgaagacacagaccaactccctgtcctctaggaattctagggaagccaggcagtatatgtgatactttatctattaatttttattttttgagatggagtctcgctctgtcacccaggctgcagtgcagtggcgctatttcggctcactgcaaactcccgggttcacgccattctccttcctcagcctcccgagtagctgggactacaggcgcccaccaccacgcccagctaatttttttgtatttttagtagagacggggtttcaccatgttagccaggatggtctcgatctgctgaccttgtcatccacctgtctcggcctcccaaagtgctgggattacaggcgtgagccaccgtgcccggcctatatgtgatactttattcatttattcattcattaattcattggagatgtagtctcactgtgttgcccaggctggagtacagtggcatgatctcagctcactgcaacctccacctcccaggtttaagcagttcccctgcctcagcctcccaagtagctgggattacaggcacttgccaccacactcggctaatttttgtatttttagtagaaacggtttcaccatgttgaccaggctggtctcaaactcctgacctcaagtgatctgcctgccttagcctcccaaagtgctgggattacaggcatatgccaccatgcctggccataaatggagcatatgttctagagaaaatgaaacaggaagagggagcagggagttcacaatgggatatagttttaaataaggtcatcagaggagatgctcgttgagaagaagccatttgtgcaaaaccttgaaggaaacgatgcagcaagtactggggatttactgagggaagagtgtcttgggtgggcgggagtagccaatgctcctcccagccaggagcctcctctcaggaggtgcatgcccagaacagcaaagaggccaccatggctggagtggagcaagtagaggaaatatgtcaaagaggctcctgagaacctttttaagcatgaggccttttaagccattgcagggattttggctttactctgagatgaagagccattggacagatttgagatgaggaagtcatagatcttgtgctatgatgtgttattgtcacatattctttcaagagggtgaattactaagcctttgttctagctcatcttgcggtaaatattttctgcccagttaggaggaagaactagtgataaatgacccaatattttctcttctcttccttccacaccccagatctgttgtgtaaatgcaaagaacattattactgttaatgtaattatttattaagccacatctctaagtaaccaaaagccatcaataattttaggctttctgcaaagtctctcaatcctgatttaaagtgtttatttatgacttattttggtacttcttccaaaaaaaaaaagatgagaaggtgaggtttaaaatgaaaaacatttaaatttaaaggctatgaaaataaaacttaaaaattaaaattatgtaggaagaagtagcaatccatacagatgactattgtcaagtgatttaccactcaatttacccataagcggaattcacggtaaccaaactcagaaggaaaacaacaaataacataattatctttgtctgatttttccagacaatagcactcactagtccttgtacttcttactctcgtgcaggctatcctgtgaacttatgtttcataatgtcctttttctttgcaaaacaattactttctaaaaataaactggtcaatataaatttcaccttatttctactaggttgcttgtttatttaggcggtgtcatttctgctgaaagaatcaacttcctgctaaaattgttaattcactcactgtaggcattaaaatcaaggttgacgggccgggcgcggtggctcatgcctgtaatcccagcactttgggaggccgaggcgggcagatcacctgaggtcgggagttcgagaccagcctgaccaacatggagaaaccctgtctctactaaaaatacaaaattagctgggtgtggtggcacatgcctgtaatcccagttacttgggaggttgaggcaggagaatcacttgaacccaggaggcagaggttgctgtgagccgagatcgcaccattgcactcacctaagcaataagagcaaaactccgtctcaaaaaaaaaaaagaaaaaagaaaatcaaggttgatgttacattttcttttcttttttttttgagacggagtctcgctcagactgttgcccaggctggagtatagtggtgcgatctcggctcactacaacctctgcctccagggttcaagtgattctcctgcctcagcctcgccagtagctgagattacaggcatctgccaccatgcctggctaattttttttttgtatttttagtagagacagagtttcatcacgtggccaggttggtttcaagctcctgacctcaagtgatccgcccatctcagcctcccaaagtgctaggattatagacgtgagcccccgtgcccagctgattttacattttcaattgtctgtttcactagattgtctgctacctaccttgtatcctctaacagatagtgttcagtcccctacccccaactctaaaatctaaaaaactctgaaaacagaagtttatgaaaagttgttacaaactcattcagaagcaaaaacttgaactgaaataaagacaatttaaaaatcttcatttgtccaacttgcgaatatttgcatgttttgctacagaagtggtaataggttcaattatgggtgccctgcagattccgctgggagttatgtaacatttagtacacgcatcttactacttttccaaaatttgaaaatataaattccaaaccacatcttcctccaaaaatttcagaaaagggattgtggacttggcaatagccaatcctgggataatgattggaataatgtaggtgcctagtaaatgtgaattgaagtttgattaatatgagatacttagaaattagaaacatttctgcagccaggtcttgtgaccttgagacctcagagaataaaatagataattcagtctttagaagcaggacaccaaaatgtttccttaattgttctcttaaggtagtagtaattgatcttaggtcaggctaataaatccagaaagaatgaagtgttaccctatcagtcaaaattgttcctattagtatcctagaaggtgctttttatgccattcacatattttgcatgttgtctctgtatctgtacttatcactttgtatctttctgttttttgttcaacattttttaaaggtgtcacatcagcttttttaatactggtgatttaattgcaaaagcacacataaacagtttgaaaggtgtgagaagaaattcgtaagtcacatggggaaacagcaacaaagctagcattcagtctggaatgcatccactgtgcaaaacaaattcaactgccagtgggtcaaatggtgtatcctgagattgagtgaaaaatgagtttgatacaagaagcgcttgttttatacaaaggatacagtgggaaatatcaagatgagatgaatataggctgtaccctcacaaagctgaagcttaatagggaaagcagaacatgtatataaaataataaactacatagcagaacataccagacatcatgtgaagatgagtggggataggttaaatggagaggatggacttgcagaatacatggatgagaaggacggaattttcgctgtcaagcagtgttgactagtagagatacacataaacacataaattattatggaaaatggtaaataacataataggagctaaggaaccatagataagtatagaaatccttggggaaggtaggcaggaattgatcttcaagctggtcttgagggacacaagattttgcccagaaggcttggaggtaggtcaaggaatctgttctgggcagagtaaataagatgcttgttgtttgaagtatcactaacagaacagttacatacagtaactctttatattttattgtcattgcaggtgaatcaaacatcccttctggaacaatacagagtaggaaaggtttgcagaataagagtcagtttaggaccattgcaccaaaaattgtgcccaaagtcctaacgtccagaatgctgccatgtcattcaccatcacgctctgatcaggtgaatctgggaccctccatcaactccaagctgctggggatgtccacccagaactatgccctgatgcaggttgctggccaggaggggacattttctcttgttgctctgccacatgttgcctcagctcagccaattcagaaacccagaatgtccctacctgaaaacctgaaacttcctattcctagatatcaaccccctagaaatagcaaagcatcaagaaagaaacccatcctgatctttcctaagagtggctgtagcaaagctcctgcccaaacccaaatgtgtcctcagatgtccccttccccacctcaccaccctgaactcctgtacaaacccagtccatttgaggaagtaccatcactagagcaagccccagccagcattagcacagctgcgctgaccaatggaagtgaccatggggacttgagaccaccagtgaccaacacccatggcagtctgaaccctcctgctaccccagcatcatccacaccagaggagcctgccaagcaggacctcacagctctttcagggaaagcacactttgtaagcaagataacatctagtaaaccttctgctgttgccagtgaaaaatttaaagaacaagttgatcttgcaaaaaccatgaccaatttatcaccaaccattcttggcaatgcagttcagttgatctcttcagtccccaaagggaaactgccaatcccaccctactcaagaatgaagacaatggaggtttacaaaatcaaatcagatgctaacattgcaggtttttctttaccaggacctaaggccgactgtgataagataccctccaccacagaaggctttaatgcagccaccaaggtggcaagcaggctacctgttccacaagtgtcacagcagagtgcctgtgaaagtgccttttgtccacccaccaaacttgatcttaaccacaaaacaaaactgaacagtggagcagcaaagagaaaaggaagaaaacggaaggtaccagatgaaattttggcatttcagggaaaaaggaggaaatatatcattaataagtgtagagatggtaaagaaagagtaaaaaatgatccccaagaattcagagaccaaaagctggggaccctgaaaaaataccgtagcattatgcccaaacctatcatggtcatacccactttggcctccctggcttctccaactacactacagtcccagatgcttgggggcctaggacaggatgttttgttaaataattcactcactcctaaatatcttggctgtaagcaagacaacagctcttcccctaagcccagctccgtgttcagaaatggattctctggcattaagaagccttggcacagatgtcacgtctgcaaccaccacttccagttcaaacagcaccttcgagaccacatgaatacacacaccaacagacgcccttacagttgtcggatttgtcgcaagtcctatgtacgtcctggcagcctgagcacacacatgaaacttcatcatggtgagaaccgtctgaagaaactcatgtgttgtgagttttgtgcaaaagtgtttggccacatccgagtctattttggccatctgaaagaagtgcatagggttgtgatcagcactgagcctgcgcccagtgaactgcagccaggagacataccaaagaacagagacatgagtgtgcgaggcatggagggatcattggagaggtgagtgccaatgtaatggagacctggcaagagagtctgttttgatttggggaagaggggaagatttcatattcagaaaggagagtttataaaacatctctaggattaagatttcataaagtagctatgtatacctcctagatctgtgaagaatgatcttgtttctctctggtttctgatcatccatacttggaattaccctaaccaatctagtaaagtactgtatatagttccagtggtctttacaagtaatttcccccaaaatcacatccacagaatttgcgttattttaaacagcatcatttgccccaaaatgcggcatgacccatggttggggactcagagtgggtgggtctgtcatgttgaccctaccttaaggtgcccagaccccaccctcttcatttgccctgtttttcccatcagttcgggttcactctttctggtgtcattcctttttgcaagcactgcttcctggtattattgctatgggatccttggggtgtcatttcaccagccggaaacctctgtggccagtggcgccttggcctgagttttgctctggcccattaggctcgttccacccacttggaacctagcaggctgcactcagctcatgctaccggcctagatcccatgcctgccaagggcgagccaggcacagagtggtgagggatgtgtgagtgagcgtggggtctggccactgcgcataggcaggcacgccggctgctgctgcaggccaggcagctccaggtgccacctccttgcaaggctgtggctggaccaggcacatcacaagcagcttccacggttggcaccaggaacatgatgttgcccagaagcttggagactagggagtcactgccctggctcagggggctcccaggacagagctccccaaagggccgcagctcttctcttcacctgctgtgtggcaagcaagaggcgtgtttcagcctgtttgtgttacagctctcttagccccaccatttggcaggtctcaagttcttgtcctgcgttcaggaagaatgaggtacacagagaagtagagggtgagcaagatgaagaggagctttattgagtgatagaacagctcagagttgaactgcagggggcagttcctctctgcaggcaggttttccccgtcatctcttgtgctctcagcagagagggtagctcctctctgccactggtcgtcccattgtctcttcaagtctggctaagtccggggcttttatgtgcctcagaggagaggaaatgcgtgcagttggtccatgggcagtcatggacagacccagaaaagcaccacaagttcccactccagtccacatgactggcaacctggcccccaggcttcagggcttctctggcttgaaggtggggcttcaccggggacctccccttttctgcccaggagcttctttgctccctgcttctgtttatggcacccaggctgttcatgctgagggggcacctgcaggctggcaccgagctgtcctgagcaccccttcctcagcctcccttccatgcttattggcacccaaagtctggagcaggccaatggggtaggaggtgggcatatcagcactgcctcaagcgtgtgcacacccaaccaggttacagcagagcccaggctcagccccagccttgctttgagattggagcaggtgctgacagcagggagaagccaggcagcaggagcaggtgcttcttgagcccgtggggggaaaggggccttcctggacccctgagagtgcagagatgcctggatctgcagccacagcagggtagctacagtgatgcctgggagggcaggagcgctcctgcctgctcccagcttccaagagcacaggggtgcctgggtcacagctgcagcttgggcagctgcaggcagttgtgcctggtaagctcccacaccgtcaacttggaaagggcagggctcgtgcttgtccccagctcccactggctccatgaagtgtggcaccacccctggcccagctctgcctcagggcccctctctacccactcctgcatgccctagtgtgctgttttcccctgccagcaggtgactcagcctggccccatcgcagtggctctcatggcggcaggtttcagggactgcccacctcctctccatgttttcccagcagcaacagcaggcaaggtgcaggtggtgcagtggccctggccaaccctgcacaaatgaacctgacactctcaggactagccccacaagtcccggctgcaccttcagctgggtgctcactggctcctttctgaatatgaaatcttctcctcttccccaaatgaaaacagacgctcttgccaaatgtagtttggacattgtacctaaaaatcaaaatctaactctaggaaaagaaggaagaagtgaggtttcatggttcattagtgaaaggcacagaggtcttaaaggggacagaaatgtctaagaaaaaggagaaactctagaaaagcaaggaagaaatagggtaggcaccctttatttttactgaacatgacagagtgagccaaaattgaatagaaggtattggtgctcaaggttagggagagccacagtgggtagggtgggaccgttaccttcaacagaaccgagggtgttcccgtgcccttcacgcgctcttacgtgactcttccacgtgattgctcctgtccctgtggtaaccaaagacgagttagctcgcctgggacagatgcgtgaagaggactgttgactaaatgaaccctggtagctggagaaatgtgtggccacaagcaggagtgacaattagtattcaccacggtccttgcagaaggtcttcccaggtgctctctgtttaccccagcccttgtctttctcgtcagtgttatgttttagatccctgaaggctgacagctgagaggaaagattccaattgcatttttccatgaaatcttatcttcattattattggccttttcagggaaaacaagtccaacctggaagaagacttccttctaaaccaggcagacgaagtcaaattacaaatcaaatgtggtcgttgtcagattactgctcagtcttttgcggaaataaaatttcatttacttgatgttcatggagaggaaattgagggcaggctacaagaagggaccttcccaggaagcaaggggactcaggaagagttggtgcagcacgctagccccgactggaaaaggcatcctgagagagggaagccggagaaggttcattcctcctccgaggaatcacatgcatgtccaagactgaaaaggcagctccaccttcatcagaatggcgtggaaatgctcatggaaaatgaaggaccccagtcaggaaccaacaagccaagggaaacctgccagggccctgagtgtcctggcctccacacgtttctcttgtggtcccattcaggctttaactgcctgctttgtgcagagatgctgggacggaaagaggacctcctccaccactggaagcaccagcataactgtgaggacccttccaaactgtgggctattttaaatacggtctccaaccagggagtgatcgaactttccagtgaagctgagaaatgagaccccaaggcagcctggggttaaggagagagctctgccgccaccttccttcagagcttcgtgctttatggtggtgcttagtcacaaagatcaaacaacaggattggtgtgagtgaacagaaatgatttttgtacatggttttattttcttaacgaaataaaatataagctctcgaagcatatttttctaactatatgcagtcttattttaaaatacgtactgattcttaatatcttagactttcagaataaataaaaagatcaaaatttgaagattgaaatttagcagaatataggctgttcttcaaatacagctctcagtgaaaacatgcatgtgtccttccttttgttcagatgttttctgcttatatagattgacaaatgtcaaaaatgtccaggcagcaaaacccttttaatctcaaccatagtatcaagttagatggtaaatgctgatatttattaaattctctggtttatttgaatatgatatagagcagtattttaataagattgtcatctacaataatttaaaatccatgttttcaggactcagatttttgtttcttgtaattttgctattttcttaaatgcacatttcattgaagattagttgttggcaagtcttatagctgtagtgttccatatcaaaataattttttaaaaaatttagtacttcagctaataaaaagtctacttgcttggtaaaaagttattttcaagtagtctttgggaccagaaaatttacaacctggaaaatgaactagatagttcagtccagatgtgtaggggtctcaactgctttccctcactcccaagtaacttcagagggttgtcgctagctgatcaattttagatggaactgtacttttcaagcccagttctctttgaaagtcagaagtaaatgattgcctcttaaattcctgggaaattacctcgaatcagtaaagttgtcatttgaagcttctggccatcctggctgcaaaatcattttcttagaaaagtggagtttcagcactcatcctactgataatctcagtcttggatgaaagcaccatacgtgtggccagccctgtttgctgaaactcagcccaggtatggtcataatattttgtgctcaaggaagttacctaaacagagaaagaactaaattctaattgataagctgatggatcttacatctttttttaatgtctgattttaaaagccagtgtttgtagacatgatttgcctcaaatagtacaagagaaaacttaatctttgtctttttgcaaatagttttgtaaatttgggaataagagagtagggatagaaatatctgaaagattgtgttgtggtttgtctgttgatcacgctttacccagtttcaaatagggaatatcagacctccactgtttgatagttttagaacttcttggttaataatgaagtcgctttaccattcaaaccagttcccagtttgttttttgaaatattggtctcaaagacattaccaaatgacttctacaaagaatactacttgaattcaaaccatgaaacttgaattcaaactatgaaataattcatagactgctcaatcctcagatgctaagtcgtattttagaaacactggccggttggccaaagcagagtggagtgtgtggagacaaaggtgtgggacagaatacacccacccagcactcggggaaagtctcaagtcccctagattgtgcaggagcccacctgtggcctttatttccccacatattcttacagcaaggccataggcagtctccagaaaggagtacagtgaggaatggggaaaagagcaaaggtatggagaagatatgattggctcatgattcagcactctggctggatccccatttcagagcagctgcatttccgagcatttcagagcagcagctccaatgtactaactaaatttagatgactcaacagagcactgatccatagggagagggagggcgcaggtggggagccatgaaaaagtgacactcatctttaagaaaattctttttgtttttttggagtgctgctcaggctggagtgcagtggcacgatctcggctcactgcaagctccacctgccgggttcacgccattctcctgcctcagcctcccgagtagctgggactacaggcacccgccaccatgcccggctaatttcctttttgtgtgtgtgtgtgtgtgtatttttagtagagacggggtttcaccatgttatccaggatggtctcgatctcctgacctcgtgatctgcccgtctcggcctcccaaagtgctgggattacaggcgtgagccactgcacccagccgaaaattctttttttaagataaggaaggttagtggggcataggaccctccccggatgtcagtgtgtatgggttcatttgtggtacagtgttacagttctcagcttttgaaaactcccctgccttacaatgcagacagccccagtgccacccaaaataaggagtttctggcccttactggtagtgcttcattgagaatggtgggaagagggcctcctactggggaggcaggaagatgagagagagtatttagctaaagttactttgggaacagctcagagcctttcttgggtgtggagatgttactggaacagtcccaacctgtatacttaggccagaggtggtgtggtgtgcaacaaagtgctccaatacttactgtgtgtggcctcgagagagtgtcccctcttaggctccattctctcctctgtgaaatgggggtgacaatcctatgtcaaggcactgttgtgaagagtaaaagagacacacacgaaatgcctggcacctgtgggccatgtgataactggtggctggtatttattaggcttttggccagacttgggagaagaggtattttgtaccatataaaagattgtaaaaagcttgagtagacagatcttaagtgccgaattcaaggatggaaactactaggaaccacagaagttggcatttttgcaggaaatgcattttatttttattttatatatttttttcgagttggagtcttgctctgtcatccaggctggagtgcagtggcatgatcttggctcactgcaacctccgcttcccgggttcaagcaattctcctgcctcagcctcccgagcagctgggattacaggcatgcgccaccacacctggctattttttttttttttttttttttagtagagatggggtttcaccatgttgggcaggctggtctcgaactcctgacctcatgatcttcctgtcttggccttccaaagtgctgggattacaggcgtgaggcaccgcacctggccatgaaatgcattttaatttttaaataaaaactagggtttggattgcatggaggtttggtaagtgtctattcaatcagaatagaaagcaacattcactaaattatttccatgccaggtttcactttggggcctgtattccttaggtctcagcccatgcagcacctcattcctgcggttgtccctctgcccttcccttgcccctgttatagctgtcatcatagcacccaccttgctgtccagaagctgagggtggacttgtccatctctcacactagataatgagcctcatgagggcaggaactgtgcctgtgaacagaggttcagcacagagccctagggtccagtggctgacatggaatagtgcacagcagatgtttgttgaaaaaaaaaaaaaaa
